United States Patent Application Publication US 2014/0057251 A1 - sequence listing, part 19

SEQ ID NO: 20659 - DNA, 3535 bp, Cannabis sativa
tggatagcaatgtgtgtagtgggtggtggcaaagggatcacgttggcaaggtgatctgggtagccacgtctaagctggattttgcggatgctctctgtggggaagcgatggcttgttgtttggccatggaggaagctaaagctcgtggtgttaaatttatcattgtcgagagtgattcaagggtagcaatcaacgccctcaatgggaaggagtcccgttgggagcttgagaactacacctcattttgtaaaagaaactctcatttttttatcggttgtagtttttagcatgttagtagacaatgtaattttgtagcccataatgtggccaagtggactttttctcttcagaggtttggttccgtgccattatcctctatgcccgatatcttattctgtaacgaccgcgaggtctaactaattttatgttatatatcagcacgcttttcttcttcttcttctttaaaaaaaaagatgattatgatacttggttgttaatggcttttttatatgttgtggctttgatattgttcgagtatgctactcgattgttaatggctcaacataaaaaccaattaattagaaacaagagtaaagtgaccaaagagaaaatcattaattcaaaaaaatatcaaaaaattaaactaattcttgtgtatcacgagtttcataattgataataaataattagacttaattgttgccactcctaaaaaaatgagtgtaaatctaaatctaaatctaaatcttactacctaaacttgcaatagtccaattttgaagtgctatataactacccaaacacctactcaattagcatgggttatttgaatagaaaatgacaatttaaatgagttaattcttatttgatgttgttcaattgttgttcgattacgctacttcactgctaatggcgtttatataaaattaatacataaaaatatatatatatatagtcaattaggtcgtattgcacctcgtcgacctccatttctgagtattgaagctcaactaattgcgagtaagttatatctgactccaacttgaatattttattttcagcgccattaaaaatctaatcttttacctcgcactcctgaatatcattgtacatcaaatagtttgaccctatcaatttaaaacaaaataaaataaataccacaacaaacatctacaaaatgtataaatcaaagacacatcatcaaaaatatatcgagtaccatcaaacaagtatcacgaagcagttaaacaaaccacgtaacttcctatgtatcgaacatgcatcgtgtaacaatcaaataagtactataactgatctatatcgagcaaatatcgaatactaattgaaatatcatccctaacctctgaaaaatactaattatcgagtatgcatcaaatgtatcaaattttatgtgaaaaaaatgagaaaactctagaaaacaaagatatgatgctctaaacaactaattgataaaatacacaactaaatgaatatttaatgtacaaaacaacaatatactttgaacaaaattaacattaacaataaatttaacataaaattacatactcatttcttttccaccaaaaaacaacataaaataattttgaaaattttgacattctcttcttatcttgtgataaggctcttcctcgatatatatatatgtttatctttcacaaataatagctctgaaaattagtagtgtaatgactatattttttggagagtaaagaagagagaaaatatttggagtgaagagtgaaagagaaaagagaaaaaggaaaagtaataaggcaaaatgggatatttttgggtttacacaaaagtgtacatacatagtgcaaaaaggtttctttattttttttaatgtaaaattatgctgaaatttttcatatagtatgccttagaattgattttttttgctttttttgtcagagaattaaaaaaagaaaatttgtcaaaaaaaaaaaattaataataatcaccactgataatattgaatacatcattaaatgcatttatatcctctttaaaaataatgcatttatatctttatatatttattttttacttttaaaaaattgcatttatatcaattataaatactagttcagttcctcctttcatgttggagaggctgtaactaataagatattgcgttataaaaggcgaaatgcaagtgagaaatgttggccatgaaataattatatatatatattaatgtatttattttaatacaaacaatctgaaaaagaaataagtattgtttattttattagctcctaaaatagctattcatcatttttctcaaactgctttctctcttctccactaacaaatattctttcaatcaaatactcaccaatgtcccaaaatttatcattaacattctaatcacattcgaatttttcaaatccttgttattattttaattcatgctttttgaatccatgtgtaagaaattcatcacttgtaaattttccaattttgagcaaattattatttgtgatcttttatgtgaaagaagaaagtggtgaggaaggaaattatctaattttggtttgaagaggatgtcgaatttgtatggagattatagtcaaaagattgattatgtattcaaagttgtgttgattggagattcagctgttgggaaaacccaactcttggctcgttttgcaaggaacgaatttagtattgattctaaggccacaattggggtcgaatttcagaccaaaactctaattattgatcaaaagactgttaaggcacaaatttgggatactgctggccaagaaaggtttgtttttgcccattcaattcttaatccattgctttctcttcttcttcttcttttatgttatgttatgttggtatacatagaaatataaatgaatctttgtgtgatgagatttgatttgggttttgtttcataataatgaatacatataacaaattggtcatattggtttttgacatgacataaatggatgacaataggtttgtatcttagacaccaaaaaaagaaaagaaaataatatgccttaatgaaggaggcatatgcattttcacaacatgtttgatgttccttttagggtcaaacatatgctattgtgtcacaaataggaataataccctttttgccttttctagcataccaaattaaataaaaattcaattagggcctgtcattttcatacatacctaagagaataatatctttgtagattgtggaattcaataatatcataattgaattgtgataatattcttaggtacagggcagtaacaagtgcatactacagaggagcagtgggggcaatgttagtatacgacatgacaaaacgacagtcgtttgatcacatggcaaggtggttagaggaattgaggggtcacgctgacaagaacattgtgatcatgttgattggtaacaaatgtgacttagggagtcttagagcagtgccaactgaggatgctcaagagtttgctcaaagagagaacctattttttatggagacatcagcacttgagtccacta

SEQ ID NO: 20660 - DNA, 3294 bp, Cannabis sativa
attaatataaattattcaataataaacattaacaatttaacattcacacatatatcaaatgttcaactttgaatttaataatcaaaaatatctttacaagtttttcagggcataaaccctaacaaatagcacgtactttcttggtgaatgcctcttcattagacccgagaagtcaaagaatggtgggatcttttctccacaaaccattcaaaagcatcgcataagacatgtgcagggagcgcaagtagaacctctctgctctagcctccttgtcagtcgcatcctaaatagtctgaattgcattttcccactttctttgcatggccgctaaagcaataaaagcttttgtgttgttggccaatttttgagtagcctccttcttcagctttttgatagttgcttggcaagtggtgttggctgcataagttgccttatagcataactccatgctattgtaataaactgacagagaatccattgacttttttagctggtcatagtcaccacaaaggctctggatgaccaactccttcttgcaaccctcttcttgtaggaagttgacctctcaggtctgagtatttaaaggcttgctttgggagactagcctagccttgaatttttccttgtcttctctagtttggcaaaggtcatcacagagagatgttagagtggattggattttccatttagcttcaactttgtggtcctcatacagcttccagcacttggtgttgaaatccttttacgtctgggccagcttagcattgcatgcatcttgtgcttcttttatatcttgggtggcttaggacttgatctgtgttccacctctatgtgaagagccccgttcttggaaaccaaggattggttcctaaaagagagttgccctagcttgatggtcattgcgcccacctctttagacgtcctctctgtgatcaaggccatttggcacagaacaaatgtaattagatgatcgtgcacaaccaaaaaacaacattgatggtacatgaaaaccagaacttagtactgctacctactacttcactgccataaataaggtgtacgtgtcacggctactactaacaacccacatcttggaagtgagttcatgcacacttgttctagcatctccgcagcaaaagctgccacctctcttcccaccctagggaccaagttttgactcactgccaccgtgtccagaactgggcctaatggtgaaggctaatggatcccttttttgatctcgattgtctttacgaaagacaacctagtagacctttttttgaagaaatagttgctccctttcatgacgcctcttcaaggtgacgacagcttttcccatcttggtgagaacctcatggctaagactggttggttttaatgggaaagaaaagtctaatggtgggatcctgcccagagtagtgcccggtctaggaggttggctggaaggtgtcagcctaggaagttgttgctctgttggattttgggtggagtggggtaatggttgtgtttatagcgaattagtttgggatagaactatctggttcatgacttgtggagtttgttgttgttgcggttgtggttgttattgttattgtggttgttgttgttactattgtggttgttgttgttgctgcagtggtgatggtgttgcagatgataaattggatgaagttggagtgaaagttgaagattttgcctttctggcaccctggcacagggaaaaggttgaccctttgcattaaggcttcgcgggggcacccttagcatttaggctgctcatagtaaatataagttgatcccatgaggactattatcaatttattatgaagattaaataacataaattaaaaagttaatagaatgagattctaagatattcaagaaatagttaaaagttaatttccaccctcaacaattatctttaatttctaataatgaatgttattccttattgtatgtaatcaaggagaagcactcaataattaactcttttacctaagcagtaaatccatggagcatgtaatttatttaacatagataagctttaaattcaatcgagatagattaatctaggcaataaattaatgaagcatataattcatttagcctaggttctattcttcatcacaattaaaaatacctttgacaatattagaaattgtaatttatcacaaacacttagaatacaagattattaggtgaatagtaatcctaagatgacaatagattaaagtaaaatataatttagcgatcatctaaacaagattaaaacaataatcatggcattgactatagaagaatagaaataattcaatataatcgaaactaaaattaacatcataaaaattaaagattcatgtctcgggttttgaaataacccttaacttaaaagaaaatactctgaagtagacattataataaaaatggtaataaatagtaagaatttaaggagaagaaaaagaacaataatgtagaacaatcgatgtcgcaatcttcgtcttcttcttgctatctctgagtttctctctcaaaaacataggtcaaaagtaccaaaattcgtaccgtagaagtcttatttataatcctcaaaattatctcaattagaaaaagataaaaatttgaagttttcccagaattcacctcctcactgcaaccacgactttctgccgaaaaatttctatcacgtgattagtattttggccattacttctttaatacaactcagaattagacgattaaagatgttccaaaaagatgagaacgagatctacaactttcatgttgagctccaagtctagttctactttcaagatcatcaaaatttgtaattaagttttgccttcgaaaactgagctccccaacttctactattttctaccaaaatgtgctaacatccctccaaatgactccaaatgcatgattagtctatagcctaacaaattataatcacactaatcaataatttaagaatattaatacataaattggtcacatttagaagataaatatagactcatcacaaaggtttacaagaaaccatcagtaaataaacaaaggcaaagaagatctgagaaatgggaaattaaggttgtgtgtcgacaatacctagaaattggaagttcaactagagtgagggcaacctttttacgaggaacctagaggaaaagaaccaatattcccagaggttgtgggtatggtcggtgtggctaattggacaataggaatcaagatacttgtccaatctaaagaagcccaatttctttttatttgtcctcatcgaggaggccttcacac

SEQ ID NO: 20661 - DNA, 3837 bp, Cannabis sativa
ttactatatgaatttttcttttgtaactacctacaagtatgattgaactctaattataataatacagtaattgataatattactgacaatgaaactttgttattatgttgggtttgaataaatttaagcaatttagattttactgacaagagaacacccactttctaggttgttcttattgaataaaataagaatattttacttaccttgcataatttttgagaattggtgctttaaattgtgttcttaaaatatattaatatatttaatttggtagtaaaactttattcatcgaattttggaaaaatctcataagttttttcaaaattcttagttcggtgcattttgttgaagtgatgctataacattgtgggcagatttaattaagtctatttttctatcactttcttttagtgtgctattatttatctagcaatctggtcacatttcaagcaaattttaatttctaccaagttattttttttatcattaaaccaccaatttatttttcttatactctatgttgagggtaattgataattgcattggatatataattacaatccctgaagagactattcacttattattatattacttgggtgattgcatacattaggttcattaatttttcacactaatatgactaaaattaaatacacaccactgtgtgtaaacattatgtgtaatttaagtgtctctaacattattacatatgccaaaataccatagaaaataaggagtaagtcatttgcataattttcatattttggcatttgttcattttgtaattaagtttttaaaacaaggacatttatttatttaatgacaggccactttggtctttcgctctttacatcttagaaaatttaatgtgaatgcctttcccaaatcctaaaacaggatttcgagaaatagttccttctttgatttttgtccacctacaaaagtttatttaaacaaaaaagaaattactaaacaatccacaatattaataagtttgtttagtctttgtgtaactactctacttaataaaaaaaaaacaaagcaattacataatgaaaaatgtacctatatttggtgagcaagacgtggaaaaaggttgccatgaacaccctactatactcagctcctgcacactgtctcattcctccaccaaaaggcatgaaattctttgatataatttcggaatcgagttcctgattacaaacaaattgtataacaattacatgattatctttttttagtttttactagtgaaaggctgaaataaagttttatttgagaaaatcaaaccttccaacgccatggattgaactcaagcggattttggaatgtgtttggacttaactgctgagcagaagtggccagcagaatggtccacccagccggaatagtaaatcctataaaaccaatatgatcccattaatcctaatacatatttacattattacatgaaaaaaaaaaggcatataatgatcaatcaaaccttttactgggatatctttgattgctttgcgtaataatcctggtgtaacatttcccagcctaagaatttcattgataacctgtatatgttttcccaaatcgataagcatgtcaaaactcatggcagctgaaattaatttatcaataaattcattttattgtaagactcacatgaagagtaaaaggcatcaatttgtattcgtcccatgtgagtgaagagtttgtattttctctgcttttgagaattgcttcctgctctgcctaacataaaatgaagaaaaacataattagtcatcataagaccaatgctatacatgtgaagaagattcgtacaaaaagacaattaaagtcaaactttgtttgcttactatcatctcctccaatactgaatgatgctctggaagtaacaaaaatgctaatgtaatcacagttgaaactgactcaaatgtagcaaacaagcccccaaaaagcagttgaccaatgaaatcttcagataagaatttctctttttccatgtccttacaaatctgatccaacaaatcaccatgattcaactcgggcgcattctttctctcctttagcttatccttcaacatggatactactttgttttggtcctaaattttcatataacaaagccaagctaataaattcaaatgtttcaatagaaataaatggtacaaataaagaagaaaaattcgattcttaccttgacattgatggtatgctgtgccaggtatgttcaaaggaaaagacatgaaaccatttatgattctactataagtttcagttatatttataggtgaagtttcagcatcgtaactgaaaactagcttggcgctaaactctaaaatcatctgttgataaataattacagggttaattaagtagtaagaccgtgaatattaaattggtaagaatgaaagtaacttacagctgaagcaactcgtttaatgtcaacagaatcttgagttgaccatgaagtgagagcattgttgactacttgttcaatctgaggtatgagtttttcttttaggcttttagtaccaaagtgattgagaaatatgtttctcccgtacttgtgtactgtaccaactgcgctggttcgagattcaccatcttgtgcaaagatttttgaaaaggtgtccatataccataactcaactagcttcccttcttgctgtaaaatgaaattattgaattctggatcagctgacattataacgggtcgtcctgctatgcttgttcggaaaatagtcccatatctgaaacatgatcaagttagtgcatgttaaatcaatgactattgactgaaatagatttcaagcaaattagaacaatttttctttttcattctaaaactttttttttaatttattttaaaaataatcataaattatttattgataatatacataattatatcatcaattatttattattaaccattattataaataatataaaatatgagtttaagcaaaatatttttatttaatcttgtatttaatatgatatctaatgttaaattattagaattattgtaccaaaaatactagagtatataataaatttgtgaaaaatgtacaccaatcatattattacacttataattatataaccatatttgcacataaaatagtgtgctcattatacaatatttttatataaaattatatgtggtaatatttatttttatagacattttagaagtataatattttaatataagttaaaatttaatataatattatataaaaatatagtatataatctaatttaatataacacatattatatataactaattaataaataataggaataacgaaaattgttgatgttcattgacaataacaactacttaattacataaaacaattatcaatttaatctaattttacaattatattttaaataagaaaatgaagtaatcaattaaatagtattaagcagaatactaaaattgacaagcttattgcaatggggttctctttgcattcatctttagatgtttttggcttcattccttttttaatgaaattatttattcttctaaaaaaaagtaaaatatagtagaaaatcaaaattttgttatagtttctaaaatatacaatgactaactatatcaggttagttaactatatcacttttcaccgtattttcctagtttatagtttttctctcaattatatcggcatccctaacaacaacaccctctggattcatactatatattgatcagcattcagcagatggaaaaaacataataaaaataaaaaaagaatagctaacacaattaatactatatgcactattgaagaaaataaatatatatatgatatatat

SEQ ID NO: 20662 - DNA, 2422 bp, Cannabis sativa
tataattattaaatagataaatttgacatttataggattagaattaaaatatgacatttgtaaaaaaaaaaggataaattgttaaacaaatgacaaaattgaatcctatggggcccacatatatgacaggcagcttaaagtaaaaagtaaatttataatttatgcttgctattatctattatttttatctttttttaatccatataatttaaattttatgcctagataaaatcctaataaataaagagatgactcttattttcataacctacatcagactcttttgtcaaacaattagaaaataaagagagccaccttctatttcgaatctatcctcttctctactgattatttcgaagcttatggttaaatgagagtatgcccactcatgtcaaatcaatacctagcatggtgaggaagattgtgtctaaccaaattgaaggagaaaagatcaagattcagatcttgataatgctatgctataggcaagaatcaagggttagagatctaaatggaaggagtcattatattctactgccatcaatgtaagaattttttaatctcttatgtgtttatttcattgttttaggaaatttatatttaagatattagattctaaattataattaacatatatattaataaattttgatcctcgtaaaacaagtttcaacaatttcctattctaagagacaaacttagtatggttttagcttccacccatagtttgagggggattcttagatgatagattagttaattactttagttagttagttagtttctgatagtgagctgttactttcactcttgatgtaactaacttctctcttgtaataatttatcttctgttagctttgtatataaaatctaacttatacaatcaatataatcaacaattaagatcaatacaattctctggttttatttacttttggttttcttctcttactcttctcgttcaacaattgtataatcttttagcccttatgacattatttagtcatcaatgaaattggtctttacttttttttttttaaaaaaaaaaaattaaatagaaaaaataaaaagaaggctcgtacaataaattatactgacactttgattaactgaaagtcaagcatgcctaacaatctgttcataatcaggaagaacacataatttggaagagatcattatcttacatgcctcagtttgagtatattttgaaattgaaattccatcaccatgtcaatgttttccatgacatttatgtgtgtatacagttaagattttgatgtttaatgtatgggtgttacttatttcttacacactatatgtagttttatctataataatatgtacattatcaagtctcccatgcattttagctacatttaaaaacaactgatgagctaattttaagagtatatttctttcttactccatctaattttactgcataatcacttctacaaaatgttaagtagacaaataaaatatagtgaaagaaaacagagtgaacacatgaatgtgttgggaacatgcttgcccatgttatcttttagaatctgaaaggaagagtagaatgaaaactagaaataaaaaagtgtacatctgcaatgaaaatggtgatctaggttttaaaagcgagcctgataaaagattggatttagaaattgaatttagaagaggaaaatcttgtgctttttttcatcttctcctacaaataccatggagacatctaatgttataaattttttaagtagactttttttaaaaataccactaataaaatttaatttaattttttttttttttaaaaaaacaagaattattacaatatttattaccagtaatgtctacaagaattgtagaatcatattagagaaaccaaacaggaagagcattaacaaaatataagaatttactgaaggcaaactcaggactctgcttcctccactgaagcttcaattcggagtagaacaaagccaacagcaacaccaacaagaacaagcccattcatgatcgctgcaatcctgaagatctcagcaacggcattgcaagtagaagaaagggccccacccccacctctgcttttcccctttgaaggagctctaaacgacatcataatcttctcaaacgactgctccgcacacatagggtgaccaagcgaaacgacgccgttgctcgctttaagcccggcaaaggagttgattccagtcaagtaattgactttccttgtcgccctccttgggctagacactgatgacgcagctataaatgttgctggagacagtgtagctgaggcactagccatgtttagttttcctgaaaattgatcaagaaaaaaaaaactagtcagaatttgtttttttcttcttcttttgttgagctctaaaaccaaaagataagaaatgaaagttttgggtgtttaaagaaa

SEQ ID NO: 20663 - DNA, 8159 bp, Cannabis sativa
  modified_base (986)..(1006): a, c, t, g, unknown or other
attgaaatttaggtgtataattggatatccaattaaaaaaccgatccaatccaattagtaattggattggattggattagattttgaggtctaaattgattggatcagataatgattttccaaatccaattattaattggattggatcggatgaggaaaaaaaaattagattgaatcggatgtccacccctaatatacaccgagaaaggttggtaagcacgttctctaatacttttaataaagtataatagtagttggagtactacctagactatctttgtgacccccgtccacagtagccttgttattaattcacttcaacactatatttttgggctggaaattcacttcaacacattactttgcgaaaattcaaagtaaatttggatttggatttggatttggattgttgctgatacatattcatatattcattattcaactatatattcaaagaatattatgcatgattttaaagaaataaatgtcataaaaatttagtaaataatatatttagtattatatattacctttagaaaatcattagtgtaaggtgtaaagggaagatccataggtgtccaacacgattcatcgataaagtccttgaaagcagtcccgttttccatgatgggagatgcggagactacggaggcggtgtagatgagtttcctcacgcttcctgatcttgcacagctcattgctatgcttcttgtccctgctaccgcagctgaaaccgtcttctcgtactgatcatatatatatatatatatagatatccatcaccgtaattatacatatttataactatatatatacacaaatatggcttaattaatcatgcaactaatttaggtcaattatttttaaataagattttttaaattgttgttatttttttttactattataatacaagtatatgtttgtttaacataattatatgaaaaataaaggagaattactttatatattatttttttaatttnnnnnnnnnnnnnnnnnnnnnagtttctaaggtggttgcagcgctagttgcattagggattgttatacaatttttgttgcaatttaagttgcagtgctagttgcaatagtgatttttatgtaaaattccgtaaaaatacgaaaaaataaataaataaaaaactattttaaagtataaaataataaaaaaaaaaaatcctcaaaataaataaatcttactaaaagaatgagattaatattattttgaaaatgatatccattcattataaaagaaaacaagacaagctagaaatctctctcttttctgttttgaaagctactagaaatgttggaaaaatacatttttttatccgcttgttatattacaattaataagatttatcttcttttatcctttgtaacttaaaataatatataatatattaaaaaaattaaaatcttagaaatgttcacatgacatttaagatattagatcagctgacaaattttcttgaaacattactaattatcactttttttatttaaattttcttgaataaagtagtctcttctagtttgttgtggatattgtcctacataaaataaatgatagagaattaaaccatatataagaatatggactatccacttattgctaattggttctgaaatagaacctcatgattctcaacatggtatcagagtcatagatcctatccgatccgcacctatacaaatagtgaccatgtccattctgatacgttcaagattaataagcaaaaaaaatagctatcatcttgagggagaatgttgtggacattgtcccacatagaataaatggtagagaattgaaccatatataagaatatgaactactacactcattgtcaattgattttgaggtgaaatcccattattctcaacatagtttcagaataagaaaaaaaaaagcatatataggttggataaggaaattaagtaaattaagtaccgtagcattgagttgaagaaagagagtggcgacatggaagacgaaagcacagccttgaatggcactgtcgaactcatctggtttgtaaatgtcagctttgaacagaaacaatcttctctctgcccctggaaacccctttaaaacacttaccttcgattcgtcatctgtgcttcatcaccacaacaaatcaatatatatcatttatatatataaaattatgaaaagcaaaattataacagtatttacccaaattccttagagttgcatgaactgtgtaacccctctctaaaagtttcttgacgagccaagaggcaatatagcctgatcctcctgtaacgcataccctgcactcatcactcttctccttatttactactactccctccatttgtactgcttaattttctccacaaacacaactattctttttctgtcaattatatatatatataaatcaaaatttactgtagtgtttgtgtgttaaaccagtacatatcaactaatttaatttatatacatacaatacatagtactaacaagaagaaagttcaagagagggtttggagatgccatttggtacggcagaaaatgagccacgtggcatgcagattaaaatccatgcgttcgttatggctattagctaacagccatttcggtacatttccaatgcagtctttgtttttgtttttgacaaattttatttagaccaaaattttttaaagagacacattttaataatttttgttttgagtttttttttttttttttttgaatttatattcttaaaaaatataaatcaaataaaaataaataatattttaaatattatgaaataaaataaaaaattatataactttttttttaaaaaaataatatgtacatataattaaaaaatatataaaaataaaatcaatttataatataagatatacttatcattttattttataagatacaaataaaacttaatttactattattatttttttcttaaatattactaaggctagtatgttgtggtgaagaaaatctcaatttcattcaatgaatactacacctctcaattttttgtctggtagcaaacttgtactaaagccaactaacacctcaaaaaccaaacttgttaggtgtggaaaacaagaggttctaaatactcaattcaataccaattgcatgatttaatctaattcaatctagatgatttaatccaattcaatttacataccctcacttatgtagattaaaaaatttaaaatctacacctctacgaattagatattaattgatatataaaaaagattgatccaatataaaccacacatatttatatatatttttaaaaataatatatataattaatattttaatgcaagaagatacttatttaaaaatttaatacatatgatacaaatatatttcataacttaataaatcaaatgtatattttattcttacgattaaacgaacatgcaacctggaagctaatctgggtacctagggtttcaaccagtgcttaggttaacattcccaactagggtttcaatttttaggaccgtcttggtgaaaatgggtcaaaacttgcattgagacgtaaactagacataccacagacatatttgaggcatcaaaaatcagaatcgagcaagttcatttttgagcacccggggccccgagcacccgagcacccaagttagaaatttattaatctaggcaccttctaagtatcaaatcaattcaactttttcatcttcttcatcttcatcaaaaatgaaaaaataagtcttttcagggaagaaacaacacttcttgggtgctaaaaacaaggcccagcgcccaggttgatacctggggatggcccaacacctatgttgaaatttttttaacctatgctttttttgatgatattttccaagaaccttcaccgttttcagaaaatattaagattcaactattttcgaggaccaaacggaacttctaaaaggccataactaagacccagcgcccaggttgacacctagtgctcgacccagcacccaggttgacaactggggctatttttaatcaaggtcaccaaaaatattcttggcattttttttttcataaaaaataataaagattcaagcaaactcgggaagaaaactacaaactcgagcccttaaaaacagtgcccagcacccaggttgacaatcaacttgggacactgcttttgattgctcaaatgtcaatctgattcaaccaatgaatccagaatggtcaaaaacggggtaggagaccttgtcctacagttttagaagcattagcagtattaaaatgagatcttaggagctcaaaaatgagtacatagtaccccaagttaacaaatggcctagtgcattggcatctgcttatccgattctaattttgtttcgactgtccgtctagtttttcaaaataactaagatccatgaagtcaaataagttaaattcacaactttacatttctcatttctgacatgggaaactcactcagaaatgaagagtttcgagtctctcatttccgcaaaatagcaacatctttgagaataggtgaccagctttgtcagaacacgaaaacaaactaagtgaagtcaaaatagcaattaggcatcttaaagtacatctcttgaacatttttacacttacacagcgtccaggttaacgtcaaatgtcaacatgggtattgggatgtcaacttggacgctgggtcatgagcagtcttcagtaaaatagtcataactcactcaatattgatatgattgacgcaatttaacttgtatttcgaagctaatttaatactctatcaagtcatgttttacactttaatcgtaataaactaacaagaatagtctaaaaaataatttttgcacttttcacgtcagttctaaatagacgtttgattttttcattgatggttgataaacgacgctattgaaaatggattttgcgtttgtggtataggcatcagtcctatgaaccgatagtcaaagtatagccttcctttttaaagcgattcctaatccttttttttagtagtagttgtaaatcctaataacaggttctaattcaatgtcatcatcaatttcatgcaatttacattaaaaaaaaattatcctttctttaaaagcttgaagagaaaaaattattttaactacccgtaattttttacattagtgggtttaaaaataaaaataataattatatattattacaaattttaattgataaaaattatagaaaatagaaattgttacccgtatttctagataaatgacacgtgtacctttaaagttccaaaattaaccatgacaggcccattcacatacccaactaaaccagtaagtcacaacgaagtccaaacacggctttggatctaacgatacaaagttgagcccttgctggtctcggaaggatatctcacccagagaatgaaaggctaaatggaacaaatttggatgccctcacggggtagtctaaaataggaaattgaagaggtgtctgggtgttgtcctacatggcacccctttgatacaaaatcccatggaactaggagtttgtcccttaacgtcggacgtgggaaaggcgtacaacataaaaagctacataccattttgtccaatgtctactaccctgacatcaactgcacaccgtcgatgatgcatgcccacctgtcaccattaaatggtaccatttcatacggacaacggttatctcacaaatttggcctcacttaatcgacctaatgttaatataataatgtattttacctcatcagcaggtttaattttactaatgtaaatcctaataggtccgagtctattcaacaacctgactccaacctataaataggactttaccctttaatgcaaatggttacaatttccagctaggctaaaaattacaaactaaggcaataatgtgtaaaatactccatagccaaagaattttaataatattcactagtggactaaggctcattaacgaacaaaccatgtaaaattctttgtcttatttatttcaaaattatcttttctttgcttaatcttttattaattcaattttcaaaaatttcgataaacagtaacaataatcattacaaggaaggaaaatgtttttaactaattttttttttaaaacaaatgtgaaatgagttattttatcaaatataattagtgtttgtagtatatctataaacactaattcaataatcgataacttttaaaagttgtataattttatctctaataaccaataattcaatcaaaaaccaaatttattatttccattattaataacattaataaagataaagatactatatgtaaaaaaaaaataaaaataaaaatactaataacaaaattaataaataaaaaatataaacttaattgataaataaaaaagaataattagtatttttatttccgaactttttatactacagagttaattgatgtaagcatatttttaattttcatatagataaaaaaaattgattaagtagttaatagaaactcaaatattttttattaattactagttattggattaaaatctattaatttaatattttaaaaattaatatttataattattttttagttattataaacagagaaattaccccatataatttttttttaactttttttttttaaatttacggtttagatttttaaagtagttgtaacactagttgcaataggagtttctgtcggattttttgttgcaatttaagttgcagcgctagttgcaatggggtttctatatagaatttcgtaaaaaagaaaaaaaaaattattttaaaatgtaaaaatgaaaaaatcacttctaaaaattaatgtttcgtatataaaaaatggcaataaataagttttaaaaaatgatagtgagtttggcttttgtccatcttcaatttttttattattatatatgagtgggagaagtaatcttagtctatagtcattagtcaatgtccatctccgttttctttcatttttatcataatataacgacgattatttccataattatctattagctggaggcatagagtaataatctttgcaggcatagtgtattgggcataatctcattttttttttttttttttttcataaaaaagagaagtacgtaacttacaaatggacaagtgtttgtccatcttcatgtatctaccaatgagggttgagctaatttttatagactacaaaagtcgtggtcttatctttatatatatgtcctatatctttattgtttctatatgttttcacttaaatcatggcgtgggattgatagacttatttgtttaattttaaatacaaataattaagtaagaaagcaccactagatagaaatggatttccttttcaaaaaagaataaaaaatagatttgacaagtttaaaatgtaattagtgctataaatatgagtcaggttttttgacatgatacaaaataaacacgagtccgaaaggcacaaaaaaatacgagtttgggcatgacacgacatgatgctacgaattggcacgacacggcacgaaaaatatgtccttaattagcacgacacaacatgagaagcacgacacgtaagcacgaatagtctagcctgaaaagtacgacacacgacatattaaaaaactttataatttattaataatcataataaaataagatatagattttttaattataaataagttaaaataataataaaactttaatataatacagaatattataattctaaacgtgccttaaaaccccatgtatttgtaaaagggaattgccgatagttgaaaactgttagctatactataggtgatggttttaaatcgatggcaattctcatgcttcaattttacgcgtttcagatctgaaatgtcatttccagcattttaaatttcaaatttttactttccctatcttaaattttatttctctccttttaagatacaaccccaaaaaaaatgatatctcatttttcaaagtcatttgtaaatttcatttatttttccgctctctctcatttgcgaccacgagccacgtcatccctctcctccactctccctcactctgtccctttcctatgctctctcgtggtagcataaaagtaagcacaacattctcttatttgttgtttaaatttctatcagtcatgatttggtttgttgatattgatctgtgtgtgtgtgt

SEQ ID NO: 20664 - DNA, 2863 bp, Cannabis sativa
aaaaaaaaaatgtacaaattacttcttcatctggagcagtccacttaatctcaggttcttcttcattactatagacgttcggctctttaaaaagctgcctagcctcttgatatggccaattatctggtatttggtacctgaataagtaataaaattaattgctgaacgggaacagtgatgagactaaatataaagtacaccgctctacaaactaagaaggaatgttctccatctgctgttaagtcaaaaaaataaaaaataaaaaaaaaagaaagaactctcagtaagcttgcaaaattgtatatttctttcacatgtatattttgcaattgtcaatgataagcagaatggtaacaaacctgcatatgccaacttgctaaaccatttctatagaataatattctaagatacaagtattgtcatttttattactaatcgctttgataacaataattatattcaaaaagataaaacaaaataatgattttaagtccaagcatcataatcaagtaaaccacctctctttgtttaggttctccagtatattctctatggagccatgttgacggatgagcttcaatgcagtcagtcctccgatacctgtatcatatatatatttctgggtattcaaaacttgatgcatcatataagaaaacaaacttcatagtgaagcttcgtgctaaaagaaaacacaatataaataaatatctaataaacaagaaagctagcacccaacggtaatgtgtgtgggagacacatttgtgggactaaattacctcgaatgttctcacaataatcacatccagaaagaatgcacagatcaatgaactgatccatggtaagatttagctcctccaaaatctagaaaaagatcataatcagaatattttatggtcagaatatgcaacaccccttagaatatattatggtgttaaagaagcacctttgcaacttcaaattccatgactgggatttttcttgagctgggatccatcaaatggcgtagaaatctaggagctccaaatgttagagaatccatatcttcagaagccacaccataaacctaaaattaaacacacaaaaaaaattaatattgatgtattactcatcattgacacattcacgcagagcaaagcataattagttttatcaacgaaaccacatagacaccagtactaatgtaaacaagttttaaacaatcaaacaaaaccagtatatcatccctcaaataggatgaatggatttgtcaaattgaaattcttatacaatgatgtcaaaatatataggttctgcagttgctatatgccttgatattttttttccttcattacattaaatgtagtacaaaaaataattaagaagatagaagattttcttgccttccctgatttgcaaagtgcagcacactgtgcttctgcttctgaaggagcctatgaaaaccaaaccatttcccttataagcaaggcagtatttgtatatcctatatacttaaaggtcgcatcagccaaattttactccaaaatgaactaatgttacctcaataacaggaacacccatgagctttaatagccttttgcagtcatcattgtgctgctttgtaacctgccaaatataagagcacttcagattaaatacatacacaacagacaatacatgtacggatcaagttaaatgtgtagcagttgataaataagcaacagaagtaaacaacccaccttcacagtccgtttgctgaatttctcaatgtcttccttattgccagactacaaggacaagaaaaaatgactgcgttgtttaccataattttaaagtagaaaagaaacccaagtaaagtattagaacataaagtaaacatggaagtacgtacctccatggcagccgccaaatcctcagtagcatctgccctctttgagtacctgtgtcataatcaagttgtaagaaaaacactaggagagaaagaaaaagtttttcaattcacgtttcttttcttgtttatgctgggtgttacagtttgattagtaagaaagaggttttaaaaaaaaaaacaagcttgatggtactagaaagtagtaccgtttcgccagttcttgctttttcatctctggaggtttcccgtcaaaaacataactgaatttaaatataacaaattagttcaaaactcatcaatcagccaatgcattatgacacaaacacagcatatagacttacactggcttgattccggcctcaagaagcctaattgttctcgcaaacataccttgcaaatgactgcaaaacgccaaggaaaacaaaaaccatgtctttacatatttattcattatgccaaaacaacattacacaactcaagaaagttcaataacaaagtattggctttttagcaaaatttcaatcaaaatagcaaaagttgcttaagtgaagagtttgtcaaacctagtaacttcaccagcttcattggtcaacatctcagccccacttcttcccacaacaatctaccggaattgaaagaaacccgcatcaaaataaagcttaaaagataaaacaaaacagaacatgcatatgtgcataaatacgaagagaagaatgtgcatacaagaaattgatatatgctcatgctggcatccacagcgatcttacggccaaaatagctttcgaatttttgctctttcatggacttgggtgcattgtccgccaaaagcttcgttaaaccctaaaaggccgaagaataaaaaagaaagacagaatctaaaatcggagtaacaaaaaaaggcatgaaccaaaatgagaaagtgatatcagaaatgaagtaccttaatacccattattgatataggtcggagaagaggatggtctgtagaatttggag

SEQ ID NO: 20665 - DNA, 4215 bp, Cannabis sativa
  modified_base (1841)..(1864): a, c, t, g, unknown or other
  modified_base (2297)..(2313): a, c, t, g, unknown or other
  modified_base (4178)..(4185): a, c, t, g, unknown or other
gtaaaataatttccaacagtaggaccattagagagtcagactttcatatagtttagaacgttacaatttgcggggcatcattgttagacattggaggtttcaaaaaattagcagggattgataataaccaaactaccttggagactttaaattctttgatgtatgttaaggggcaaaatagtcatttcttttagtaccttaatttgtcttttgtggcattagtattcagattattaagctaggattacttaatattagttaatattatctcttgaaggggaaaatgttagaaaaacgtagaaacaactatctctctacaaccctctctctctctcgaattcgcaaggaaggacagctagggattgtgagttttctgctcatcattaaggattctagcttaattttaaggtcccaacccaaggtataatttcttagcctctccctctttgattttctcaagcttaagatgagttatgatggttgaatttgagtagtaggctactgttttgtatattagtgtgtgattttgtgtactgaagtttaattgagattgtttatgttgaattgagttgatttttttggttatagtgatgtttgtgcaaggtttgagtttaaaaattcaaaccttgccctctaatggtggattgagtttccgtgtttaattatgaggtttattgcttgattttggttcattgaggtatatacaggtgtcttggagattattgagaaatttagagttgaattgtagtgttgaggacatttttggtggttcctgcactaaaccggtcgaccagttcaggggaacctgtagcaactggtcgaccggttggtcctcaagaaagtcccatcaaactggaattccagttggggaaccagtctaccggttttggtattttggtcaaccctagttttcccacttttgtaatatttagggtattgccatattattcatcaatagggaaatttctagttttaattttaggaccccagaaagtgttttagcgtgtctctcatcaggattacaaatattgtgttttaaggccctgtaaagcgtcgagctgctattccaatcaggttgatcagcacacctaagcacgaaaataagataagatagcataaagtatatatatgtgaatgaatgcatgttattatttgtttacactactaacactgactaagatgtagctttaaggggtgttagtacagtgtagggttttagggtagttacagtgttgccaacacgagtaccacggggtacggagtgcatgtggtacaacacccagtaactcccggaagtataataatgaccctaccaacacaagtacggagtcggtactctagtgcatatggtaaagtggtcgtacttccattgagaacgttcttaaccatttagtgagcttggtaattgggctcaggtcggcttaagcataaagccggtattgcattgtttatatagatattatgcatattttactgagtcagtcaactcatcagattgctacttgtgtaggtaagggtaacgctaagctcgaggagcagtgagttgggccttggcaagaattgtacatatcgcggcgcagtgcaacctggagggttccaatcttataacattttaggtttcattttgttgttgccctgtagtttgtaagagaaataataaatattatgtaactttatatgtaatacatgtattttcaacaacagttttaaactcgggatcccgatttacgaggttatataaatataatataataagatacttttcgaattagcaaatttttaaatatgggcattacatctatggtagataagttttattgtatagtatattattttatttnnnnnnnnnnnnnnnnnnnnnnnnttttattatatataaatgtgatatgtaattttataagtacggtttacttattttatggctatatataattttgttaatatggtatatacaattcttttaatacatattattttattttattttattttttattataggcatatatgttttattatatggtatatagtttttgttgtgtatagtatagcatttatttaagataatatttagtttctattttggtatatattgattatatataaattttttattatgtatacatattttaatagtagtatatataaattttagtttctattttgttagcatgatatataaattttgagtattaatttagtattgttataatttttttttttttgtggtatataattttattattacggtatattaatttttagtaatataaatatatcaaatactgttgtatatnnnnnnnnnnnnnnnnnatttatttatttttgttacaataaattaatatgcaatactaaaaaaaattatataacttaatttaattattatatattttttaaaaaattaatatataataaatgtattataatttttagatttgtattagctaattgaatatatttagtcattttgttaatttttttaaaaaataatatttactaacttagttttcaaatttaaaactattttgcaacttaggccaaaaataaaagtgaagtaaagtcttcaataacatagttagcctcgcctctgaatatagcactaaagtagtccgtgaattccttagcaataagttgtctagaggaaaacccaaataccattccgatccaaaatgcactcaaaagacaaaagtattcttctttataagtaataattatattttcttaaaattaatactaaaaatacaaatcaatcacatttttttaaataatgtcatgttatcatggaataatttatgaaaaataatttgaccaaaactcaaaacccaaaaccacacactcatctttataaatgtgttataaataatattagagaccttaaatgttaatattatatctcaaaagcaaaacgtttttttttttttttttttttttgatagccaataattttattttcttgaaatatatactaaaatacaaatcaatcacattttttttaaaataatgccatatcattaaataatttatgagtgaatactatcaatactatatcaaaaaaaatatgaaataataatattgacaaaaaaaaatgttaagtaaagataaaataacttgaccaaaacccaaaaaccaacactcatctttaaaatagattatagattataaattatagatacattatagattataaattatagatataaataaactaacatttacaataattctacactaacaacaatttttctcaaatctgttttttttaacacaaaaaatatcacaatttttacaaaatatataaaatacaaataaaactaacacatatataatttattgaaaaaaaatcatacaacaaaaatagcatagtacttttcacaaatgaaattttttgatgacttcttattcaaacctactaatttttctaaatgtacatttccccaaatctgaaaaaattaattttcaaaaattatttactgatttaaataaataaatgtgtaagaaaaaactaaattaatatatattatattacaaaacataaaatattactaaaatctataaatatatattatatattataaatcattacataagagagtttagatataagaaattaatttaataaaataatatatatatatatagatattatattataggggctattacagtagagattgggtattttacctattaatagggatagtaatttatagtctttggtttaatctaagctcaaattaatccttgaaaactacacaataattaatatattttttaatttataattaaacttgaatattattaattatacgttcaactaacaaactccaaacttaactcaaaaccaattcttttttttttactttttattttatgtctatctaaaatttagttctaattacatttttctttttaattttgaatttacatagaaaaatattttatttaaatttattttaaaacaataattatacttataaaaaattataatatattcaacttataataattttataataatcactcttaaaataattaaaatgtcatgtgttcaatactttagaaaagatatttttttacttatatttaatcgaagattttaattaatttaataagggtgaataccattttggaccttctgttttacaaaagttaccaattggaccttgtgttttgttaannnnnnnnatggaccctgtattttctaaaatattacaa

SEQ ID NO: 20666 - DNA, 5050 bp, Cannabis sativa
  modified_base (3323)..(3332): a, c, t, g, unknown or other
  modified_base (3703)..(3717): a, c, t, g, unknown or other
gtaatgcatatgtaattttgatcaccactgaaaaaatattttagccaaaataaaaaattatattacatttttttaaaaatatttttgtcccaaatatccttaaataatataacatgtgaacataaaatatttgacaagaaatattaattattattattattgggaaaatcaccctgaacgtgcgaatttatgaaggtggaaagtagggatgagaaaaagctaaaaataataaggtaatgatgaaagaatcgcattaaaggtggagagctgtcctctctctttctctctgtcttgtgtcgtggaatggaaacccttcaaaatataatgaatttaaatattaattttgtcttttagttttttttgactgaacccaaccggacgactggcaacagcaggtgatcaattacaactgcatatatacatagatacatacaatacaccccgtaaatgaaagaaacacattaaattaatatgaataactttttcctatttcctttactattattctcgaaattttaaattctagttttcttttatcttttatgtttgtttatttgtggagtgtatttggtgctttgggttttgttttcttaatttgtttgcacttaaatcgaataccgttttggataatcttaattttggaagataatgtgagtgtagtaaaactgccattattggcgttaatgtatttctctctcataattgaaaatgctcttaaaattgtcttttggcactataaatttgaagagaaatatagctagggtttcttcaaagtgtgttgaaaacaaaggtcttctctctctctctctctctctcttgaggagaatattgggttttgaaaagggaattcaatttgtcggaaaacaacagttcaaatctatatatactggccaaagctccaaatattaccctctcaaagaaacttgtctatctatattcaaaaacctctctctttccaagccttttttttattattagttttcttttttgctgttgttcgtgtttctttcttatatatagatctttctctgtgtgaaggataagggtgagaggaatgttgtctggctcgaggtcatggagtttcatgaatttctacatcatataatatttgatgagaacctaaatgattctcggaccaggcttcattcccctcaaccaatatttcctttgaactatatataatgccattcgtcagatcaagatgttatacacacccagatctaattcttaggttagatctttgagcagttaattagttttgtttttgtctcatatattttctgggttaattaattgatcagatttttattttattttatatatataacaaaatatttgttctttgtgttgggaaggccggttctgcaggcagctagattctcggatcttgtttgtagtgtaattatgatcaacttcagtgagttcaactttgtttaagtactgagtgtaagtttttcttgtatatatatatatatgtctctcttttatttgttggttgcgtgaagatgtaatttttccaaatggtttggtgaacagttttattcttgttaagtacgttaccaaggacatccatgtgtatgattgtattttgaagtgttaaccacattcatatatgcatatctatcttcgtattaattaattaaaccaaaggaaactattgttcacgtacgtatttcaactaaacaagaaagtgtacactgtttaacctatcacatgtgtgtagctcttgtctgcgattcataggccgactttgtagtagctacatatatagagttaatttgcttaattaccctgtatatgcgtcatcttctcttaattttcttattttttttttcttctattattattattattttccaaacaaaatattattatattttgggtttaatgttatttcctttctatagaatccaaattatgacctagagataaaatactgaagaatagaatactaaggagcatatgtggtagccaaccactttatttagcatacgttttctaataatttattatatcaaatcttatttatcttttaatttgaagaataataatatatacatgatgagagacatattatttaattgcagtgttgtgtaccctaggtgccttgtaagagtttcttaaaaataaggtacaaattattaatgtaacatgatatattattagaaattgtaccccaaatatggctaataggtggaaagtatattggctaatatatgtggaaaatattaataatcgctaacatgatgagaagtagtttaggtagaattatcggactgctcatgactttttgttttattggttatattttaattattgtaaaaatatttcctctaaaacagtaatatataattgatagatgatgagctctagctaacattttaaagttattattagtgttatcatatatatatatataaatatttgaatgaattaaattcatttatatatatatttttgatttcagttccgtacaaaaagtggggcatatgtaattcagacattattaattgctacttgtcgatagaactgttaagtacatgtcatataataaagtttctttatatttggttgttctgagtttaattacgaatgaacatatatatatatatataaaaattggtaagctttccatggatttgtaagatgtgacaaattattggataaaatggatatggatactccatattttaatttaataaatattttattaaaccgttaactaattataaattactttaatgcgccaaagaacattcttactaatattaaatatgaatgatatcccataaacacagatatgaaagactttattaacgagccagtaacaagtaatttctgaggaaaaccaaattaattacggcaatgtatacatttatatctccctctatactatatacggtcacaaaaacgaggactcatgcttgagcttgcacatatatatttattatgtaaaggaaatattcagacataaagaaagaaaacttgacaaataaaaaatttaaaatgcattaattctaaaagggttttgaaattcttaatttttcagttgacaatgactttggaaatatgtttcttcctctcatcgattttccaactgttaataatgtaattgattacataacgcattactataatatcactgtaaagtgtcaccatataattaattatcaattttttataatatttattaaaataaaataaacaaaatttaatattatattttagagcattcctattaagcaccagtggtgcctagcaccttctcgatatgtcacgttgcgatttgctagcgatactcataaaagctattatattaaatnnnnnnnnnnccgatacttagttgtatcaatagcaatattgacacataagaaggtactataggtactactggtaccccttaacatttctctatattttagggtgttaggcaccgtcaataccctgtaatattttttttaattatatataaatatattatatacacattatatattatatgtataaattataggtataccgtatacatgctcactttctctccctttgggtagctaactctttcataaaagagtacttatcgtatgagtacgtgcatacttttataggaaaggaaacatcacgaaaggagagagggaaatgaaagtaaatgacgactgttgacaatttctgggaaatgaaatatgagagagagagagagagnnnnnnnnnnnnnnngagagagagagagaaagacagagaaaagtgactagcggactaactgggtgacttggttttgtgtactgagacaaacaatttttgtaggattcataataagaaaataaaagcaatttcaaaggctttttttgaagtgggtaattaaaagccatcatttgttcacatgcattggtatttggtaccattaattagcttttcttgctcgttagatttatatatatatatatgctacagacaaaattgtagtttaacgttagataaaagatgcattattttcataaaataattgggctttcgatgttgctctttcctgtacagaaatgtttaaaggtactggtgtacactaattataggttatatgtatctatatatagattaatggattttttaactagcaaaaaaaaatattggattttttatgactcttaacgcaaactctcttgtaaaagaaagtgaaaagatagagttagactgaatatgcagacgaaaagagagagtgagcatatcatagtaagtttgagattacgtgatgggcaagcaaggttttatttagtataggtgtatatataacgttgtgttggcaagaagatggaaaatatatatgggccatttccatcttatcagtttcagtctcagtctcatcattaaaaatttcttatgttaattttcacattttgtcccatgtgtgaaacggtgcttcgaacaagttaatgtactttcagtactctttctactcctatgattatttgttgtccatttaccttaaattcctttctaacttcaaccaaagggaaaaatgttactgttttgaaaacatgcagtctcatcatggtcaacttatacacgcacctcatcaaatatcactaggtcatagtatattgtagccgtattattaagcatattattaataagtatcatggcttatatgaatatcagcaacaacttgtgacacagtactactgcaaaaaatacaattttcgtcggttttgtaccgacatataagttattagcgcaggttggacgaactgacgtatattctatagacacatgaagtaaacttgttgaatcggtttttaagtgacgatagtactactttcttgcattagttgtcgctaacaagttaacatgttttttttatataaatatgtgtcggtccaaggccaacgccaacaaaaaaaatacaacatcatcaacccagccaccaccaccctgataacactcaaccatcacatccccttacacaccaaaaaaaaggaaaaaaccagataaaaaatgattacaaaataactcaaccaattattaaaaaaaaaaaaaaaggtaaatagtggcataa

SEQ ID NO: 20667 - DNA, 1340 bp, Cannabis sativa
tatcaccaagatctgagcacgattctccttcagttgttggaatcttcacagtcttatgagatgaagtctattgatgagcttgaaggcccaagtttgccaaaagggaaccctacacataagaactgagaatttaatattctaataaaagggaaaaaaaaagcaaggaagaaaaaagttagccaaatacaaaagttaagatactaatcgattgcaaaagttctatagtcctcgttagaaagtcagaaggagacccaaccttgatcaagttctaatcattcggctgataaatgttgaagtggcaacactcttaggttatatagcgagggcaaactcttgaaccctcgatgctggactcaagaggcaaaggatagacgggatctaccaaaataactatagggctagtagtagagaaattgatttgatgaacggatcccatcgcttggttttctctatctgtcaattcaggtatccaaacgagagctttaggggttgaattcttgtttttctctaaaataatgctggaggcagggggagcattcttctgagtggtgcgttttttttcctcaaaacctttggctacttctcgacgatttcaacctcggaggcaccttgcttcttgcctcacttaacagagatggcgaggctactaaggagattttccaaatctaactccattcctacaaaaagaaagaaaaagtgattaatgaataacataaagagcatatcttacattgaaaagaacatataaacacttcaaacataagtgtgaaaaattcaacctaagctataattagaaaaattagaaaaatcgtgaggaggagaaaacttagtgcgaggagacttgataataggggggctaactctcctagattcagtgatatcgtaaatatcaaacatatttaaaggagataactcacaatcattggctcgtcaatcatttgatccatattggaaaacgatcccataaaagaagctattgcatgaagtttagacatggaactcagggtaacatgaaacaccctactagtttaggcatgttaacttgatttttaacttaattgtgcagctcgttgctaatcaatgagtttattgaaaatcgtgaatatttaaaactttatttaactatttataaatatcaaaataacatacttatataaaactaggatccagtttgcaaaatatttacataagttacacagtgcatagtacaaaagttgtcgcctagcgactatacaaattatgtccagatgtcccaaagaccgtacgctccaggcctaaccgccccgatatgtacaatcttcatctacttgctctcacggctgctcaaccttagccttgcc

SEQ ID NO: 20668 - DNA, 5417 bp, Cannabis sativa
  modified_base (104)..(107): a, c, t, g, unknown or other
  modified_base (1539)..(1545): a, c, t, g, unknown or other
tcacctaataagtaataacattttttctttaattgttaattatatcttttaaataaagtaaaaaaatacctaacataaaattagtatacgtgcctcgcacgtannnntttactagtatatatatataaatagtcgactctaatccctatctaaatatatttgtcgttggtcatcaacttgaggaagtactttcctattttttgtctatgtaattccaatttgaagcttcaatttttttaatcaatggtttctctcgttctacgaacaattgagttcaaaagtacaaagaacttatgttagttaatgttggtttccaggtgactgtatttacaaacttcgattaatattgtcaacaaatatggtattccatctcaaaataaattggtaattagtggagtagcccatatttttatatattttcgaagacggtggttatttttactcaccaatctagaatcaccttatcataggtcgtgtcgttttgctagcttttattttatttggatctcaggcgtctttctattttgctcgcttttattttgtttcgatctcacacgtccttgcacggttggctaaccatctaaataagtgtgtggattgaaagaccgctaacgatatatatgattttgatactatgtcaagaaatatgagattttatgatcaattggtgatgagtgagtaacctatatatgttcttatttatatatgactcaataggtatatatatgtccatatattgtaagtagtggttaaggttatcttttccacttaaatattagttggtggggatttttcattcgaatgttgacaccaaatatatgagaaaaagtgattggttaatgaacatggcaattaacaatgttaaggatctaccacaagattaatgtggcaggattgtaagaaatttgttattttttatattatttatttgatcgaaatgtaagagactccatactcatgaatttcattaagaacagtatgtcatgcttcacaccttaaagtgttagcatttctcttagacaaatgattgtcacttgaataagtactatattaatgaccattagattttgaagggtattttttattaggttctaactaatggcaattggcatatatgagtttgataaagcagaaagttttatatgaatgtatggatccgatgggttacaaaataataaataattaaattactgaaagcctgtgtcaaatccatgggggatattgttttattttattgtattgaaaaaaaaatatgtgtttattctgtattaaagataatcttcgtgggtattgtaggtaggtgttgtttgtatgataaaagggaccacaagtggtgggcttttattaatggagatgacagtcgaaatggatgtatggagaagaggcagatgtatgcaacggatgagagagagagagagagagtccgtgaaagacaattacgtgctcccatctcatccatttaatatgtatcccatttctcacaacatatacgagtctgtcttctctgcaagaaccaaaaaaaaaaatatatgtatatannnnnnnatatatatatatatatacacagaagaagccagccccaccattacaacttacaagctgaaacaatcagaacagattcactacttcctttaattaaaatatatctcttaccaattattctattgaaaatttaattttgttttgtttttagtataaaatcttcccttctttttcttcttatcccaaaaattccaccgctgacaattttcatgtgtctgaaagctcatgtgtttctgtagatgagagcaatgtgtcaaagaaacacactcaatggacagaaaattcatcgaattaaaaaatatacataaaattaaaacgataattgaagaacccaccttttcgaatatagcatcttgtgtgggaggttcacaaaatgtacatccacgagcttggagatgtagtagtagtagtaatagggaattgacgagttatagcatcacaagagttgatgcatgcacctgtatctcctttcgaaagaaaaaaatggatagttttccatgaaccaagttgttgtgatggtggagaacagacagaattttttcttcttcacaatggcatcagaaaataattataaaaaaagattggcactgacgtgacatgctcgaatttcagaaagagaaataataatcgtattagtgcccccaaaatatatatttaataataagaataataagagaaacacagattatattccctccagagattcgaacaagttccccagattctatcgctcaaacaatgccatttccattcctgaaaaagcagtgatgccaagttgccttggtctcagaacaacttatcgtctgctgcagtgagacccatcttttctttataattaaagacttaaattcacagatatacgcatgtgacaattgtacgtttggtagtagtgcattgaaaagctactacaatttccatactccctagagtatattgtctgtctaatcatgcttggaaattctaatttcctatcgttctagcaaaaaaaaaataaaaaatctaattcctctgtcgtgtctaaattttagtcgatgaagcagaaatgtgagcctaacgaaagaaattacgtgtttttgattatttagggtgtttcatttttgccatatcttttctttcagatcaggagaaagtaatgactcaaagcaaatgccaaaagtatatcattataaatatatatctatatgagcattactatttaattgggcaccaatagtatatatagtaacatttaaaagtggcaacttataattagctagtaagcaataataattttattaaattatacaagactaaatatttaattataccaaataggggattttcattgaaaaaaaaattataccaaatagggatatgattatttggacagtgccacgcactagatgtgccttttaacatttctcatatctaaatattcatatgtatatatctatgccatggttcgcagacatcgatatcacgcatttgcatcgggcactgaatgcaaaacagactttcatagatactgtgattagtgcaataaacgcaagaattgattccaatgttaagatgcaagcaagacaagatttatttatttattattatttatttattatgaatgtaatgatgaatgaacaaaccactaataattaatacaaaaattttacatgaaagataatatcatagcatcaacgacatgtctctatcaaggtttcaatcagtacaattcacatattcactgctggccaccaagcacatttcactacattcatacacaaatgcacgagattcccatacatcatgatgaaaacacaaaggcacaagataatttgccttaaaagaaaaataatatttcaatgacagaataatttctaaacgcagcaacttcgcctcaattgcttttcttaggcaatggcccaaaaagcaacgtctcaagcgggtggaaattattttcttcgaagaaattctactcacaaaatttagattacttttctcatctagcatctattgacagccgtcacatcaataacatttgacttgccggcatgttgccaattatgactctaccttgtgtcctctcaatttctaaaagtgcagggtgtccaccattatcaggatcaaatgcttaaacaaaatgaactcaacacaagggtttgatatttttcatctaataataatcagtcgagatgcttcaattacccaaaaaaagacagaaatctcaagagatatgatacaaccagggttgattcattgaaacatgcaaataactcgctagtcaaaattgcctcgagcgtgggtgagggcaattcagttaaaatattaaacaataagatcaaactgcacagttgtttcaaggggtaaaatagaaaagtgagaaaggcgcagaggcaggcaattaatagcagaggtaacacggcaggggaaaatgaccaagagtcaaaaacaaatcacggactatatgcaaatctcgctagaatttaacactattccactagaagagacgctaaaaggcggaaactgttaaaataactcatgtgccccataggcttctcaacaccatatcgaggaataaccaagatggccacaaagtctacaggaaaaagctgcaaatgcggctataacaaaggggggagagtttccatctcaatgtaacttatcccattgtccattgttatattaaaattttctggtcaacacatgtgtataatgtatatgatattataaaatttgatacaaaattaagtgtctaattatgttatgggtatcaaaagatattaaattgtcatgaaaataatgtctagataccataacttaatttattgaggggtcaaattataaatacccaaaattcattctaagatagtctataaatcagtagtggttcacaagaaatactagggtttttgtattctctccttccccattagagaaaatacctaagaaatagtatattcttggaagatcaaaaccttctctgcaatctccaataattacttcaggttagtgtttccgctaatcttttatcatcttcttcttctttaatttggaaaaggttctataaatttatgatttaggatttctatattaaagcacttttaggaatatatttaaatctgtgatatttatatttcttaagtgttttataaatcctaacaagtggtatcagagccacctttgctgaattaattgaagatctgatgatttcattgttcatgaaatttgggaattttaaaaattacggttttgattatttttttttgaataagattgtaccgtaacattttgacttcagttcctacgaatatattgtatatatatacacacattatgtatgattatgcatatgcgtttgtctagcttttgaatctttacggtttgaaattaatatatatatgattatcgcttatttttgtttttcttttttttttttttttggcttgagtgcatcatatatatcataacaaaagcaatatatatgacaaaaaagtctacatggtattgcttcagtatatattgagtgttgtgcggcgccacagttttctttctctgataaatatatataaagtgaattttttttattttattttatcaatatttgaatgatatgatatatgaaatttcgtatttattttataatatatatactgttgtatgccttttaagataatatatatattttggtttaaacaattaaaattcaaattttagtattcgtttatttctaatattttgagtaaattaattgaaaaaatatgtcgccaaagggacctattttgtgtaaattaatttatttaaaatatcaaggtggttgtgtgtttgtaattgatgcatatattgactaacccaaagataagtgaatattttgctaaatttcaaatatacatgtggcaataaat

SEQ ID NO: 20669 - DNA, 2250 bp, Cannabis sativa
aaaaaaaaaaaaaaaaccaactgcactaatcgtgtaaggaattctaattcacacatttgagtgatctacaacttgggagggatggcctgtgaactttattagagtgtagaataaaataaaataatgagttccttatccaacttctctcaagagcacctgcctggatctagttcacacctttctcttcatttacgacctgttccttccaaaaaataaggaaatactgtagttgttggacttttttagtttccttttctagaatttgttttgtttccttgaatggaataattgttttgtggttcatatttgtctcttaaacctcttttcctgctgctcttccttttatgctacctgaagttggatattgagcagtcttttcattctttttggagcaggtcttgcatcatctttctccaaatttcaagatagaattcagatattttttgctgtcctcttctggatgtctttattcttctggacttgcgcatgggatgaaaggaatagaccaaacaaaggatcacgatttagaagatgacccagtaaacatttatttgtatatagttggtaggattaaatggatagtgttatagcatacacaatatgagggaagcattcttagtgtggtaagtatatgctggcctacaaaaggaaaaagaaaaaagttataactgcttctaaaagaccagggatgagaatggatggaatgtggatcgaagtttcagttattgtttcacttcatggggttatcacgagaaatcctcggattatgagcattgctataaggcaccctgcaccctaagaaagacaaggtatgccaccttcggtgaaattcattttcagtttttaaatgggtgagatcttataatttatttgttcgaatgactataaaaggtattaagcacctaatttaggtgctcgtgctctttaagcaatttctcctctactgctatttgtggaccagtaaatagtgtaatattactacatttacttgaaagtctatttatgtacaagaaaatactttcattctacttatcaatacttgtcaatgattaagttttgaacccactctgtcttatcatcaatatgttacttatgaagcactcaagtctgctgatgttattctaaaagaaaaagtctgttgcacatgggagtgagtaatcatattgaaaagatttaagcatgtttattgaattttgatgatcaaaatgcccgatgtttcaatactcaatcatatcgtcatgttctgttggttttcttgtatggtttgaactcaaaaccttatcaactattttctcttggttctttgagatagagcataatgacatgtgtccaagatggaactaaaaggacactttaccctctttctatcaagtactgaatatactgatgatgttaataagagtactagagcatctgcagtgtagggtgttattgccgttgctcaagtctcttgtggggttttttaagtgaggtagccaccaaatacttttcccattgttgtcaccaattattttttcttctctaaatcctgattggttgaaaaacaaaattggagtcaagcaagcaactttggttgtttgattacactgtcatgctctaaaagagcggagcatatagctcagtgtcactcagaacaaaatgatatctcttttcattgaaaagaaactttgtcctttctattgtgagcaaacaactatggctttcgaaaagaaaaggcattaaccaatgataatgaagatgatgatgatgattccatctaccatatttgtaactagtgttataaaacattatcaagtagtgtcaagtggtgacttcttctgcaactcgacctaggacgtggcaaggaatgtttcgacgacaataaaggatgctaaacgacatagtattggtctacttgtctttgtccaatttaagaccgttcatttataaaaaccaaatgaaaatggcggctttcaagggtcccaacctcacgtgctttttaggcaaggtgtcgatggtagagaggttgttaattgtaagttgaaacttattagtttcgtgggctaaatttgagacaacacctcattgtttagtacatgcattattaatattcttttgtttttctttaacatttcactttcttagtacctttttactcgagtgtgacagtattcattggctaattttgctctattataaacaattagaatgtgatagactatatatatagtgtatataatatagcatatacaatgatatgaaatgcggaaa

SEQ ID NO: 20670 - DNA, 2859 bp, Cannabis sativa
  modified_base (2758)..(2760): a, c, t, g, unknown or other
tatgtatgtatgtatagtcaacctaaagtcaatcccgtgttttccttttcttaaaataataataaaaataaataataatagctaggacttggagtactgtgaattattaataaaaatatatatattaattaagaattcgtgtgaaaaaaaaaatggtcccaataatattttgtttttatttatttatttatttatattataatatatagaagaaactttgcaagttgaattggagaagtaaacattctcaaacatgtgcttggaaagtaagaccaaagcacaagtacttaattgtacaacaattcaattctaaacccaacagccctcaaattaaaaccgctacaaatatatattattaaatttaatataattcccttttctttgactagtttttcttttttcttttttttttcaaaaaaatggaaaaaagatggatactttatggtagggtatatatagtgtggaagattttaaatttttcattacaatttctattgtagttaaaaattttaaaaatttataaataatttacaattaatgtcaagaaaagtttaaaatatgtatttatgataagttgtttgaactatatttgtgatattataaattattaaatatatataaatatttgtaacttgtaagaggtttcatatatatgagctccgcaaatacattttataataattaaatttaaaattaataaatttatataaagtaattataatttttatttaagtaggtataaatattttttattacaattaaaccccacacagcaaaatttatagattctggatataaaacttaaaagagaaaactatatataggatcaataaatctccaatgttgaaccaaatgatgagacaaaaaaataaatttagttttaatgcgttttttttttaaattatattggtagactttacttaatattatttaatgggctctcttcgtgattaaataataataataataataataataataatattcgtaagaaaacattctcttattaattttagcgagattaattgtagaaatcaataaatcaaaaatccttccacgagtatatataataaaaataaagaaagacttatcttattaattaattgttctatataatatatattaatttagaaaaaataataataattcaatatttcattctctaatccttgaataacatatatataatatcgtttaagacacgtatatacatattgctcaagtacgtcattttaatgaaatgatttttacatcttaatttatttaaatattattcattacataaaataattaagcaagttggtgtggttcttaatttttaaagttaattaattggacatggacatattattattaaaatacgaaaattatacaatgatataattaaaaataataacctcgttcatgtattataccatgcgtgcacaactttatatatactagtttaaattcaatggactgaccttttctattattttttattaatcttttttaaaattattttggtcatggtctttgcttaattaagtctttgtctttgtacttggtacttcttcttcctcttatatataataatattattttttatatgagtgtttatactaattaattttatatttgaataagattaattaagtatcatcgtttttcattttaatctcaacatatttatgtatataaataaacacatggaatttcgtcattttgatgacgacatatataatatatatatatatatagatagataattgtacggctaattaaattgaaatcaaatcttgctaaagtgaaaaagcatcaccgactacgactttatgtatcttaactaatcactttttggttctttcttataataattaaactactatatatttaattaattacgattatattacgtaatatatttgtaaactacaactaatcactttatattaatgccttataattttcttttacttgccttctttttcacggtaaattaacctatataatctattaatttaaaaatataattaattattatgtatatttttacttgataattagtaattacttattcatttttattctaaaaattatgatgcatgtactagaagaatatttggttacaaaaatgcacttttaattccaattttcctttatttaatgtacaatatgcatacatatttttatgataaattatatttatttactattggtttttcaacacgtacaaatttttatataataatatatagttatttgattacgtacattttttaattacttcctaaattattagccctttatatagtggcttaatttggcttttgttgttcataattttgtggtattgatttatctatatatatattattaatggactataatcactagctagctagtatttatagctttataataatatgtacatacacaataattaaaatcatcacatatagttgaaaatagttttatcaaattagagtattgttagaaaacagcaatagtatcactatttagaagttacacccttataattaattagttaataatattttataaaaattaatacattatgttatataagactcgatacttaattataataataactaacaatataaaacgttgaagagtgttaaacactaccactaacttttagcatttctattatatgtgtgggacacacaacacaacatttatgttcaagaaaattctctttttacattttttttttcaacgtttttgtattctacaagaaatgtcacttttgccnnnacatttttgtgctggcaaaagttggtattgcgcttgtaaaatagaatttacctatgatgtgttggcaaaaggggattggcaaatcaatgttggtattag

SEQ ID NO: 20671 - DNA, 3900 bp, Cannabis sativa
  modified_base (2997)..(2999): a, c, t, g, unknown or other
gtaactaactactaaatcttgatctactagaggcgaagccacctaggatcgagtctatttatttgtattatttcttctcttcttctgtaaagctgttttaataagtagtccaagggaggtctaatttaacatgatatatagggtctaaaaataagtgtactcacgtctccattatatttatatagctatgattttatttttatgaattttaatttatattgtgtactcatttaaaatattatgtaactatttttttaaaaaaaaattagagtaatttatattttaagaataagatttaaataacttattttacagaatattaaaaacaagtataactgcaacaatactatatttttaacgttaaaattatgtataatgaaatatatatatatatatatagaagctaaataattaaagtgtgacttgtcttaacaaaataatagaataataattatttatctgttgaaaatacaatagagatgtatattgtacaattattttttagggtttattttttttatatttatatatatttttgagtagagatagtcttcgctttacaaatagtttacagtgaaagttaatacttaattatagtaatagcgatataatatctattattttgtagtagtgttgagtatgagtaatattttttctcaatatttatatataaggtcgtgaatagtttgctcgtgaaagattcactagtaaactaaaaagtaaaaaaaaaataggtttacagtttgttagttgaacctataattaataatattcaagattaattataaattaaacaaatataatagttatggtgtagttttcaaaggttaatttgagtcattagattaaatcaaaaactataaattattatccctattaatagttaaaatactcaattcctactgcaataatctcctatttatatattttttaatttgctgagtgcaaatgtcatgtgtcccttaatttccttatttttagtttttatccttataaaaattaggtttttagctttcctcccatataattttatttggagagttttatctgtacccaaaaattttataaaggcacctcattttaataatttttattttatataaaatatataactttaatttatactagtctttttttttattattttttttttcttccttcttatattcttaaaatatatatatataaaataaaaataaaatagatttgtaatattaagacaaaaaattaaaattaaaatttatacaaaatttttagaaaaaaataaaataaaattatacataatttaaaacatatatataaataattattgaaattaacacaaaatagtgtaaaaaaaataaaattttaaaaaaatgctaagagtgattttcttaaaattaatttatattagaatgtacatataattttgtgttgtacaaataaaactacatttttatatgtgtcctaatgtatctatatctttttgttatgaggtaatatttttcatctacataacaagtacagtttcatatataataaacacgttgacctatactcatgagagtaaggatgacatctcaaggggatgaattttgagaaatggaaatatatcctcacatgataagaacatgcaagaagatagcgaccgagacaaagtctaatcgttctctatgcatcacataataataaaataaaagcgaaaaatagagaaaaataaacacactagcaacatatataaaatatatgaagataaagtgtttctctctcacactttatagaaagagcagtatttatatatgtaagtccaaacaactataatttacgtaacaactcatcagagcccatgagttttacattgtcagtatatgaatgtcagtatgtgaccaaagtaatcgcagatgttccacgctttaatgaaaaatggtcaaatcgttcatagctcattattttccaatgttgttatttcatttaattttaatatgtaaaataatcttgactaatcagttatgtaatcaaaagataattgtgttctttataaatggacgatccatcacataacgaacttgattacaattttttgaacagcaaactaggcagattcaactcttgttgaacaactataattttggtatcactattatttacattgctttctaattattttattattattatcactatattttgttttagtactcgttattctaagtgagtactctttgttattcttgtgagtgttcttactttgcttgattactcacaaattttaattttgtctatttttctcttataacacttttcaaatttatccctacatattttcgtttttgttcacaaaagttatacattctttttcatttttctctaaaaattataaattttttttcattaatactcgtttttgaaaactatttataaataaatatttaattttagtcccaaagttgaactaaagaaataatttttatttttggtctgtattcataaataaaataggggtgttttagtaattgtaagaataagatgctaaaaaaaaggaataattttttttttttgatgagaaagaaaatgaataaaattgtgtgtccaatattaaaatttcagaatttggacatgggacctgtgagtcagtgaccacctaaggagaaaggtcctaccacaaccactaataaaagaagtcattcttcctaggaaaaatttcacttcactttataataattcatcttataatatactctctacccaccaaaacaattctcataatatatattttcctgttatttaacggaagttattaatttaataatttttttattaaatcaattaattaattattttaattttaaaaaataattttaaatatttaaatttaatttaaaagtatcaacaaaattaaattatttttttatataaatcttaatttaaatttaaattaaataaatttattagttatattatttaaaatatctaaacttatctattaattgctaattagatatatttttttataaatannnttaaaattaaattaaattttatatatctaaaagatacaattacattgtattaattttattttttattatcttttaaattaataattaagcaatagcaactctaatataactataaacaactttcccaattcccttcataatattcttctcggatctttttttcctatctcctcatgctgtcatatcttaccaaaccaaatgagagtgcaaaattttaatgaacatttccttgaatacaaaatgcctaagaaatacctcccacccaattacttttttttcttttcctgtttaatatattttattttgcgacgataaaaatacaagtagctcagtggacaagtatcatgaacaaattgacaaaattttcatgtttttttgtggttctgatttgtgattgggatttctttcagtgacaatttgtgatttgtaatagatgtttaataaaaggcaaagtaggggttgaagtactagtagtgggtgttaaatgccgcaaaagctgcttctcattagctcattcttctagtcactctttacatacaaaattacaaaataaaaataaataaattttacaactttctctgggaatggaatgggagttatgggatggattggctttgacaaaaaggcttatgggggcaaactatactttctttctgggggagcaagtaaattgtaatgcagaccttatcggcacttacagtggttccttgtgaaaagaatcagtattctaaatttgtaattagtaacagaaatgtgtagtagaacaaccatcctgcaactcaaaaatatatatatttatgtatatacatatgacaaaagcgatcagcagagttgtaacaccaattgaaacaattagttgtgttacacaaagctaagtttctttggagtggaaaaagaaaaa

SEQ ID NO: 20672 - DNA, 4322 bp, Cannabis sativa
  modified_base (3473)..(3494): a, c, t, g, unknown or other
  modified_base (3906)..(3908): a, c, t, g, unknown or other
aatcccatagtaagtgtaatttcctcttaaataaaagcatttgcaaaagaaatgaaagaaataaaaaaaaaaaagttaaaaataaggtccaaaacacttagaagtgctatttttaaaagaccaactttaagcctaatgagacccaacagtcaaggcccaaccggcccttttcctcttctcgaccggacagtcacaacacgttgcaggccaccatccgagatcactttttcaaataacgggttttaaccatgataaatttaccttgttataataattttagttcttttctttatattttcgtaagaaactgtttgaatatatatggttagttattatataggtatctttcggtctaacagaatattatagatgatagggaagttatatttacacgccttaccccttaaaactataagggagattatatttgtaccctcaaaaattataactacactttattattaaattgaccctaattaagtattattttttataaccctaccccactctatttaccaaaagagtattattttatacatcccaaaacttctcatttaagtttttattttatttggaaaaaaccgtcaaagaataccattaaattttctacgttcaccaaattgtccctcagcattcaccaaatccatgatttttcattgtacgattaatataaaagcacatttgtatataaattggtgtatcaaataaagacatgcatatccattccacatcacaaaataatgtcaaaaacaaaaataaatcccataaagcactgtttacaagagtatatataataaatttctttttcttttcattcctccattgataaaatcttaaatttttgaaaggataacaaatagttttttttagaagttgtggggtgcacttattaaaaaataaaataataagtcaaaaaaaaaaattaaagatatctattttggtctttttataataggtcaaatatgtaattaaatttttacggtatagttatgttttaagggtgtagttatgatcagacgacgctacagtaagatgactaacaataccatttggtcaagcgagcctccaatccaccgacattagagccctgtccaacctggccctcttgagacaagtacccgtcaatgagttagaccccttcttaaaccacgtaaatttgaccccattgtagcctaaatcaatgagccacgatctttgcacagctcctctaagttcataagagtaccgcgcgctgttgctcgccctcaagtagtttaggcaatcgctatccaatagcgtaccattgaggtcacctatcagcattaccgacaacttacaattacaaacaaagtcacccaactctttccaaaaacattctttttccgcatagacaggcggtccatacacagccataaagatccatggcttatcgagaggatccgaagtaatacaagccaggattttgtatttgtcagcgctttgaataccacactgcacacctttcttccagcacattgctaggcctccagtagtacccaccagtggcacatagcaaagaccgtgaaagtggattttcaacatcaaaccattgagcttcgccttcgtgagccttacttctgaaagaaccaagatttcgagatttaacttctggattaaatccttcagttgtcgaactattgctgcattcccgagaccacgacagttccaagaaatatccatcatttggaattgggagtcttttccgggctagactccacagccccaaagcaaaaaacctgattggtggtaaattctttctcctcatttgatactttcacctcttctattacacacgaagaacttggctttgagctacgatcaacgataataaagtggttatttaggtcaaccttcaaatcaaagaccttcttctcccaatttgatttaatagtagcctgtctttttttttgctgcacttcttgcttgacttttaagagagtaggattttggagcgtggctcagagtatccttggggggtctccccctgcattttggtattatagtttggtcaagtgacactgaggcacgatgagtttttacttgatctttagtgaccggtctacccgtcttatgtctcggagtagaagcatccgatgagcgtggagagaatttgtagtcttcatttactgtagtaggaagcttctcgctatcgttcttcaaaattgaaggtaagacttacttttcggagtttatggccagttttatttgggcctccgaacttggaactagatcagaattcttccctggttttggttcaaaaaatataccatcaagtgtcttcctttttttgggcccaaagtcatgttccaaagatctgaaatcttcaatacccaataaaggattaaaaagagaaggctcacacataaacttattcacggtacccaggcccgagagtgttttaaagcccatagtccaaagatcatttgagagccatgggatgatttgagcctggctaccaagtaggggagaataagacccctgacccacttttgaaagagaccggcccacctcctttgactcgtagggaggggacccatctttctcagaaaggttatgcacagtcttcttggtagactcatcagcagtggtcttcatgcaaagagaaggtgtaggtacgtttttatgtactaacgagttgttttttgtaccttcagtattcgacaacatgcttggagaggtatccatctccctcttgtccactagtgcctctgaagggggtatgaattcaggagctttaggaaccaccaggtttgcagtatcctcaaatggacaaacatcaccaacaccagatagggtaaccatcagaaattgacaaaccctttcttcctcgatagccggcagcgatgtaattatcccaaaatttaataattacattttaataataactttatttttataagaagtatattttcatagtaattgtatatatttaaaaaataataatctgtcatcattaattttatatatgctagaatataactttacgactaatataacgctaaatttatatattttagaaaaacttttaataacgtatttgtatctaatttataataataatattattattataattgacatatcacattaattaaatttgacgtgacctcaagtttaatgccttaattcttttttttttcttttttttttagggtaaatataattttggaccctgcattttataaaagttactataaaagttactaaatggactatcaaatggactatctattttgttaaatgataaaatggatcttctattttctaaaattgtatagatccctgaagtgattttttgtcaaaataaaacttaataataatctgatctagagatgatatgagaaaattggttacattttctgtatctgttcttattagaaattgtcttaaagtttgttatattaaaaaataaaattgtaaaaaattgagctgagggtcctatttttaccattttnnnnnnnnnnnnnnnnnnnnnntcatttaacaaaacagaaggtccagttgctaacttttacaaaacacacggtccaaaatggtatttatcctattttttcagaaaaaatcttgtgttattaaaagaaattttttggttgctaatgatgttgataagcaactaattagttacttttacataatttttatttttatttttttatcatataatttgagatacattttggttacctccaaaatttatttgtatgcatcttagtaagtaattatttatttttaaattatattatggtagcttataatttaaaatacatttgggtaaccttaaaaattattttttaaactaataagttgtcgtgtaatataacaagctactatttttcgtattttatatacatttttaatactttgaaaactaattagttatcgtataannnaatataattcaattaacaaaattctaaaataaatgttaactaatcttaaaaaattataaaacaatcactgtactagtaattaaatagttttttttttcttgaaaaaaaaaatcactactacaaaattgggctttagaggtaatttttaaggggttttagcatcagttttggcgaaatttgctaccgacgctgttccaggtgacgatgtagggctcataacaaccgacgccaaagggtccctatggtgtcagttatatagggtattggtatttttgagctttacaatttcatgttttagcataatttatacatatgtattattttattattaatataattaaattaagtataaattatatataataagcataaataaaaattaaattgaaaagttaaataaatacacatttatat

SEQ ID NO: 20673 - DNA, 3717 bp, Cannabis sativa
tttgtttcccatttaggatggaatcaattttccgtcttttgttccatgagcttagtctagctcaaggtgatcacccagacccaaagttactatcatctataaattttcatagacgtgatctcgcaacaatacttgaaacgacaaaatggcaggttttcttcagcattttaccattttcattttttaaattcatatagtgtttcttttgtttcttgttctagtttagtaagcaatctgtttgcttttaattctgtcagttggaagattttcaaagagcagttagttattcgactataacagaaaagtcccagatgaaggatgaagtaatttcaaggcacagacagtttattagagccataagggaacaaataattcatgtggaaaaaagcttggaagagacatcaataggtaatcctgtgaaaaataatgagtgggttaacttaaatgaagaagatagagatgggttggcactatttctttctggagtaggaggtggtggtggtggaggtccgtctaagcagatggatgcttatgacttggacgaaggtggtatactgaaaagatatcttgattcaaccttggtaggtggtcgacaagatgatgctttgcggaaagttgatcacaaaggcaaagaaattgaaaacctgaatattgatggggatgtccatatggatcataatattgacactagaaaggaaaacaacatgagaaaagtgggatcttattgttctacgcggttgggtactcaagcaataaattctcttccagagacctctcgtaacagatgtggcgaagatgggagttgggacatggaggctggtgaagttaagcctaaaagtttctcccatgagaacaagtggagaaactttcaaagcagaaagcatatatatgggctctttagtaatttatggactgcctatggaggtaaggttgctagaaattacaccaagagattaaaagatggagaagaacaaagggaatctccatcatccactgaagctttaaatgaggcgcaggtactgatattgattctatagtgcatatgattattatgtataacattttgcctgatggcaaatgctgatcctcacaattaaatcaaatatcatatagtgaacatgatagggtgtcatggaaatttccccaattcattaatctagataaattttgtgcacatgacaatgatgtgcactacttcattttgacagacttgaatgcacaagtatttctgagttctgctaatagtcagtgaaacttacaaactaactttgagatgactgaaatgtttcattatttttatgagttagaggattctatgtagattgtcagtttctaggaatgttgtttactccagttactagcagtatcctggtattgaaatctaggttttctagtaaatgaaatgtacttgcagagttggctggggatatgtcagggaagataccaaagatcaagaaattacatccaacataatcgtcatgctattcagttgatctctctgatcatattcctgctcattattcttggtgaggaaattttcatcatctcctattgttcttgtgctcttcttggtgttttgattgaccatattttgtatttggattattacaacttttatgcgtaagtgaaaagaaaatcacgttcatctgtcagcatgataaagtagaagtcattgtattgtcatgcaatttcaaatacttgaacggtcaatgttgttattcactagagaacactgggaaaatagggaactaattctcacttgagaatgctctttactgtgaagtttgtgggtggttagtatagggtagggtttgacccaattctcttatctataatggcaagcttggaattaaattctatagatcatttaatattttagaattgtgacatttaaattttggggcaagaccttcttcttcttcctttttctagttcaggacatttttgttttattgttttctctttctttcgttcttcttataccttaatttcttactttttcagtgttcatgtgttaatcttaaattatgtacttaatgcaggtacacttctgctccaaattgcttaaagaggtttacttcgtgattccgaatttgtttaaagggatgttgtgaccgagttgattcaaaggttagaagcattagagcataaacaaccactctttccctatccaaacacttctatcactatccttttaataattgatgtatgatcttcgatgacatcctgtagcaatgtcagtaaacaaaccatcaagcacaactcgattgacttattcgaaatatcacattacctatgctgctatgttgtatgtgaacatgcgatcggcctcatgaaaatcaggaatataacacagtattattcagtctgttcacttacctctgtttctttgttattccaggagtctaaaaccaactattaaagcaaaaaatagtggaaatcatcttcaccatggcattccttgatcttggtttcgttacttccacatgggaaaagactcaataatgctttgctggttgtttgagttgacaaaataggatagtttccttgttttgtacttaggaaactatagtagtggagattctattatgctttttgtagtttggtctgattttgatatactccatattgggttcatacaggaattaatatattgagcttctgtctgaattgatttttagtgtattgtctaatatttcattattattattttattttgcataaaattcactttattaatcaactagaatcagcccttgaagctgaaaccaaatcggcatgcccgcgcagccctcgcaagatagtgagctacacaattcgcggaggtttacgaaaacaagactaacattatccatttcagacaagagcattttacattcagcaataaaactaccaaacaaggatgtgtagctgaagtgaactcctgactgctttagccacaccaaggctatccatttccactgaaacctgttgtcaagatcaagctttaatctaacttagcttcactccatcgcttcagcaacctcaggaagcaccgcaacaactatcacgaactaccagtctaccactcccaaaccaaccttgccatccttaagagaatgttgctgcaacaacattgatcttaatactatacaaaacaggtgcagtccaagactcagttccatcacctaaagcatgacaaattcttttcttgagcctttcgccattgactaggatacctctttgccgaaccaccaaccgctgcaattgtgcaactcttttggttccacgccatgtcgtttctagcattccacacagcccaacaaaccatcgcagcaaagcaaggacgatcgtcacttcctgaatgacactccttaaacaactctccaactgacccccgaacctccttcaaaaccagtaaaaccagcaaaagaccaacaatctgaagcaaaagtactagccaccaacgcatgaaaaatagattttttttttaaaacaacatcggacaatttgattatattaatttatgttgaagtcttgaagaaattgggataggtgttttggggccttttcattttgtgtagtgacaatttttaaggtcattggatcatataattggatgatttttatggtatatattgaaaaactataattatatgatcaatttatctattagtttttttattttttaattcaatcctattcaattaaattcaatgcttctaaacctggttaaac

SEQ ID NO: 20674 - DNA, 4913 bp, Cannabis sativa
  modified_base (121)..(126): a, c, t, g, unknown or other
aaaatttaaatttttcttataaataattaagagtgacgtaaatatttaagtttaattttaagttgttgatattacttaaatatctttaaatgtcacatgtattatttttttattggtatannnnnnttaatttttaaataaaaataaatttaattattagacgtccaattgaacagctctgcatagtgacttccagatacacatcgatcaatccgacaatattagtgttattatacttatatcaccattttgttacaattataagttaaatatatatatatatattcactatattattattcttaaaaaaaaaagggtttgatatatatattcttcttaagaaaaatcaaatcgatacactgtttactctgactgaccaaatggaatagtaataattcttataagaattatttatgtgtacatatagatatgacatgatttaattattgtagatatttttacatatatatttattatttagtgacaagatggcatatataactgattaatagcatttgtttggttgaagaaacgtaataattgtctattttttttagtatctcttgcctgttttagataattaatttttttagattgaaaaaaatcttctaattttaacaatctcttttgttattatttttttttttgtaacataatttttttgttatttttagataaataaataaatatatccataattgtgcttggttgacacaagtactattgtatgaaattttttgttatatatatatataaggtattaattaaaagtaacttattaatcagaaaaattaagagatgggtcaaaagtaaatatgagaaggaattttcattattattggtagatataatcaatttatgttgatatatgtgtttaaagtaattatagtaggtgaccaaaaagttggtttaggattccatataatgatcttcagctcaaaatagtggactttgataattaatatagatcaacaaacatatataattattaattctttttggaaattaatatatatatatttaattaaacaaaatattacatgatcatataataagaaatggagggaacaacaattatattaaaactcatctatactttgcctagctttaacaaagtgattagacccttaactaatagcttacacattaattaataattccctctcttttttcttgatctacaagtacactaataaaaattaatctataattaattatttttttcatcatgtccatcaacttctccttaggagaatatttcattggaacatttttcataatatatatatctcttttctttagatttaagctaagctaagctatgattaaagatatatatgcatgatatatatgatatgatatatcatgacttagtactaaaacatggggccttgcatgagaatatatcattattatgatatatataattatgtccaaagaggttcccacaaggagcctaggttaatatcatcaagaaaacttaggctattattattgttttggttactaatcatgagaggagtagtagtagtattattattattattgatcattaaaccatgatcaataacaagactattttgttgaggagataataagttattattattgttattattaaagccttgttgggattgagccatttccatgcaaagaatggccacaagattggcttgttggcattgcatattgaccacttctgcttgtgctttggccaattgagcttgcaattctccaacttgcttttggagctggcaaatggctccggcgcaaccataaactggatctcggattcttgcgccagcctcatataccatgctgctcactgcatctgctctctgagactctggcaattcctgaaataatcatcaccataatgaacaataattaattattattaattgtgttttataacaaacttttaataatcatcattaattaaggagagaacatattaattaattgcttgtggggtatatacatagtgtctatgtgaacaaagttttaggcttagaaagaaaaaagaaaatatatatttcttatgtgaacaatctgctatagaatgtttacttttcaattttggatgcttcgaataatttacaaggaaaaaacaaaaaaaatgttttttttttattttattattattaacaattgaaaattattattattattattattattttacatataataacgtctatatattataattccgtacccaaaagtcccacggaaccactagtattactatactactaaactttggccaatgagagaaattaatgactaaataatattatttgattagattattaggctagactagaccatggcccctttataacgaactaaagtaataataagtctcccaaatataaagattaaaatttgaaaaattaactcgaaactattgaagaaaaaaaatgaagtgacaagtaacctaaaagctaggttagagccacttgctcccaccataaatcccttgaccttgatatggactttaataaaggaaaaaagaaagaaagaaagaaactactcataccccacttgtacacgcctacaaaattagtcaatttttccttcatttttattattgttattatgtttaatacatcaaaccgacatcatataattagttagcagttttatattggattataatagtaataatttttgacacacttttctaatgtcaaatgtagttttcactaaaaatgttaaaatgtattttttataaggtgttaagacgtactgttattggtgtattttaatatcgagttttataatttgatttaataaataatagaagtgacgtaataattaatataataattgattagatttgagtaatataatagagtacctgcaagaacttgataatgttactagctccaaacactcgatgagcaatagtaaacttggcaggctcagttggaggaaagtaaggagccaaaacacatttatcagcacatcttcgccgcaagatcttgcacgcggcgcaggggctaagcaccactggtgttgctaccggattagggttagggtttagggtctggagatgttgttgatgatcaggcgacgaagaagatgaattcgaagaatattgagaggctgcagcaagtggtggtgatgaagatgttgtagtagtagtgtttgtctcagtactacactccatagtttcaatataagataatgaagcttatttagaaaatggtaatgttaaaaatgtatgtttggtgatgaaatggttagagaagaagagaaatatataaataaggaaagagaagagaataagtggggtttggttatatggacacaaagggtctttaaataggcatataataatataaggtttttattttatttttttaatttttttttaggttaattaaataagggacaatgcgtcaaagtgatgtcaccaaacctttgaatattattagtatgaattttactactacatatgtggaaaaggacttttacgtggctgcgttgttatcgtattagtactattacaatctttatttttttttttttaaaaaaaaaataaataaaaaataaaaagattgttgaactcgtagctcttaaagacgtgctttcgtgattaaagcgagatttttttggtgttagtgttttcaaatcggattgactggtattagtacaagcttttagaaatttaagtattttgtcattcacttttggtcgtgttgttaataattgtaaggaatattattattagacaccagtattatttagcattttctataggtagtactccatgattagttagcgatattttttaaaaattatttaaattatataagatatgatatttaattataccattagcagtatgatatcaagaattttattaggcaccaatgatactttttagcaattttgaattgtaaataacatgttttagcttcttttaatggtattttttttacgttttgtcaaacgatctaccaattaacaggtttctcactgtataactaaagcatctcattcatatgctgattatatttatttgaagtttaatctctcttttgatgttagtaaaattgttgagaccgaattaatttagttgaatgcaattttcaattaataataataataaataaataatttaccaaaaaataaaaatccagttccgttaggtttgtgatttacttttcacttttggattatacggacgaaagttgtttagtttttgtcttaccattagaaatttaacattatttaatttgatcacattatataatgtggaattttcaaatattatctatcttaaaattgtattatataataattaaggtttgaatgtataaaggggcatttgtgtaaaattaagtttatgttctaataaagataataaataaataaattagaggacttgttaaaaagataacaagaaacatgaataatatattatggttatatctatttgaccattataacaacatgatgaagttgtcatgtacattttacattatacacatcattgataatatttataacaagtacaacttatataaactaataaatgtgaagtgatgaagagatttagtctgaaattttgtccccaaaaaaataaatattactttttaaggcaatattattgtctacaacaagtcttctctcttttactccttttaatatggtttcacattaagatttgagctcccacttttcatttcattttccttcttaatattatagttttcccatatctttttttacaataattatttaaatttaatgtgcttatcatttatcatacaaaaaaaaattacttaaaaaaaaagtcattatctttatataatgtggaagaaagtttatgtttatcaccgcaaatttcatgctaattgcctaatttgaagaaaatggaaactatattatataaatatata

SEQ ID NO: 20675 - DNA, 2555 bp, Cannabis sativa
  modified_base (65)..(65): a, c, t, g, unknown or other
tttttagtcacaatacttgttgtaattaaaactaaattagtggcaacttgtaactaaatactatnttttagtcacaattacattttgttatgacttctaaaagtcacatttaatcccaaaaaaattatgttgtgactaaaaagttgtcactaaaagtagcaattttttatagtgaatatgtttaacctgtcaaattttattctcccacaaggcatatcattcctaactcgccatatataatacacagtggcagctaggatagagagaaacatactcttgcgaatgtttgtgaaaattttagctcgatatcgtccatcttaaaagctttgcaaagtcttcaccttccagttgagccactctttgacaacttttaaacatttcttgctgtatgaacaagcaaagaagagatgttcaatggtttcattaccttccccacacaataaacattgttgatttatattgtagttacattttgcgattcagacctttgtgtttagtctctcccacataactaaccacataatgaatctatgccttggagtaatatataactagtctttcccatacaaaattacaccaaggaactttttcttcttgagcaaccatcatcttcagacctaattttatactatagttctgtgataagaaggcttcttggctgatttgagttttgaacctatttttcacatcaactattctcttctagtaccaactgcagtcgatagtattttcataatcccaccaattttgttccaacaagtacacactatttatccaatatttgacaaatatattatctttcttttttgcaatggccatacatatttgcccatagcagccaaattctactcttttaaattcctaaatctcaagtcacttgctgctttggataaacaaacattttcccaagcaattaggagcatgagatctcgagactcctttccataaaaaatccctgcaaattgcttcaacatctttaagtaatttcttcacaaaatcataatttgagaccagtatgaatgtatgaaatttaacactgagttaatcaatattactctctccatataggatatgttcctagagctccatacccgaattctgcttgtcattttttctaagatacttttacattcagtagataaaaattcttagaacagactgggattctgaggtacctaaaagggagatggctgcgagcaaacttagacacttcaagaactcgattcactttagtatccaacagtaaacagtcctttttgcagcattggaaacaaccccaaggtcgatgaaaaattttcaagcctctcaataagagcaaaattgagatgaaatccccattgcaaaaaaatagcaaatcatcagcgaaacacaaatagttcagcttcaaaaacgagcatctatcatgatatttaaagcttagccaagttcccaccctcatcacaatttgagataattattccatatctaggacaaacaacaagagagacataggatcccctcgtctaagccctctcttgtcttcaaagaaaccatgcatagatccattaatgagcaaggaaaacttaggagttcttatacagtcctaatcaagtctttgaacctttgagaaaaacaaagagctttaagcatctcttcaatgaaattctagtactctaaagtgtaataaatttttcgcaaatctattttgatcatgcagctagacttgcaatttttccatcatacttacttaaaaattaatttagttcaataattatttattaaaattatttcaaaacttctaaaacttaaacaaacaaaaccctattaatctcgcaaatctagctagttttggggctgttttatgagatactaaaggacaagttattgttgcaatgtcaaaaccttatcctgactgttttaaaccagaagtgatgaaagcactagctcttaattagtctgtaatggcttaaagatttgaacatatctattcactacattgaaacggattctcttttggtggtcaaaagattacaagctacacagttattgtttcttatttgcatagtttgttagcaaatatttctattctcttgtctaatttttcaggagtacgtacaaatctctcatgtgtttagatctgcaaatattattattcatgctttagtaaaatatactctttccatagacaaagaatgtaagaattaccacctcctctaatgtaatgactgttgtattataaatcttttaatataatagcattttaacttaaaaaaaaacataataatcatgacatactaaagaattggtttattttctcattatatacattattaattatcttttgattgattataggtctatttaacttttatggcgatcatgaacatcgtaaatagtttgataaatttaagttggtaattttaaattaattagttttacatattataaaaacaaaactttcagtattattataattaactgcatgcaaataaaaatatacatgcatgcattgcacgtacatgcaactaaatattaattttatttctggactatatattattcataatatattttga

SEQ ID NO: 20676 - DNA, 2970 bp, Cannabis sativa
agagatgtttcatgattttgcaatatttcgcgacatttaccgatgttttcgcgacatttagcaatgtttcacgacatcgtcaaaaactagaaaaaaaattgcagaaaataggtgagttgagaactcatggattttggggctttgagtttcacgatttctttttgtagtttcgcggtatcctcctcggttttgtcctacgtttcgtcttcggagtgggtttcaccggaagtggtgcggtggtcgtgggttgtcttgggtgcttctcgtgggtcgtcgcgagtcctcatgggtcttctcagtcgtgggtcgtcttggtcgtgggttgtgggtagtctcggtcctggccaaaggaagatttggtcgtgggtcgtcttagtcggtcggagctcgtgaacagttggggctaggaataacagagagagagggggggaagttataagatagagagtgggagaaaagagtttttgaattgtaaggatgcttttggattttaggatatttgaagaatatttaaagtatttgtttaaatgtggtatattaaaagaatagtctaaatttttaaatatgttttaacaaatttaccttcgacaatatacattaagtttttctataacttaactacctacataattagttgattagcatgggttccaacccaaaaattattagagaatagatgataccactacgtttataattagtcgctttgttttgaagttttgattcaatcagcattctcatctagaatcatttgtctcattttcttttcttagtcacaaaaattgaatctttgtttatattgaggtcatgcaaaacaataacacatctagttttgatttgtatgttttgtttgcttgtatacatatctagtgtatatttataggtatatatcaagttattcttgctgtcatattggttattttagaagttagttagtaagtctagttatcactttagttagttagttttgcttagttaattatgattgtaactgacttttagcagctataaataacttgcttccttcttgtaaacattaatgacgattcaatgaaatgaaacttttagtcctttgcttttctctttcttgtttctctgttttttgattttttggtgtataattagagctgaacttcgagtgagctctcttctccttcctcttctcttcttgctgcttccacttctggttcctgttcatggctagaggagaaggtgttcaaactcgaagtagccgtgatcttgatgacaactcgaatgactcgaaataattttctgttcttggtgagaattcgagatctacaaatgcaaatgacctatctattccatattttcgttctaatggtgacaattcaggtgctgtcttggttccaaaaattctcacaggaagtgagaattatagcaccttgagaagatcgatgatgatagctcttgttgctcgaaataagataaaatttattaatggaaagcttccacaacctaatgaggatcatgattattatgatagctggtgtaggtgcaataacactgtcattttttggatacttcatgctatttcatgagaaattgctgatagcataatgtatcatgacaatgcagctgagttctgggaagaattgcacggaagattcaatgagaagaatgctctaaggatttttgaagaaaaaaaaaaccatgcaaagtctttcacaaggatcaaatattgtcacaacatatttcactcgacttaaatccctatagaataagattagggaatatagaccacaacctgtttgtagttgtggtgctatgaaaactatttaagtttatcaagatgaagatcgattatttgaattccttgttggcttgaatgatttttatagtatggtgagatctcagatccttatgtgtgatccttagagttagtgtaggaaaaatatcatgacatacacgctaagcaaagagcttaatttttctgagaatttttagagatcacaaagcacgctacaactttgctaaaggaattgatgaaattaaaagaatttggactgggaataggcagaatccacttttaactgtgtagactttatttttttcataatgctacgcgacctgtacacaaaaataatgttaatatatcaaagattaatatgtatacaaaagaatataataaaacaattatagacaaaacttagaaaacaattatatactcatcaaagtgcatcttcgaattttttttttttgttgttgttttttttttttgagagagagagcagtcctaacactgtgaactattctccttctgattaattttcatgtgttacaacaattacaaatatataattattttttttaaaaaaaattaataataattaaatatctgcaaatataatttcttttatattaaataattattttccacatataaggtgagaaaatgaaattaggactaaaactaaaagtatgtgaaagagaaataactattttaggaagtaataatgtgttgaaaaggttgttcaaaaaagatatctcttgaaaagatacgaaataataataataattatagacttgtttgttgaaaagatacaaataataatatgttgaaaataataaaagttcattgcatatgcattgaactcccgtcagacagatgaactgatgacaactatttgtcttttcagaaaatatagtaaactcaaccctcattattatcatccaataatatatatataaaaataaaaaaccgaaaatataagctacgcaaaataaaagcatctctagccctagattcaagctgtttcacaaattatgccctccctccctattaatttttttgccgtgttaaaaatcaagcaacattttgagcccgtgctgctattggatcgaattgcagagcccaaagtcattttttgagtcattacactgtgaagtgtgattgatttctaaaataaaatctagaaacaaaacttagggttttagtttctagaattgtag

SEQ ID NO: 20677 - DNA, 4121 bp, Cannabis sativa
agacgatgaattctccgactgaaaccagtgtcttcatcatcgaatcgataagcaagtttttgttcagtagttccacacaaagaccaggaacgagctgctgtgttatttgctctgtccgccaaccagagttctcttagaataccaggaaaccggcatgtcaaaactttcccattgagcttttttttgactatttgaatgatattacggccaattaactccatgagatattcatgggctatcgcttcctgagttttcgcattcatgccatcactcctctgtgttaaacctcgtgccacccataaagcaactagcctccttgctgaaatttcaaagtccctcggaaacaattcaaagtcagagagacaatgttcaagatctggtcgaaatggcaagtcttctttaatgatgtccctaacggccacccatggtgtttgattctgaccttgagttacacgctgcagcaccacagacaactcctccttagtgacttccttccctgacaataaataaccaatacgtaagatagcaaggggaagacctccagccttcaacaccacctttttggcaagctcaatatcttcctcattagaaggacacgagactatttgggtgaaaaattcccagctctcttctgtggttcttagccgaagcgagtgggtacttaatggatttaaattcgcatgagaagctacagctttatcacgagtggtgatcaaaataatgggtctagttgttccatctgagaccactgcaggtttgagtatatcccaagcttttttggacaacaaattgtcaagaactatgaggtggggcttcgcatcacgttttaagaaaccttgcaactctttgatccaatcttcttgatcactcttttcatcttggggccgaaggatctgattcccaacattgcggaggagtgaaacattactcatctcttccggaacagaaacaaagtgacgacgagtatgaaatttgtcgatgatagaatcatggttgaagagttctttaacgatagttgtcttaccaactcctttcataccaacaacagaaataactgagccgaatttattagtatcactgatcattttcaaaagtttcaagatgtcaacctccaaaccgaccgtaaagcatgaatcctccatcaccttaatcttgtacacttctttgcataatttaagatgttcaagcgtttcctcaatttgccgaatacgtttgatcttcatgataggcttgacttcatgaaacgtttccgtcaaaaactcaaggcaagcttttcttgtatgaatggcaacgttagttgcctcttcttcgttcaaatgtctccgagtattctgcaattcgactcgcagattgttaacggcttcatcatcaagttgctcctcatcattaagttggtcaggaatcacagtaggcgtaatcaccacatcacggaaagagtctcgctctctcttgataaaactaaaaccatacctttgttttgtttcaagaagatgagacatctctcttcgaacattagtaataatcgtctctaacttgggccttagaagaaaataattagggacgatggaaagcttgctaaaccacctacgatgatctgctgcgtctttcaagatagtattaacgtcgttcagtgatcgagcgctgatctcctgtgcttcctctgcccaagccttctcaagttcgctgtcaaatctaagcttttgtaagtcttttatgaaagctcgcagtagtctcagctgtattacaaaagaagaaactttatgtgttagccctcgacccatgcctggttccacagtaaccaggcgctctaagaccaaagcaactgcagaacgaaacagcggctttggacggagaacagagctctgctctgcctcctgaataggcctgtcttgcaaacttctcactttcatcctcgactcctctagttccttaacaatggagtttgtatattctttcttctgctgaagctggctttttatctcttttgtgattcgatgtattccgagggcgagctcaactattgcaatgggatttttgagggctagcaaaacaacagcgtaccatttgaacaaattagtactagcttcattggtgggtatgagtttctcataatcatcaacatagcgttgaacatctgagatcacctttgcttctttcatcaaccacttcttctcgatttcactcaatgtttgagtcattcctctcagggttgagctctgactcccacgcttgattagctctcagctttatttcttccacagttccactgacttgttagccgtctggaaatcttttgtaagagcatccaataagcttcgttctcttttaatccacctgtagtcatctaaatactgcacaattttgtagttaagaaagatgaagacaatggaaaacgcaaaaaccaccccaatagttatttcagcaatgtcttcctcgacagggtcttcatcggtattcgagaaaaagggtatgtatgccgccaacatctcacacttcactctcaattctcaaatattagcaatagctctttcaatcttttattctctcttttagtggtgaaaaattacacagttcggttttaaagatccaaaacagcatccagctatttatgtttctctacgctcacatcaagtcaaagacagttttctcctttttttttaacagctcatatcaggaaaaacacatctatcttactagtgaaacgacaagtactatctagtcaacattagacaaaattgacgtgaaagggtctaaactaaaactagagagaaattcagttattctcggccacttatgcatacacacagtgtgtaaacaagagagaaatgataagatattctctgccgcgtaactactcatgcaaatcattttttctttttttgttaaagtacctgttataggtttaaggaaaaaaattcgaaaggtaaaagtaaagaaatttcttcaatctaaaaaaatttggtgtctgtttggttgttcaaaataatttgattatatagaatattattaagaaaaatatgattgtaataaaatgtatgaattgtctttggctagaattgtctttggctatatagagtaatatacaatcatattctcgttaatggaattatattgtttgattaattataaaaatcttgtatattattttaaaaaattaaaaaaatatatatttttattatatattaaataaaaaaaatatatttattaattagtaaatatttaattttgttgtattttttttattaattaaaatgaatattttcatatattttatcactatatcatttatttttgttctaatgtcatttatgtacaccattcacataaatttatatataatgtatttttatatatatttattattgtatttatatttattgattagttacacttaaccacataaatcgattttttggtaataaaattctctaaactttacttttgttaactatttaccactctcgttcaaaaaactttattaagtgccataataaatataccacagtatacacatgtatactcgtgacaaatttttagtgaaaaatattaacgacaaaactacctaaattctatgattagtgacacttattcacataaaccgatatttttgtagtaaaatccttcaaacatatttatccctgctcttatacactatatcaactccccttatacactatttataagaattgtacctcactttgatttttatatttataaaaaggaagagtattaaaatcaattgtctgattccatcatattatgtaaccatgtttataatttatatatgggtaatttgattctattaagatactcactacaacaacgtaaacatgccaaggtatctttatttaattaacttttgtgtttatttttttaacaaatgaagaagaaaaatgatggtacctcacgaaaaacttggagggaaaaacggcaagagagtaattgaatgatatgttaaagaagtcataggggaatgcaaatccaaccacaaattccttccgaataatcgaagtcgaaagttatttgcaaaagtactaaccctacattcgaaaaaagaatatactgtacaaaagtgtctgggaaagaaaacaaaaattacacattaatatacataaatatat

SEQ ID NO: 20678 - DNA, 2637 bp, Cannabis sativa
taaatcaaacttcattttgttgttctgacttgcagaatttgatagtctgagaaaattatattatatatccattatattttactagttttaatttttatctttatttttatattctctaaattatactcacttttataaataatattccatttaactccttaaattaatctaaattataaattatatgctacggcgtgtgccacttacatattgttaatatttacaaataataacattattttcagttaatagattattctcaattggttaatcaagtcgtcatataacattttttactcacaaaaaaaaaagtcgtcatataacatatcattttaagattacaagtaattttaaaataattttagccaacagagaaaatcccaatacagaagggaaaaaaataaataacactatatatatggataaaacaacaaacttgctcatacaaataaatacaggtttataactttattatataaagaaagaacctaatgtttataactttatacttgtgtggattggaagaaatatacaaatgatatcaaccattaataatcttgattagtttttgggatcaccaagcatgatgtctcttcgttatgccaagtgttacagcaaccagagctagaattgactgaacatataacatggtaaaacaacataaacccaattagaacataaaacaatgcataatttacaagcaacatgataagacatagtttcaatttaggtataagacttaggtacgggtgtgcataaattgatacaattcaattcaattataaccgactgtcattcattggatatccaattatgatcggattagattggatgttatttttgaatattcaattgaatcagatcggatgttggatgtggtgtacaaaaatctaacataaagtaaaaattaaaacaactgtgaaagttttgcattgatttactttatgcaagtaaaatctaagagatcaaataacaaaaagtaataatgactgaagaatattgcatccctaaaacaaagtaccaagggttaaagagagcactcaaagctctaaaagacaaatctttataagagtgtatatgttgcagacagtaaaccactaatggggttcgcttatttccagcttctgttgatgattttaagttagaaaaggatgtacaaattatcaaacaaaagacgaaagaagattgtgataaagttaacagtcctagatagttacggctatagtgcaggaaccatgtccagcacatcagtcctacctacaaccccattcgagccagcccaataggccgaagctttgaattattagtcaagttatccaatgtgaattgccacattagagggttaagcttaattatttggtttggtttgattctattttcagctcttaagcaaaacactgctgaaattgggagacagtcattgttgtaaatctaaccaatatcaataccatcaactcgtggagtaacccgaaccaggtaaaaacaatttcttatctctcggacccttcctaaagctcttacatatatatttatcctacaattacttagttaccaaaaatcttaatcaacatatattatgaaaaagttaacagtaccacttaacattttgttgaggtttctgataagtgataatgaagttactggggaaaaatccttaagcaagatcgaaatcaaatttgttgcaagtggataggggatacttacagctatagtgcaggcagcatatccaggcttttctcggtagtccactcgtacaaaaagtagaacaaacgctccaacataccaaggaattccaccaaagaagaatccaattaagaacctttccaaagaaaaaggaaaaaaggaaaaaacacagaagttactgacatataacattttgaatttagcatgatttatcatagcaaatagtaaaggttacttcaactctatgtaacatgttttcatgtcaacgtgaattgactgcatttaataactacacatgccaaaaacacatattaactcgcataaataactccaacttggtatcaagcacttagataatattattgccccaaaatatccaaagatagataaacaagtaatgatagacaccaaaatgaaacagtaatattatgatacaatattgttctatagttcagttcttaaaagaattagaagaacataggcatttctaaactcttcgatatagtttggtattctccccataaagtaaattactgtctttaacacataaattctcattgatacttcttgtaagataggactagcctctatatagaattctaactaactaataaaacaaccgaccctataggaactaagctgaactaactaacttgtgactcatatatttaaggtctaacatattactattcattttcttcttaagagatcagtaagaacaaacttacaagaaccagcccatgccaagaccacagcaaggaagacgaagttctcttacaggatgtccctcaacaatagcaataccttaacaaataagatacaaggacattagacacaatggagaaactcaattttccatataaatatcaaatatctaaatcttagttagtacttttacattagtgatagcaacataagattatggaaaaatctatattacaccccccccccccc

SEQ ID NO: 20679 - DNA, 1512 bp, Cannabis sativa
taattagcttttattttatatatatcatttgaaaaaatttaaatatctaccgcgaagcaagagctatttactagttcaataatattaaaaaaaaaattctcgttgctgcaaacaagaattatagagtttaatatgaaataattagtctatctatgtgtggctaaatgctaatcactactatctaacgtggtgtggcggatatcacaatgggtattttccaagttcaataatacatccaatgaaagctccgtccccaactgtaacaatgttaatataaagcactgcattactcaatcgatataaatatgaaaacactctttgaatgaatgtcaacaatctgacatgttttcagtaaaaaaatctgtcagttatcaatctaattggtggattttgtgccgctcaatgtgacaatttacgctaccatccatctatcaaaattcaaactctgatattttcaatttcagccctttggaaacctcaaactaaaaaattatatatgctcctaattgacagcaataacccaaacaaaatgaaaaccacatcactatcaatggaagaaagattactagagataaacaagcttagaattagccactttagccatgatcatccattaacacaaaccaattcccctccaaatgaaaattgttcttgctcagcatgcaatctcaagattatatcatcagttactgcagaatattacacctgcaaaacttgctcattttcccttcaccaagtttgctacaacatgccaaaaaaaacacaacacccagctcatccaatacaccatttgactctccaaactacttgtccttcttcatcatctaaagaaggaacctttgaatgcaaggcttgtggagatcacatcaatggtggtgtcttctactatagttgtgccgattgtggcctttattatcacatcctctgctcagctctgcctctcaccatttcagtctcttctcaccttcacgaactcaagctcacattttcatcaccctataattttagctgtgatatatgtaccaaaccgagttacaaaggctggctctataggtgtcagctatgcgagttcgacactcatctgctatgcgctatctcaaatagaagaacaacatttctcatcaaaaatcgaattctgccattgcccaactcttcaaataggcaaatcaatatcaagtcttcctcagtaaattacaatagtgaagtggaagaagtaatacagttggtaatacaaggagtagttgaacaaagttcagttagctcttgctcaaatttcaattcagatagtcctaaagaaaatcttaccataacaagtacggttggatttgctcaaacagattcaaagttgggtttttcttctgccaatccagggaaacaacatcttaaccaaagtccattaactttagtttcagaggatttgagcacaactccaagtacccaattcagtgatgcatgtttttccatagatttagccaagtcttattcaggttataatcatgcaaggcaagcgag

SEQ ID NO: 20680 - DNA, 3320 bp, Cannabis sativa
gaattatatttgtaacaatggaactcataatttgcatcttaatccttttgcaactggaatcaaaagcttgctctctttcttccctaaagtgtctcttagctacattccaagaggggcaaattttgctgcccattgtttagctaagacagctttaggcttagagcaggaagctttatggatgagctctactatccaaaatgctttatctcatgtatcatgtacttcaaattctgattaatggatacaagtctttctctcaaaaaaaaaaaaaaaaacctattttgcaatcaaacagcatccaaaatgattcagtggaacaaaaatatcagcttttcgcaagacttgcaccaccatacaacacatcagaagctttcaatgcacaattgtttaaaacttctttaaatttaaataaagcttctcgacaattcaattggaaagacaattacaggatttatagacacttcagttcttaaattacaacataatttacagggttctcagtgaaacagtttacacactatccgttcatgagatcagaacttcaaaatctcatcacaattttttccctgtccaattgtaacagtcgagaaattacttgtttatccaatttgaatcctgccagctctgcttccttgcagatatccttacacttagccaacctcccagaagccatgtaaagtttaatcaagtccttgtaaacatcatatgtgggtgagaaacctgattcttttaaccttgcaaagtatcttgaagcccttgagacatcattcagagcaacaaaaagtctgatcacaacacgataagctggaagatcaaagagagaatttgattcctccatttcccaaaccacagctaatgcctccctatactttttctctaaacagcggctatgaatcagcgttgtatacataactatacttaggtcattccctgattgtttataccattcatataggctctcagcaatttcaaatttcccaagtctaatgcatactttcattatagatgtacagtcctgctggctcaaagttaagtcctgtctatctccgagctcatttaataagctctccacaagagcatatctttcaggattctttccaagctctataattactttagcatatgcgctggaatctaacatcatatcattatcttttgccaatgataatatcttccaagcaagatgcaagctacctcctttggtgaatcctcttaccattgcctcaatcacacttccactagccgaagccgatccaacaaacctcctcaaatcaaatggaactttcaatgcatggttcctagccagcacctcaacggtagaagctaaaatccggtcatctgggtacagatgaggttgtttctgaacccaacagaacgtctgcaaagctctttcaggaagatttagatgacccagttctcgaactgtcattgacaaggaccccttttgcagaaactttgaacacttgttgagaactaaggacacatctttttccgcaggaagattctttatctctcgagctaggccaattagaacaccagggctcttgtaaacttgcttggatagaggagcacgagaaaacattgtttcaggggtacctgccctttttacatgtttcttcggtgtaggaagccccaaaggtcgaagcatgtgaggaattgggagtggaagggatctctctctacccaacttcccaggcttttgaggtattctcccttggaaaagcgatgtaatagcctcaatttcatctggaccccaaacaatctcattaccatcttcacttccatttttttcttcaccctcttcatcagtcctatctgggggacatgtttcctttacagttttcttattcttcaaaaacaaattcgtcccaaggttgggaggaagcctagaacgcattggatatcgaaggttctttgttagttttctccttgttttgggatatcccatcaaaatcactctgctatgccttgcacaattcccatatggaattgaatacgagccagcagtcaataacctacaatccattcccaagaattaagaattaggcttaggaattaggttaccaagcaagctgagttttcaacgtatttgtcatctaccaatatcatggaatacttggcatgcaacaaatccagattctaattctagtttcaaagcagactcccaaccatgattttgatgaggtgagtaccccgaaactcaatggctcaatcaatcagtcattagtaagataaaatttgtctgataagatgtgtgatggatcggtatggatggtcggatagtggaagtttaaaagcagcgaggtggtggttaccaagaatgaaataggaggctaagagtgagtgagtggtggtgcaagtgatactccagctctaaccgtactgttacgcatgatcaactacacagaataatatcaccacaacgctcctgtcctgcacatgagataagtcactgtacgtaattcagacccgacaattcttgacacaacatcaattataagactagaaaacacacaaaaataaataagaataaaagatcataataacaaggcatgtaaaaactaatagacattagctttcaaacacgcgattatagtccataaatcagcctttggagcctgattagcaatgtctgttcaagtcactagatagcaaactctgaatgatttagtgactatacttgagtaattgttcttaaaatccttaaattctctagaaattcgggcagcataatgtctcaacaatttaaaaacctatataaaataaacacatatacaataatcccagagcagacaaataatttcacaagaaactccgactatcacagcaaacatacaagaacaataaagtactgcaagagataaagcattaacactaagcagaaaattccaacagcattccagataagataacagtcatacaaaccttatctcttcttttcctcttgcaataggatgtaaagcgtctctattataaactgagaaaaatggtatttctctcgctcctgaatgaatattagaatcacaatcacaaagtcatcagtaaaaggctcaaatattcatagatgcccaaaatgacaattactaacttcagagtttcgggttttggagtgtgggggtctcgattttgggcttggcttgggccgaggatggccggggacggcggtgtggtctgggcagagggctgccacgcgagtcagggaacaagagagagggagagagcgtgagagagaatttattttgtttcttttttaattttaactgtttattttagttattttaatgagtttattgttttaaaattattagcaaatttaagat

SEQ ID NO: 20681 - DNA, 3570 bp, Cannabis sativa
ataatgtgaagaatactagattttcatctctgattaaatatgtgataaatcacatctattaatgacaatcaacgaaagatcttttaataaaaattaggttgagacacccaattattcaaattagaataaaaaagaataacacaacaaactacgaccataattctcgatattatatatcgattaaccattaaatatagtacaaaaacaacgggaccaaacccgaatccacctatgcatcaaacatggtcaccctattataaaaacaaaaagtcagcacaaaaataatataaataataattaaagataaaacataattaaaaatacgacaaagtaagcctccaccatccctatccagccacaatacccctctatcctgatggtgcaaggacccaactacatgactgtcccaacacacattcccgacaactcccaattgcacaaatcgacccattcaatcccaccagactggaaaaattggaatttggaaatccgcatagaaaaagcaacaggaccaccaccgagttgggattgggagagaccaacgaccacgattgagagagaccgacaaccaccagaccaccaaattgcacagaccagatcttgccgaaaatgaagaaccaccagaccacactactacaaaatagacttttggtatcgactcgagggactttttttttttttttgaaaatcgatactaaagaccaccgcaactctaatgtatcggttcataactgacacctataatgattttaagtgttcgttagtagatcaacactaaaacaataaccaagacaaaatatatatacatacaacctaagcataagtatcggttcataaccaacactaaaagatcttttagtgtcgattctaaaccgagactattgtgctgattaaaaaaaccccaaagaaaaaagcccacattaaaccctactatatatacatattattcttaaccctacatttcaaaccctctctctctctctctctctctcgatttttctctgcctcacctgatctctctctcccttctcttcttcatgtggcatcggaggccctcctctgtccatctcttcccgagctcactcatcgttgttggattctttatctctctctataaagttctttctttctttctccatctctctctgtctctctgtagatcattgacaaggaagcttttgttgggtttcacagagttggtcggagtctgggttgcagaggcattgggtttcgcagagttggacggagaagcttgtgtttggttatgattttcttggttgaaatgttggtctggcgaaatatttcccgagagagtttcaattttctattgatttggttttgattttttggttgtaatgttatgttagtggctgccattttctttaatagaggtaagatttcattaaactgaaaaatcagccattacaatagaacgtacttcaggtgacaaatcatgagcctgaagaatacaatctgtggaaaaacaagagttacgagctaggcaatgagcagttttgttaacagatcattgaacaaaacaaagagaaagtccagaacaactaagtaaaagactcttacaatcctgaaccaaaataccaaaagcagatggcatgcttaaattgtttgtaattgcttggacacaaaggagactatccgtctcaatgagaacattaggccacctatgacgaataatccaactcaagccttccttgagtccaacgaattttgcaatttcaggattaacacgacccacaaaactagatttgtatgcttcaataacatggccttggtggttcctcgcaatacacccgaagccaaatctgcccttgccatcaaatagagccccatcaacattgactttcacttgatctacatcaggagtagaccaatgcactttaatagccacactaggagcgttggaaagagaaaattctatcctggaatgtgcaaaattatactgatcaagcaagcttctagccgagaaaatgacagcagcaacagtagttgttttctgttgccaaatagcttcgttcttacccttccaaacactccacgagaccattgcggcttcctgcaaaacatcatcttgaacccgatttgctatagccataaaccaactaccaaaattttactcacatcagctagaaacatcaacccgagatcgattccaacaggcccaagcaaaagagcaacaaactaatgcatgaaaaattgattcctcagatgagttgcaaacttaacatgtaggattaactggaatgtgccttttcgacaactaaacacaagttgaagaatacctgaaaccgctcgccaaacaaaattactaacttttggtggaatttttaacatccaaaaacaagtggcattattgtcagtccagtggcggttgccattttgttttaaatttttgtccattttattagtgaattttctttgtaaattatacaatattgtttgacttacactccattttatttattttagatttagaaaaaaattatataaattaacttgcaaaaaaaatataaattgtactttttattttattttataggtattgttgaccaaactaagaaaaatcattaaaaaaatcgatatagaaaagtaagtttataacatttcaacttttgtaattttgaaattactaaagtctatttttaatatattttataaaattcttcgttttaaaatcgacacttatccctattagtttctgttataaatcgacaccaaagaaaaaatatatatgtacacatttaagtgtcagttttatacaacaccaaaactaattagtcttagtttatgaccaacacttaaattcttatattttgtcactgcagaataggtatcagttctatgaaccgacactatagttataattagtcgagaactaacactagtttcaaattcccttaaccaacaccacatcggatcggaaaacaccataacaattataaaattctgaccaaaaactcaaaaaaaaaatctaaccaacacaatgtatttcaatacaaacaatgatcaatgaatttaaatcaaccacaataatcgaaacactataaaaaaaattacaaaaatgaactaacctactaaaaaaggagttagggcttcgacgacgcaagcttcgattgagaagcgggtgaggaggattagggctttgaccatgagtggtttttcatgtcgcggggtttcgggttgacgatggagcaagagagagagagtggggtcccgagtcttggggttttcaggtgttgaggctttgcttgggtccatgacggagtccacgacgtttgggcttctccgactatgacagagagaagacgagagagagagcgacgacgtttgggcttcgtcggctatgtcagagcaaaaacgagagagagagacgcaggagttagagagagatttttttttttgagtttttttgaaatgaggaggatagtttgggtatgttttttttttttttttacatgaaattgtaattttattaatttagcattctgaatacaaaataatttgaagatcagaagaaataaaagatcccataatgctacgatcaaggatcgtgcg

SEQ ID NO: 20682 - DNA, 5411 bp, Cannabis sativa
  modified_base (3306)..(3319): a, c, t, g, unknown or other
tttattagctaatttattagatttgaccattttttaattttttttaaaaagtagacatttactatattagttactaaatttagaattatctcaaccctaaatgttatttagttcgatatttggtagaattttttagttgaatttttatttttataattataggttataattatttaactaaacccacttataattatataaattttatttttgatataataaattattatagagaataaattcatgaatatccaaacaaatgattacagatttttccaaaataatctattcagtttactttactgctgtgagactagctactattttctccacttcatccggtcaaaagaaaacgaaaaaaataatatacatgtatatattagaccgaccatccatgtgaaagctacgttacgtacgatttacgattattcttttctttttaatttttctttggaaataaataaataaatagaaaaaatcttctttattagaatgtgaaaactgatactctttttcaacattaatgataatggtggacaatcacattgataaaatagaagattatattgtataattatcgagcggataagaaattctcaacgcgagttgctaggatttaattaaaaaacaataatagggatcgtcaattataatgtactatttgtgattcaacttaaaaacttgacccttattcaacttaatttataacttgaggacttaaatatttacatgtgttattaatgtcaaatacataaattatggttgtggtggtgttggtggtggtagatgtttggttgtggcttgcattgggaatttattctatatatctttgattttggactgtggtttgttgttgggttccatatttcaatcttaaggagaagatgtgagttttggtgtattggggggctctccttggttgtgtactttgtctagatcattttgttgggataaagtttttatacttcgtttggtttaacgtattgtagtcgtaatatactactacttaaaaaaaagagtaaatattattttacattctctattttgtaaaagttattattgaatcagaactgaatttaattttcaacaattttattttttaatagaatcaactttaagacaatttctaacacgaactgatacagaaaaatataactaattttgtcatcatatctagatcagattattattaagttttattttagcaaaaattcagttaaaggtcatatttgtacatttttgaaaaatacaggatccattttatcatttaacgaaacagaaggtccaattaataacttttacaaaacacaaagtctaaactagtatttacctaaaaaaatgagttaagaccctttttgatggtcatgaaatatttttttgtctttaccgtaacaatttggtcattagacattaaaatgtgaaattgtactaacgaataaaattagagtaaaatgtgttttattttcttttatttttatgtcaaagttaggattatgttagttttctgtaatagtaactgttttcagttgcaactgttctggttttgtaattcttgttttctagtctttgtattcatcttcttctatcaataaagagagctttgtttttcaactgaactctctctaaatttttttctgtttctctaaaatttatactctaaatttctacatggtattagatcgcccttgattaccgttgactatggaatccacctccatcgatccggccacagctcccaaagctccagcagtccttactcaagctaccagtgctcctcagttccagatgaactccaactaaaatcctttttcttgatctttaacatcgactttgacaatcaaacatgatcgtactaattttctctcttggaaatcgtaggttgtttcgacaatgattggccatgactcgttagatgaaattctcttcaccggccttccaccaccatcaaccctgatcaatggcaaacctaatcctgcatatggctagcagaaacgtaaatatctactactattatcatggctgcgctcttccacgactgacggcgttcttacctcaattgcaaacttttccacctcctctattgtatgacgagctcttgaatagaagttctcaagccaatcgaaggtttgacttctgcaattgaagggccagctttccactattcaaaatgggggtctctctctcaatctcagcatatgtggacaaaactgttagttttatggtactaaattagatacgcatgagaatgatttcgtaatatctcattatcattgtcccatagcccaaataattttcagatgtgtgtacattaaatcaaaatataaaataataagtttagaacatatacctcttgaagactatcagggtatcctcgaaatttttcgtatgttgtatccttaatccagttgatgaggatgatgtaatttgaactcaaaccagtgtcttccaaatcgaaccaccgcacacaagaaatattgtgggctattaggataaaatgtatatagttgttcttgttaagttctcaacacatcatgagcaagaacagttgagagaaaaattctttttcttttctctctatatttaaaaaatatatgtcaaagttaagtgttctgatttctcacatcaggcttctatttatagtagttaaattcttttgattaaatcatatttaattatttaaataaataaatatctataaccgaattcgattactaatatttatgagggaatctctcaactacttgagaaaatatctcaacaattttaaaatatctataaccacttttcaaatttagatatttatctgattaaattaattaaataattaattaacaccaaaaagacggcacaactacataataggcgcctaccatgtctgtttaatgatggtgtcttctgtcccaacaaatcttgtcttgataaattttttcttaataatttttgtcttttctctatttgattaattttaaaaaattatttatttataacaaaaaataaatttatcctttagtaccatatttaattcactagtaaatatataatttagatcccatttaaatttgtgcacaactttccagttctagaattaacacttaaagggaaccaacattcaatttgttagaaaattcaagattctttaattataaatcatgtttccagccatccacattattagagtctcaaaacagaaattataagaatcatcttctctgagaaactttaacgtctgaatcaaaaaaactaataacatgaacaagaattcataattattcaagatttaggccgatctactattgatcatcgttnnnnnnnnnnnnnngtctttatagtaaacgacatgttaataatgacaactttattcgtatctgtctttgtcatatataatttctattatatacagcacctttactttgatgtcatactacatccataatccgaactgagattacttgcaccgaagaacggacaatagtgaaccgtactagcaaccattgattaaaaattctcaaaatttaatatgttgtcgactattttattcataactaagtggtcttagtgttggaaatattttacaagaatctagatttactaacgaagtatgttgaattaacatcctaaatatgaatatctctgtatatttggctgaatgtttgactgtcatattgggttgaatttaatcaagcaataacttgagattcaagctttgtatttgacctttgattgcatgcatcacaatattaactatctgtgtcatagatcctctggtaggacggagtggagcgctctcttggatgaagctttcgagttcagtttggtgtaacactgtgttagttcattccattcctcttgccttaaaacgaagtcaacccatttttctggcccagcttgctaaatcttctaattgtaattctacttgattggacaattttcctccagtattggctgatgttttttcagccaattggcttagttttgcaataaaagtttttcttttaaaaaaatattacatgtaatgggacccacattaacattatatgtattaattttattttaacatgactgagccatggctaaatttacagaaccctgaaaaataaaagaatatatactaatgggcatcttgaatagcaatatgctaatttgtcataattataaagcacaaatatatacgctagtgaggtctagtgttccctagctatagcaatattaagtttttatttatatacatatgtgtgtgcaattataattgataggacacccatcgccactaacatcaaaagctactattacattgaaaaatattccttgcatgtctcgccatatatatcatcattcatcacaaaatcctaatacatatatatttatatatttctcaggaaacacccttatatagtgatgttagaaaagaattctatacatgtcagtctacatatataagatagtaattaatatacgttacaatatgtaattatatatatatatatatattataatttgggttgagtgtgcagctaaaaaccagctagaaatggaaaataagatggatagtatctctattgttatgatatttttcgaaatgatgttcaaaaataaatttgtgagtacttaggcctaaaacaaagataaatattatttaatgttttaacaagtggtatcaaaactgaattttaaagttagcaatacgattgaatcctcaaaatttactgaaaaaaagagatgaacctcaataatcttatgatgggatttgtagatatgtttagttagtccagcagtgtgctttaaatagaggaattggcctaaagaacgaaaatgcttcatgtaagatgtgtttctaacacattaaagggaaaatactaattggtactagagagtagagagatagaaaatcgttctagcaaggcaagatggccctaatttatttggagagaattgttattaattgtgcaactaaattcttacattggctaaaaatgaaaaaaaatataaacatatataaaatagataatattgctatttgtatgagatcttttgagacgaatgtgctcaaaaacaaatcattgacgacttacccaaagcggacaatttatgtaaaagttcccaacaatttgtatatactcaaattatattcttaagaatgaatttattatatttttgaaatagacaatcaaattatattgttaaaaatttacgatgaagacatagtgatgggtgcaaatcaagataaaaaaataaaatataataaatggagaattcatgggctgcagtatttttttttttttgataaaaaatatcttcattattgagttaaaacgtgagaattcattatttttttttgagaaaattacacctagaaacgaaattttgaaaaatatattacaactaacgttaatggttttaagtgttaaatatac

SEQ ID NO: 20683 - DNA, 6836 bp, Cannabis sativa
aaaaaaagaaaaaaaaaaattaaatttaaaaaaaaaaaaaaaaaaaaaaaaaagaaaaaagagagagaagaagagaagagtacgagatatttttcggtatatttgaaattacgatattagccctgcttacacaaacgcctacacgctttaagcttatattatatatgcgttttttaatgaagaagaagaaaaaccctaaaaccttggcttgattttaccaattatttttcgtataaatagaacaaacacatacccattctctctcactacccccgcagcactagcgaccctcaaaaccctagacctttataaacccttgggttttgctgggttctcttctctctacctctcttcttctccttcgttaaaccctaaccttttcatacaacacttcttgtaatgggcaagtcaagcaagcaatccgctactaaagtatgctttacacttgaatttctttcatttattcttttaaatttttatttgcttttctttttttgtttttctaacaagttttgatttttgtgtacaggttgacgcagcccctgctgtagtcccagtctcgaagtctggcaagaaaggtatttttttttttttatttctgttacagtttaatcttcatatgtatgtttagacttattgatactgagttgggtttggtttgttttgagtttgatttggggtttatgcatatatgattttaaaagggtttgtgtgtgtgtgtgtgtttgaatgtctacacaaatttgatattgttttgtttcttgacttatttttatttatttaattatatttgggtgaacaggaaagagagatgctgagaatgagattgagaaggctgtgagtgcaaagaagcagaaaagaaatgaggcagttgagcaagccgctcttaagaagaagattgaagtgaagacacagaagaagaaacaggaatcaagttctgatgattctgattcatcctctgagtcagaggacgagaaggtatgagcaagcatgtttttttttttaatataattttttgtgactttttgtgatgaattttagactgaggtgttgttgtaatttttcagaaaccggctgcaaaaactgttgtccctgccaagaaagttgtagctgctaagaatggtattgctaagaaggttgagtcttccagtagctctgaggatgactcatctgatgaggatgaagtaagcaaatgttttttttttggtagaaaattattatagacatggtttgttttctgggatgtttattttatatgcagttgaactaaattataacttatattgcttcagaagcctgctgttaaagcagcagtgcctgttaaaaaagctgtccctgttaaaaatggtaaagtgagttctgaggaggattcaagtgatgatgatgatgatagttcctcagatgatgagcctgtgagtactgcaaacaatacttcttgtgtacacaaaaatctgtagtttaaaaaaaatgaaatcttgttgaacctgtctgtatgtttagatagtttaagcttatatttttcgatgatactgcagaagaaaccagcagctaaggttgttccacaggcaaagaaggctcctgctgtagcagccaagaaagattcttcagatgaaagctctgaagaggagagtgattctgatgaggtatgtttgatgttttcagtgttatacttctgctgagtaatatggttcagataatctattgttagttttattttacaaaaatgaaatgattgtgtgtgtaggaaattaaggtaaaaaatgtatcggcttctgcccctaaacggaaaattgaatcaagtgatagctctgattcagaaagtggttcctctgatgacgaggcaagaaaattgttcttatatgattcagaggttctattgttgagctttttttatttatttatttttacttaaaaaaagaatgggttgtgtgtgtaggaagtgaaggttaaaaatgtaccagcatctgcccctaaaaagaaaattgaatcaagtgatagctctgattcagaaagtgattcttctgatgaagaggcaagaaaattgttcctattttgtttttatggcttttatattatggttccttagcattagtatttttcttttctcattcaggctcctccaaccaaggttgctgctcctgctgccaaaattgttcagcctaagaaggccgagagttcagacgagagtgactctgatgagagctctgatgaagagcctccagctaaaaaggccaaggctccagtatgtttctcctctctaaatgaatgtatagcaattttatgttgttatagtattagttagtatgccatcttgtgtaaattgacttttttcttgtctgaaggttgttgcaaaaccaagtgctaaggctgttaaaaaagaaagcagcagtgatgaagaagaggagagttctgatgaatcagacgaggaaacaccaaaggctgcaccaaaggtgagtacaatctagcctaattcaactgtcttaagattgcatgtgttttgacattagatggtaacacaaagatgtggaatattctttgttttgcagccaactaaagctgctgctaaagaaagtagtagtgaggaagagtcagattcagatgatgaatctgaagaagaagaaccttcgaagacaccaaagaaaaaggtattgtggcatcatttgttttgctctgttttggattcttttttactttcaattatatgtgctgatgtgaactttcctatttatagtcagctgatgtagaaatggtcgatgctgttacaccaaagactccagcttccacagagactggcggctctaagactttgtttgttggaaacttgccattcagtgttgaacaagcggatgtgtaagtgtaaatcttaactttggatgtagtacttcataatgttgaatttacatctgacatatgtaattattgcagggagaatttcttcaaaagtgctggagaagttgctgatgttcgaattgcttataatgaagaaggaagaatgaagggattcgggcatgtggagtttaccactgcagagggagctacaaaggtgctggcattgattgtgatagattggttaactttttgtttctgtagcacactatgtgtaaataatatgattcttgaagtgttattaatcttgaaaattatcaatctaacaggcactcgaactgaatggccatgctctgttgggtcgtgaacttagacttgatttggctcgtgaaaaaggtcaaaatgctaccccatacaggtaactactcatttggctagccattcaatgtttaaaattcaattaatagctcaatatatttaatctccctttgttttcgattttacttttcttagcaaagagggctcattccagaggcagccatcaggaggaaaagccaatacaatttatatccgtggtcttgatacctccctcggagaggaggaggtaacttatcttactgttgttacccaaatctttatactaatataatgcttttttgtttaatcactttcaattcatgctcaactcaactttcagattagaagttcactacaagagcagttcggtgaatgtggagagattacaaggatttccatccccaaggattatgaaactggctccttcaaagggtttgtgttttcaactgctctatcaaagccttgtgttgtgttttcatatttttttatatctaataatatgttgtaataaactgcagcatggcttacatggactttgcggactctgacgctttcaacaaagctctagggctcgatggacaaaattatttgaaagtagaagaggcaagaccccgaggtgatttcagtggtggtggtggtggtttcagtggtggtagaggcggaggacgtggtttcagtggaggcagagatggacgaagcggaggcagggatagagggggacgaaggggtggaggcaggttttccggtggtggtagaggtggaggacgtagtttcaataaaccaagctttaccccatcaggtacattttttttctgctcaccttttccattaacttttttaaaatcactggtcaaaattcatctttttcagtatataatcatttacttttatatttctattgcagggaagaaaacaaccttcggtgattactaagctgtcatagaagaattttgaatagtatttttgcccttttccagaattttcgttttaatgttttagtaggtaaagtaagaatatcaaatttaagttttttttttttttttttcctttctggacttggtacacctatgtcacaaaatgttgttagtttttggagttcatccaaatattttgagtattaatttatttatatgttttatgtatgaaattgtcaagtggagctagtataatctataatgcagagatcatattttggcaaattttttgtactcgtttatatttcacagtacattttttttttatatataacaaaacgaaatattaagatgaagaaaaattaaggtctgagaatttaagggtaattttttcacaaaatctacatcggttttgtccttcctatcagtttttcaactgttgtagacataagtaatgttctcaaagaaaattaaattttatactatataattccaaccaaaggtgaaaatagaaagcaaaatcatttctatgcttgtttttatttttcttcctttagttggttggtaaattgcctaatggtaacttataatggtaactttggcttgaggaccaccttgtacatagacaaaattgcactgttctcctggtttgagtactttgatccattgagggaagtaataaatgttcttttctttactttgagaaagaccccacaatgaccctgtaaggttttgaatctcaagcttgagacttgttatcttcttctttgatatgttttttatcattacattgtgtctgtaatatgttttatgtccaacattccatgtgttggttattgagtgaactaacttgatgggagttgcatctgcaagaatatatacacataagtttagtatgtataaattgttcaaaactacttgtcacttgtttttgttagtacttactgttgttttggtttgtttctgttgtctcactctgagaatatgtagctgaaaaatcatttgaatacttatagttagaaactggtttataatccaatcaatttgatgaagcttttgtaaagattcttacttggtgttggttttggttttggggttggtgttggtttgtaggaacttggtgtgtctctatatttagaacctgaaatatggtaaagtattattagatatgattttcaacatgtaaatctttgaaattcatttgcattagtcattaatataatataagtatactcacttgggattccattaaaggcaatttgcaacttagagaaaaggcctaaaagagggccaccggcagagagtgttggctcggtttgttcatagttagatctgtcatccgaaaagccatcgttcttgtctggacctcctacaagggctccatagatgatatttggattagcctccgatcttcggtaccatgaatcaaatccttgaacacatccaaccatagagtggtaattgtacacagaaggtatggaggaacccctgtggtgtacatggataggatattttgatccataccctactaagtagcttatggattttggatttttaccaagaatataatcagcctgtgtcaaaaacatgaaaagggtcaatctaaatagttatatttgattagtgtaaccaaatgttaaaactattggatattgtacctgtgatttagcaaagttgagaagctctttaggttgagcttggccatctgggcaagtgagcttaacattttttgcgtctagagtgtctgagtacactgctagaagaaatgcagctgaagtggcatattgcatgttgttccattcacgcacatacaacaatccaccttaacacagcaataacaaatacaggccaaatcaaaatcttttgataaatttatataaggttttgataaaattactaaagttggtgtttgttaaaagaattttatagagctaaaagttgaaatttagagagcattttgtttcgagatttggactctaaccaggagttaagtgggcattgtagccaccattcttttggagcatagcacaagcaaagtagtcagctttggcttgatattgctttagtgtagaagtgtaggcactaccaacttttccctccaacaaaatctgttaaattagtgaatcaaattattcctatcaacattagtattttcaaaacatgaaaagaccataatcaaatcaagccaatacatatttgttaatgttgtgaaattttaccttagtgagaaggatttgtacaccagcatacttgttatcccaagagaactctttcactgaccaccctgttccacccatatacacagcattgtccactacatatttcaagtagttttcttcatttgttgctctataaagccatgctgcagcccataacaactcatcctaaaccaaaaaaagaagaaaaagaaaaagttgtaactaagttagaaaacattgaacaaaaatgttattatgtttgtttgttcaaagaaaatttacttacagaatagcctgaggaggtatagaaattcttggcattagggatagaatcgtcatataagcctctaaatctatcagcaaatgtgaaaagctgtagaagaaatgatcgcattttgttatgatattcatgtgaaaagttaccaatttaaaagggtgttacaaatttggtatatattttgggaaatttacatggtatattaacttttgtcattttttacttttttactgtatttttttataaatttcatactgcagtata

SEQ ID NO: 20684 - DNA, 2072 bp, Cannabis sativa
cactaagtctaacaacacaaataagtattgttcaaaaaggaaaaagaaataagtattttaaaactcaatttaaattatgtaaattttgtttttcgaataataaaagctttattaaatcaaatcttccaaaataatggaagaataacaagtgggtaaagagttcccactaagaacacgatcagcctcatgaagagaagcccgcaccaaaacatgtgcaaaaccattaacagactgtttaacaaaacaacattcaacatcaattaaagaggttaacaaccctctacaatcttgaattatgtaaattatttaagtattcataaatgtttcattcgagtttctgtttttcgacatgaatttaatctttatttttttgctgcaaatttaatccatttatttaaacattttttttaggaaagggatttatttaaacatattactctgatattatatgttaaaaatgttggcttggaattcttatccttagcattcatcttaacttatatgaaaacataaatatgaattattacataaattttatttgttatcttggttttattttataatttagataaattagtagtatttttatatataaataaagataggtttcaacctccaactatattttacaagttggtatatcctaattaaaatgaagaactagtaattaaattttctacaaatgaaactcatgcttagtttaaaagggtcttcaactaaataggacgaaccaaaggttttagcgttggctccacagtgttatacttttcttctccagttcatacttcacacatatacaaattacaaaagtaaagtgatattgaaagccaatttttaattaatttcagatccaatactaataggaaaccattatcattatcattatgattaacgtaaaagtcgtggtacatgcaaattgagtagagaatgaaagagacactcacttttggttaagtgactaaaaaaaagtctgcatgtattgttgaattgtattattattattattattatccattattattatatccttctcaataaaaataataataataatgcactcatctatctagataatgatgtgtaatgtcaggtatctttttttgttatggccaaaaatccaaaataaaaagttttcttgtctttttgtggttaggctcctatggtgcaaataggagaattttgggtcataaaatagtactgattttttattactttttcatctcttctttttcattcatatatttgatgataataaactactttttagtttaacacattaacattttgctcataatattgaggtgccactatttaacatgacccaaaagggtccccattaaaccgtgtttgagaaacttcaattgaaacttgcacttcaatgtacttttgataaagaaatccagtaaattggcaatgacctctccacacttgatgacaatcagatacccagttccttttggagattttttttattttttcttgggagattgatagatgcatttgataagacatgacgctttaaaagaaaaaataaataaatgtgattaatttgcacgaagaatggactatggagcaaggtttctttctgtatcaaaacaaatacatttcccatatgtctagaatcagaatatccattaacatattctactcacatagttgcttgaacaaaattattattgtaaaagcttgtggcaatatattataggctaattaggatctttatcctttagactttgacatgtaccaaatcatgtcattgaactttaaactattgagattgttggacttaaaaacttttgtctaatttcattcaattttactatttcagtgattgtttatgtactaaaccatgctccccagattttgatatctaccaaattatacccctcgaactttgacatgaactttcatccatgttagaattttttactaaaattggaaagaagtccttaaatccaacaatctcaatagttcagaggtattttaacgaccttaaaagtttaggggacaaaaatcctaattagcctatattataatccttcttcttgttcttttttttttttttccttttt

SEQ ID NO: 20685 - DNA, 2892 bp, Cannabis sativa
  modified_base (2456)..(2475): a, c, t, g, unknown or other
  modified_base (2838)..(2858): a, c, t, g, unknown or other
aactagaccactaatgatattgatatttgataagtggaagccagtgctaagacagaatgggaggacaattgtcaacattttcagagcaaactatgattaaggtaatgccatcatcacaccaggtactgtaaatttctaaattatttagtacgttaagatttttcaattaaaacatacaatgtatgtatgcagcagtctcccgaacgtaaaaaataaatgatttcccccacacaatgaataagagatggctagttgatagtacctgaagatgctatctagtaattcatcgttcataggtttacgagagaagaccttgtacgccatatccttttcatcatattgcttaagaactgaaatgcttgagaatgaaagatctggatgctcaatcgttcccactaattctggaatttttgataccgaatccaggccgaaatattccttcggaacaacaaaacatcaaggattaattttaatagaaataatgttgaataaaatgaatggaaaacaaaggtttctgcacaaggattgataagaatgttagagaacttacaggatttagaaggcccctaataaaagttgcataggtatgctgtaaacttctcttgggaattgatacttgaggagtaaactgaattttcacctcatctagaggtgtagcaaccacagcaatgtcacatttataactctttcctttggtggaattaagttcataatatctttcaacaaaagagattgattctatttcctcatgtaggtgcaatgcaacatttgaatgatcaatgagaccagaagccatctgccagtttcctccttctatggaccacaacccttcatcagatccagccaatgaaacagctcctgcaagtccactaatggctacactctgaccataattgattcttgtgatgacctggaattaaaaatcttaaatttaagcaaagctcaaacatgctactttttcatacccaaatatacatttaaacaaatcaaaattcaaacaatccaaatacaccctcttatagtatttcttgttttaagcatcatacacatacttcaaccaaactgaagctacattcttgagcatatttccaaatctaatatttgtttatactacaatcgatagcttaagatggatccataagtttatagctgatatagcttttaatcatcacaatccctatttactttattcattgactcttgtagtaagaaagatctaaatttagtcccgggttatagggatatgtccagttacagagggaatgcaatgtatagatctcaccatatgaagcttaatcatacatgatttcctatttgaaaaactcaaatccagatcctaaaagtcttatcaattcccattaaggattataacaaaagactcgttccacaatctaattcgtagctaatcatgtcagtaaacacatttttttttttcagaaatcaaccatttagtatatataaagcagataaatcttacagttacaagctcatttatcaacaaaggagacaatccaatatcagccaatttaaatcccaaagtggtggttgttagattgtagagtcccgcccatttaagcatctcctcaacgctttcaaaaatgggtctcgactcatgactctcatagtatttcaaaaaatttccaacagtttcctgcacagtacaaatatgtctcacaataactaactcaattcaatcaatctctcactcaaaatatttaatactttgtatagacacgcagaattttacctgaacaaatgtattcattttgagaagcgagaagccgtagcgaagaaccatgaggaccgaattggcgaccgaaacaatcttctgaacaaagggaaggccggagttgaagcttatggttttaaagacaaatttcttaccgtcccaaattccgaaagctggagaagcagaacaagatgatgatgaaggttctttaatggtgagattaagcagcttggtgtaattgagagtgtggaagtttttgggatggagaatggaagctccagcctcgaagaagtcgccggagacattgaccgtggccgtacggcctccaacgacgccgtttcgctcaaagatgcggatgtgaaaatcgacatcgggagtggagtaaagccggagaaagtgggcgagtgaggagcctccgatgcctgcgccgacaatgcaaacggcggcatccggcggtggtgggttggttgctgatgagacagagagaaaatagagaatgaaaatgagtgtgagccttgataacaccattgttaaggaattgtgcaaagctccaaaagctacacgtgttactcttctttacgaaactttccgttgtttaaaacgaatgattatagctaagcaggacagtgaagacttttttttttttttaatatttttagcatagattagacacaagtgcataataattttatttttatgacatggtcttttattattattattattnnnnnnnnnnnnnnnnnnnntattattatcattattattatttagggttttttataatatttattaaattaataaatggaactgattttagaaaaaataaatagaactgatattaaagatgttaggccatgtgcttttaatatttttcttctgtcataataatatctatagctatataaaaagagataatacttttttcggcatttttataataaactaagtaatataatcgcttttcgcgtgactattttaaatatataatataataattaaaaaacaattacttatgaaattattaaataataacttaaaaaaaataatctaatatataataataataaaagggatatgattttttgtcccgttattgtactttcacggannnnnnnnnnnnnnnnnnnnnagccgtcagatgagggagttatttgatctgacgg

SEQ ID NO: 20686 - DNA, 3697 bp, Cannabis sativa
  modified_base (1839)..(1863): a, c, t, g, unknown or other
ttttaaggggatgcattataaaatttctcacaaagagatatatatatatatatatatatatatagtaataaacaaatggtgccaaaattccaccattaatttagtgttcaagaatcaacaccacaaaataaaatacatttagcacgagacttgcccttattaaagatcaattatcataaacaagtttttttttttaaaaaaataaaaataaaaatctgtacgtcttttaattagtttaaacttttatttatgttttgagaaacttttatcgagaatttgcagtgttagctattgaaagagagaaaggacacaaagatcgatatatatatatatatttatatatatttatatataaaacttatagccaaattaattataacgaaattatatgtatctgtttacatggaatggaagagccgcagaaaaccaaattagtttcattagcgctttacgtaaacgtataagctaattattatatatatatatatattctatagtacttttactataagaacacacaatttgcttacttcatttgtatttaaatcaattatttaattgtttgaaaagcctatatattaattcatgtcactttcatacaaacaaattcaaagtggagagcacatatatctacataatgttacgtatagagttatacatatatatatatatactattttaaaaaacaaactaagaaaaaacatgaatatataaatatatatatatttatatatatctcgatccttgccaagatctagaagtatactagtttgaattcttctctctatcctttcagatactcaaagggtataagcatatacatatataacatatatgtataaatgtactatgtataaaactactataattttttgtttttctttttttcatcttcatgaaaaactaaaaatcagcgtgtttttcactgtttagcagttatatataaatttattatgcatatattttgcccacttttatatattatagtattattattatttttaatgaaattgtttagggtataaaaaaatacatttttccacttcattatgaaagaaaccaaaactagaagcataatataaccatttagcgtaacgttatcattgatatgtatcaattacatttatttaagagaaatactaaaaggtaattatggtgcctaatatgtgtttattgataggtcttatataaatatgataattttttaaagaatatcgccaatcaatcataaaataacatatctagaaagtgctaaataccgctagtactcaataacaatactttgtatttaatatatatgtatgtcttactcagtgaaatgagatcaatctagaaaaataaaattatgattttgaccaaaaaagaggctgctaagagaccctcaacttattataaaatccataaattaattgtacaagaaaaaataggggcaaaatatttattagaataaagtgagcaacagcaaaataattggctgttacatataattatataaattttaaaaaattaatttataaatattatacttgacaaatttccaattaattggctccctatattattttttgccagtaaagagttttagagacaattccctctcaaaataataataataaaagcattgtctttcataattttttctttttctgtcaaagaaaaaattctttaatgtctaaaaactatcatcaaaaggaattaaagtattatctttttatttggacaaaattaatacactatataatcatcaatcatactcaattattattatttttctgaaataatactccattattatttagtactgtcattttcatgggtaataataataataataataannnnnnnnnnnnnnnnnnnnnnnnnaataataataataataagtttgttccaaagatatttttgattattaattaattggtctctcaaattaatatgggttgcatgagtatatgtagtatgaagtcatccacgcaatttatttattcatttttttcaatgtaaaagcgcgtcactaatttaataacaaaaaaaaaaaaaatgttaagaaatttattaattttttgtagtgataaatattaatcttaataataacgctctctaacttaataattaataagccttaagaagcactaactatctgtttatggccaataaacagcaacttacgtgctcaaaattttaggtgtcacaactaccaattatactaaacttaatttactaataccttatacttaatatcattactaacatttgattttgagcttttttttaaaattttttttaaggactaacatttgagcttattacctttcaaaaaaatttgaccttattttgatgcgaaaacacatttatataggtttatttatatcgtaggtccctaaattatgtaagttttgacaagttggtctccacactttatttattttttttgaataaaagtagtgttctttattaacttgagcaatcactcattagaatagacatcaagtccataggaacactgttaattgggaacatacgttcagctaaagaaatagaatgtcgggcaataaagtacgcgacacgattcgtagaacacttaacaaaaaataacaaaacatttaacaaacttttgagcaacttcttgcactcctccacaaccaatctgaaaccagaagcaaatctttctgcacttctaattgcttcgacgcagacaagactgtctgactcaatggcatgcccatgtgtaattgttgcacttgagccaacttaaagcctctctaatgcccataaattctgctaattcaggtgagaccttaccatttttgaagtcgacaaaaactaatattagctccccatcgttatttctcaccacacacccgtagccatgtttaaaatcccgatcgaaagtggttgcatcaacattgagcttgatgcctgaatacggtttgatccatcactctgaaccatcaccttctttaagtggtaacagcaaagggatattccccttccttgagctttgagatattgatcaagtctcgaatttgcaaacacaaccacatcccgaactgttcgaacatgctgctgccatattagatcgtttcttgctgaccaaagagcccaacacaacatcacaattttgcacaaagcctcattgtccactcggttagcagactcttccagccatgacagcaaagtcaacggctccctgctagcagttgcaagaccagaaaactcccaacatgaccaagcaaactgacatgaaactaagagatgcacttccgtttcagcaaatacaccacacataggacaagttttgacaagtttattttttagtaaattagttttctaactatatacgttttgacaagtttattcctaaactttattttttggtaaattagtcacaaaacgtttattttattagcaataaattgatcttactcttagatattgttatttttattattttttatatattttacttactttaatttattttttgtgttaaatttaaataatttcattttttaactttaatactttgataaaattagttatattaatatgttttaggagcttttttacacttcaatatattttttttttgcatttttacgaaattttacatagaaattcctattgcaactagcggagcatcctatcgcaaccaaaaatcgtatagcaacccacatagaaaccaccggagaaactactt

SEQ ID NO: 20687 - DNA, 8462 bp, Cannabis sativa
  modified_base (1555)..(1566): a, c, t, g, unknown or other
taattaaaataaagagatatctgcaatttaattatttaagctattttatttgtagcaattttttttttgagaatattatttgtagcaattttaaatacacatgttatctttctagtgaagaaaatattttgattattaagtttgtaacctttaaatattaaaattatgtctttgaaagtattgttatttggtacttttagtaattttttattatttattaaataaaaatatgtagaatttgatattgaaatactatgatgagtgtaaattttgaatactttccagtatcaaaaacaaagttcttgtattttaatttactataagtgttcaaaaaatttcaaactcattttctgcacgataaattatttgaatttttttaaagatttattatttataattataatgaacacggtcttaaatttatatatttaatatgtattttcgaacatgaaaatttaataagtattgtaatagaaagtatacgttgttttactatttaagaaatcgatgaaatttaagtatataattttttggtgcttaaactccctatgcctactattaacttaataattatagtatttttgttgttaaggaaataatatttgtacttcaatatttttagctacttttgtagctaaaaaaaataattcaaagataaaatttatcatcacttaacttttccataatttgcaaaataaagttgccattgatctgcaactgtttcatggatttattgtattatcattatagaagctgccaagtgaatttgaaattgaatgatgtaagccatttttatgtgtctatctatcacaaacacacaaatttaaattgtttcacatgatcacaacaacaaaagtaaactcatttaaattgattcatttattatttccaaccaagccaatttcaagaaacctccactagtgtacttctattcaaaacatgatgaccatgtttttgttggaaacaaaatttggtttcgcaaaaatattctactcatttaagtttaacccctttgagagtattaggactagattttaatacacaacatttatttatgtgattcttgttgttgtgcaaataaaatagagcttggcaccatgtataagtagcgacttgtgattggttattttatttaattgtataaaatttgatatttgattatatcaatagcaatataatacattggagagtgttggacactacttgtactttttaacatttcttaataaaatataggataaatagcggtataagtacccaaagttttaagtttgtaagcggcataaatacccaatgtttgtaaaactgtaattttcttccagtttcgtcaatatagactctgttttaaatttattaaaagaatatttagaagtaactgatactatatatttctatctaaacccaatgatctagaattttggattttatatgtgtcctgtttaagacaataacaaagtctgtactgacaaaattagagaaaaattacagttttacaaacattgagtacttatgctgctaaaaataaacattgggtttatgccgcttacaaacttannnnnnnnnnnncttatgccgctatttaccctaaaacatattattttgttccataattaaagtctttacattggaaaaaaatattaccaacataaaatataggctaattagaatttttacactctaaactttaacatataccaaatcatgtcctctgaatttttttggtcgttgaaaatttctcctaaactattaagattgttagatttaaggatgtctgtctaattttattcaattttactatttcagtgattgtttatgtactaaaccatgttccctaaactttgatatttactaaattatgcttctcgaattttgacatgtactaaattatgctcgctgaactttcatctatgttagactttttttttactaaaatttgacaaaagttcttaaatttaacaatctcaatagttcaagagatattttaaacgaccttaaaagtttagggagcataatttggtacatgtcaaaattcccaagacaaaaatcttaattagcctaaaatatatggatgtatatatggttttggcaaaaacccttttttggactaatattagaaggccaatgagtcacaaaagtgattcaaattcaacaatgaatgaaactatcattttgaaaatctactcaagtgtaaccaacaaaagggataagttctcaatattcaaataaaaagaagacactatactttgtctttttgtgaatagtaccttgaacacaaaattggattagtcatataaggacaatttaccataactaagatattgagataatatatgacaaaaaactgtaaatacccttttgcagaaaaagataaaaacaaagtgaaaaaaccagaattttgatttcatatgacaaagtatacatgaacatcaatacatacatagatacatatgaaagccaccaacatagcaaattagttcaaaaggaaatatacttataatttctcgaagaacaactttagtattatgtatttttaatgatagtattttaaaattgtatatatttaatattctaaagttaaattttataccaatttaactgaattgctctaagttatatgtaaataattaaaattaaatttagaagtcataaaatcagtttgatcaatttcaagatattaaatatgtacaattttaaaatataaagtatcgtataagtattattaaaatataaaatactaaatttatatttagataaaatacataatacctaagtagacatggagaacttttttttcttgttttctattacaaactacttaattagatattgattaaatcaagacaagaaaacttaggaatatgatgataagggtaagaaagatttgacatattttgtgatagatttgcatgattatcataaggaacataaaccccttctccataaggtgttagattagtaatcttactatttaactaaactactctaagttatatgtaaataattaaaattgaatttagaactcaagacaatttgatcgcagtgataaatttttattaatcaatttaagtttcaaaatattaaatatgtagaatttaaaactatataaaacaaagtagtaaataagtattattgaaaacacaagatactgagtttatatatattcagatacataccttaaataaaacatttaacagaagtggttcttattaagaactttttttcttattacaaactacttaattagagattaaatcaagacaaaagagaataggaatatgatgataataagggtaagaaagattgacatattttgtgatagatttgcatgattctcatatggaacataaacccctcctccataagttgttggaggggtattattattattattattattattattactattttggcaacactcaatggcaggagtcggaggacacttgccttgagttgttggtacctttgattttggtggtggtggtggtggttcatttaaagggtattcagggagcgatggtggaagcggcggcagtggcggtagcggtggagaaagtggttggcatggatattgacatattgtagatgaagaatcaccatcattgtccctagcaaaaccaagtttgaagaaagtagataaccaaatagctatgaacaacataattagtttttctttgaccatctttgctctattgagtttcaacacatctcaagctttaaaaacatacatagatagagctaagtttcttgaatactcttcttgaattgttgccaaatggcagaacatctgtcaagtgacaatggcaagtagtagcctaagtgttcttttttattactaaaaaatgtatatggagacaaattatcacatgtaatatctattgatatgtgttatgttcctacaaggttgatatttatatttatatgataaaatttattaggctatatttagaagttgaattttggtaagaaaaatacttaatttaacaaaaaaatttatattaaacttaaaaaattgatttattttttcgttgttcacactttttttgttacattttcttttctcgataaaatctaacttttaaacataaccttagtattgaaataatatacatattgtaaaatttcatatatgttggacttattaacttattaagatagctcaaatggttagacctgtgatttgcttcgataattcgagtattttttcggcctttgtggcacttctaattcaattcttaaaagaattaaaaatttaacagctcattgatgtcacaacaaaactacaaatttttccaagctttactcttaacagtacaaatcaattcctattgcttacaattaatcagtctctctattgcttacaattaacataactcacttaaaacatttcatttcagccactaagaatttgacacaattaaacaagagtgattcataaaagagtgagagccatcttattataatataggacaatcaaaccaagtacataattgatgaggaaatgatacataaaatgattaatattatgagggagaagtagtaaatggggatcaattattgaagtctttctcattcaaatatacataacttgatcgattagtaaaagatgattttgtaatttgaggtgaaaatccattgtaagtcccatgaagcttttttaagcatatgtcatttatgcacttgaaaaatccatgttgttgcttcatcaatggttgttctgcatattccttgaatggcatccactatcaaaaatgaaaccaaattgaattaataaacactaattagttagtagggatatttttggcataagtactaaaagtttaaagtttataaacagtagactcgatgaccaatgttatttacactgtaatttttgtccaattccgtcattatggattttattagtttttgaatttgttgaaagaagattttgaaaaaaattgatactacatgtttttgtttggactcaatgatttaaaatttgagtcttatatgtgttttgtttaagaaactaacaaagtctgtactgaaaaaattagaaaatttttacagttttattaagtttatgccggttacaaactcaagactttgtggtagtttttttcgaaaatatccctaattattatgtagaaccaatcacatatgtacttaagctataagcatccaaagatatcaatgaattggcttaaaaggtcaaaaagaaatgaaatttgggagtcacttcatttagctatgtttcatttttgtgtgtgcttagatttgtactcaaaaaagagttttccaaattcttgtattatgcatataacattctaattcaaggagcacctgtgcagcctcaatttctagatcttgtttctgtatatcgaaagacacgggtcgcagcatgcacataaacaacaaatccgatttttcaaagtatgccttgtgagtttgcctacaagcaaaaaaatatgaaggggttagaagatatcataaaagacttcaaaaaaatctaatcattttaatccaaatattgacattgaattgttataggaaactcgacaaaaaatgagttaagtctcgttcgaatagtctagattattggaattagaaaagagtagactcttgtggagagttcaatactctcgaatggttggaaataggagagacaagcctcccgaatgcttgatttgaaagaatttttttcgagagatttcattttttgtgtcttgtttactcgtagagtatttctactcctaagattattgtatcagaaaactataacaagaaaattactcaaaaaaaaatatgtatttttaaagaaaaaaaaaattgtttttggacacctatgctgagtgggacctaggactgccgcctagcccgccttaacctaggtccggcctagtatgtcggagttcatgatagtgacttgaatttaaaatcttatgagagcaaaccacatgctcaaccaagtcaactaatgaaattgaccaagtcaactagtgaaaattggttagtgattttgacagtcaaaaagtaagaaaatttggtcaagtccaatcttcacttctcattttcattagagaatttcatattattgtaatgcccaattgactattttcattaaaagaagaccaacttcatttcccagtcaaaatttcaattactttaattaaaacaaactttattaccttactgctaatacctccaaaaattctgtatcaatctgagaaagaagtgaaatgaaaactatgaaattaaataaataaaaagaagtattattatcaaaataaataagacacaaaatgatatgatgattcttactccagtttcttctttcacttctcttatagctgtttgaaaaatatcttcaccctatttaatcaaaaagattacttaaatgtattttctcaagaaaaattaaacaaaaagtagaacaaaatgaaaacaataaaatcaaatttactcacctcatcaacaactccagtgggaattttccacacgcctgttcctttgaatacaccagctttttcttgcaccacaagtaactgaaaataccaaaatttgtcattatacaatgtgatattttctttaatggaaatagaggtttaataagaagacaaatcgtctaacaaaatagatatatactcgatagggacatgaacatccctcctactaaaatcttgatctgggaaagaataggaaactaaaccgaaataagtatttctaatcaaaatgatataaattcagtaaggacatttctcttattgaaaattcgatctggaaaagaacaagaagccctgactaaattatgagatagatttctacaatcatcaaccactgaaccaaaagtattttcttgagaccattgtttctagtttggtgaatagggtgatttagtataagacaatagaataaaatagaaatgacttagtcatttggtgacaaaaacttataaagatgggaattggatatgacagaattatctcaagttttctgacaagactaaaggatttgatgttagaggagattaataatactaataatacctggttttcatccttaatgacaaccgcgccaatgccaactcggtgtgaagcattcgcaggaattgtacttggagtttcagggatccagtaaacaagcatcaagtactgtggctcagcatgatgatatctaaacccctcctgccaaaatcaataacagaagtgatataaacaaatttccatcaatatctttcaattcatgcccaacaaagatacattaatataagtaaagtaactgctcaaaaggatgagatacgaaaactaggatccccacctaatcctacaatatttggggaccagaaaactataacaattgctatgtagatacctaagaagaactcgaacgagcaaaccacatgcctgactatttgagtaaccctttgggaaccagcataactgatattttagtaaagtaactcttcaaaagaatgagatatggaaacttggattccccactagttctataatatttggagaccagaaaactataacaattgttatgtaagtacctcagaaggactcgaactagcaaaccacatacctgactatttgagtaactgttcaaaagaatgagatatggaagcttggattcccacctaacactataatatttggagaccaaaaaactataacaattactatgtgactatttgagtaaagtaaactgttcaaaatgatgagatatcattatcatcatgccaattaaaaaatacttgtctgtcctaaagtttagtggggtatactatataactaaagattagatttcattttcaagttcatcatccatatgtgtagtggggtaaagttgaaatacaatccaatatagtggattcaaattttcaagaagatactcttcacacaagccagatgtcaaacacttagagatgctctattcatatacacaataaaaatactttaactaaagttagtaagactgaaaaattaactaacctttactgtagtttcaactaggtttaccagctcaatgggtaattttatccaaacacccttttttccctgaacaatgaaaaagttaaaaaccccaagagtctctatatatacacacatattcttacacatatatatacatatatataaacctgtctcctccattgtgacatggaagctctgagcaaagtagcaaagcaagaaggctccataggctccttcatatcaacaatgattccaccatgatcatcattagttgcaggaagaagtaactcttcaatttcaacaacctgttgttgggtcccattttcatgaacaatttccactcctactgatgaatttgccattgttctcagtctataagaaagtaaatagaaaatcaattactacccattaaagctaaacccctcttcttctcatttctttaataaaaatcacaactttcataaatttaaaaccaacccataatcgaaaaagagaaaaagaagt

SEQ ID NO: 20688 - DNA, 6508 bp, Cannabis sativa
  modified_base (6430)..(6438): a, c, t, g, unknown or other
attgaaagtccaaggactgccattgataacacgcttgatatcgatctcatggtaaaactgaaataagaaaaggttcggccccaattccttgacaaacaagcctttgcccgacttccacaacccagccaacgtgtgtttcatagcttcaaaatctatcgatctcgcattcaaaaacctccccaccaaacaccaacgatcgtccaccagaattgcctcctcaacgtcgtcctcaatctcgaaaccacatttttcctcatcatccaattctatatgcccgtactgatactccatgtcatccatggttgtactagtcgaagccatcaaaaccagaaaaacaaccccagaacccgagaaaattcaatcccaaaacgcaaccctgaaccttctggaaacctatgagaagcgacgatagaacctacacactcgacgcaatgctccaccggtgaaaacgcaacaaacggaacaatagaacaacccagttgcaagaaccagtcacagacgcagaaaaaatcttcgaaaaactagacagaaactttcacacatgccagctggcaagactcattttaaataattaaattattatatatatattagtttttagtcatagggaaaataaaaaaataaaaaaaaaaagacatgaattagctagtataaagagtttggtcatatacatacatttcaatgcctttaggatttttttcaaatgagacattttgtgacatgcttaatcaaaatgggaaatgggttgtttgaaaacaacattttgataatcaaggcagatgtattgaatcaggagacatagatatcatctgaagaaggctcgagtttgagaaagtttcttccaaagcaggaactcttttactcccaccaccataaccacctccatcaactccatcagatcttgttatgtgtcccaattctctagccacatcaaccattccaagcttaccatccccaccaaaaagcaagcatcttgtggccaagtctgcaactatctcaatctgttctctaccacaactcggttcttcatggtagtaaagaaatggatcaactatctcttctagcttccctgttcttattttctgtaatgccacgtttggtactaactccaatttatttgaccctgcaatgatttgaagaagaactatgcctaaatcacacacatcattcttctgaaacttgaaattttcatggctcttttgtgtatctcggggagttgggaataaaacaccgaatcccgcaatcttgactgagaagttttcatctagaaagatggaacctggtttgatatcacggtggaatatgggaggagagatctcatagtgaaggaatgaaagaatgttagctgtttcagcagcaatattgagtctttttggccattcaagacctgtttttggctctctcttttggtgtaaatgttcttctaaagtgccatttgaagggtactcgtacactactaatggcatataggctaagtcaatacaacagccaagaagacgagccatgttacggtgtagaacagcagataagacctcaatttgagacaggacttgcattaagtctctttcattttcgcattgtattttgtggacagcaatgtgtgatccatcagcaaggacacccgcgtacattggtccattggcaccatctactagttttctagcctcttcgaacccttttgtagcttcttctagctcatggtatgcgaatagccgagttgtacaagcttttcgaaatgaaacactgtcatggaaatgagatttgttggtgtcaaatgagtcgagcttcactggacgttttagtaggcaaaagagtgcaatgaaagaagcaacaatgaaaccagatgaaagaactcctgcaaggtgtaaaaaaaaatgtgaccacattacaaaactattgcatcatatcaaaacttatacattcatgtgttagtaagacatcatagttggttttgaggttttgagctgtgacccaatatgccttatcatatttttcattttatactatgaaatttctcattctcttacttaaattttaaactattgcatataaaagtgtctcatatatcaactaacttataaaattgtaaatatacttcatttattgtcaattaattttgagatgacaccccttatcgtaactttccttctattagtatgaaacttttcattctcttactttctaattacatttcatactcaaatttagtgcacatgtgcatatttttttaggtcacttaccacctataatcacaagtttcttgtcaccatgtcttttgttgatgcactcatttccgtacacttccttcctgtctttgatgcatgctgtgtcaaacaaattgttaccaaaacatattgatgagacagctcaaacacaaattcataagagctaattttatatcacacaacaaaacaagaaagctactcacatattaagcaccctttccctttagcaaaaccatctccaacaaacccatcttgacacaaacacctcacccctgctttgacagccgtggcattagcaatataagcattggcagcacaaacagcattggacaagttctttggaatcgcccattcgagcttaaccccgcgctttgccgagtttgttgaggttctgagaacaacccagctggagaatcctctgcagccaaacttggaaaacactgaaaacttgtctccaagacgccaaacgctgtgatcagacaagggatagcaacaagcaggggaagtagtcccacttccatcacaaccaggcaagtcaatggcttcacattcagctttgcacaaagaagagtcctcacaatcatacaacccaaggacattttcagaagacactgcatagttgtcgttttcctcaaaaccaaaggagttgagatcattgtactgacgacatgaagaggaaccaggtccaggaaagttcactagtaaaccatcagagtaaaattcaacaactctgtacttttgagaggctatgttgagaaaaagggttgttgaattcacacaagtgagttgaaaagcattagtgttagaggccaccaccccacaagaagtgttcaagtgaaatggaaatgggattttgagctctccacacgtgtcgttacactcatttagaaccagagcaggttctgctataaattgtcgttcatggagagaatgagatatggcaaagtcagcaatcaatctgagaagaaggataaagaaagtcagaagccaagggaacattgccagtgaaaattaaaaaaaaaaaaaaaaagttttgactgtggaaattatttttctgaaaatgaaagtgagaagaagagcaatgaatgcagggtagtagcttggtcatagaatatgtacataataatgtcttaaacaaaacaatgcttataagagaggtgtgatagagtaccatagagcacacacaatgttagcaaggactgcagcctacaatctgccacgtcaagtgggaccataatcagatgatgacgtggcaagatcgtagaggtattggggtgttgagggaaggctttgaagttggggaaagtgaagaagattggtctgggaaatggggtacagttcgtactatataatattacatagaatggcgtgaacttggtgagcgtggcggagatgtgtgagcacttcaactcagtgtagtagtggctcttagtagaattaaattaatttacaataatattgtcaatttgcatggccttcgagacttggtataataacaatgcatattacgttgaacgaataagctaatatataaatatactacatgtaaagatataaaaatatatgtaatatattagtctataagcatagtttgagagttacggaatgtcagatctataatataaaagccattttttagtacgttattatattatatgcacgtaaggtgccacaaatttgagagttatacatttgttgtgggtgccatctgtgcttataaaaacaaagttgggtatgctttacttttggtcttatcattcccaatgaagagaaatgtatatataaatatataagagaagcaaatgtaatcgactcgagcactatatactatactatatacctcctcggtaatgttgtatatatgtaacctagatacgagaaatgctattacgtggtgtctaatatttaatattcttattcgtcaaattaagtatcagatattatatttaaaaaatataactcactaattaggtgatacatactttacccaatagatacttttgagatatatatccctaatttgtaaggtcggttttgagtggaaatagactatagcaaaaaaaaaatttggtccttcctgtaaaaataaatgatattttaaaattaaattaaaaatatatatattttaaaaaataattttttttatttggacccttaaaatgagtagaccctgaacgcggccctaacccgcttatgtttaagaccgactctactaatttggtacgtggtgaggtcttattggcgtgtaacttaaaaggacagtttgagtagttatagatatatagattgtatgtgaatgagtactgagttggaaatataacatcctatcctacgtggactcgtgtacttggagtaactaaagctaaaagggtacgtaataataggttaatacttaatagaagtaaaactcgagggaagagaagtcttccttggactgaatgatgctcataggcatctgtggtacacaactaaaataatatatggagaaacataatattgagagttttgtttgatatatatatattttttgtaacatcagaaataagatttgttgctagctgatacaaaaagatgtgttattaatgtgaagtttattttattgtgctgcagtttcagttgaaaacctttaaaatgtatacaacagtacctcaaataaaattaaatgaaatgatctaactgaaaagctggcaaaaatcatttcattaaaattataaatagtaatttatcatttagaatatgaaaagaatagaattctctctaaattgttactgattgaagcattattgcaaaacaactaacacacaagagtatcaatttatatactctattcaatataccaccaatgataacaaaaaactaaagaaacgaagaagttaacacctaacctctaaaacaaactaactaacttctctaactaacattaaccgttgcttaacaaactcttcaacatcctctctcaactcgaagaaggatactctagagagagcttgtgacataagaaattaaattttggcagagttagaagttttctacagatgattgtccatctgttggtatataggaaattgtgattttatgctgtgaaactaaacatagtgaacatctacttcaatgtacttggtccttgagtgaaaaatgagattagaggcatgttgttgggcaccctaattatcacaccaaatgataggggtagcaagaggtataatgccaaattctttcagaatggaaaaaaatccaaactacttcaatatcagtagaaggtagagaacgatattcagattatgtacttgagcgagcaacatctgcttgtttctttgaacccccatgttattatattggatccaaacataacacaatatccagtagtaaatttttgatcatctagattgtaggcccaatctgcatcaaaataaccttccaatgtgagatgttgtgttagtttgaagacaaggtcaagatgaatggttcctttgatatatcttagaacacgtttgcaagcaattcagtgtgcatttgttggttgttgcatacattggctaagtttattgatggcataaaacaaatctggctttgtcaatgtgctttgtcaatgtgaggtattgcagagattcaatagtacattttatagagagttagatcatgaaaaagtgcactacctgagatagcaagcttatggccaagagatataatagtagtgcaaatcttggcatcttccatgtttattttccttaatatttctttagcatattgagcttgattgagataaatagttgattgttcttggattgcttgaaaatccaagaaaaagatgactgaccccatagcttttaaggcaaactagtatcttttcctataattattatgttgctgacatcacttttagccaacgatagtgagttaaattaaaatgattaagaatgattgaaataacaaatatgaataatggaaagtaaagaaaatacgagaattataaaggcccgacgccttgatgatggtaactactctcccttagttgtattgacttatgagtagatgaacaagaaaaccttgatctttctcgaaagctcttacagtgatctctgagtattttactcttaaatctagatttctctcatgagttttctctgaatgaaattcgtgtccttgaatgatgagatgagtccacgatgagtccatttttgtcttataaatatgatcaatttatnnnnnnnnnttcttaaattgattctttaaattattgattaatgtaatttttttttaatattttaaagactaatcatgca

SEQ ID NO: 20689 - DNA, 2249 bp, Cannabis sativa
agaacatatagaatcatggtgctaatctaaacattcttgtggttgataaaagaaaattatgctttgctgattttattatggaagaaacatagacagatatagtagaaagattgaatgcactatactagaaataagaaagaaaaaaaaaaccacaaaaaatgtgtttttaaccatgaaaaggccttttggaggcataaaattacctcaggctgcaactcaacacaatcaacaaaatcagaatctaaaagatggtcctcagcattttttggtctaagtctgacagcaactctcactctttcagaatctgtagtaaatgtacaaaataaaaaaagtgattatgactacagaaaaaaagaagagaaaaagttgtatgaatctctaaagagatggtataaatcaaatcatataatcatcaaatactcttgtttctttttttatatataagtaatatattaaaagttagaacttcagaaaccgatgatgagcctgaaaccataaaaattactatttgaacaacaaacaaccatttctttccaaaaaaaaaaaaaaccatttaattcaaatattaaaagtaaaagataaaaaaggaaccttgtacagagtcgggggtagaacgaattctggaattaggagtgacagaacgtctagaagtaggagctttaggacgattggagaaatgggtttgtcctctgctagaagaagaaacttgttgctgtttttcagacctgccattattaccattatgccctcctcctcctcctgctgtggaagaagaagaagtagaagtagaagttgttgccattgatgaccttgaagtcgaagaagtcattaatttctgagtctcaacaacaccattcctatatctgacatctcaaacaaaacaaaaagagatttttctttatttttttactaatttcattacaaaacaacagagaatgagaatgagaaacagagacaaaagggttgtggccggcacgatcctaagacatataaaaaatgtttcttttttagtgtctaatttttattattattacttttttttaatgagaaacttgttcccgcgttagcacatgatatggagaacaagatttcatttttaaatactttttagaacgtatcatgtaaaatgaatcttcatctctttattttttttttctatttttattacaaaaacaataatatgataatgttttgaggattgagacggcaaaatgaaaataatgaccaacttttcacacttcaggatatttgattcatttggcttgaatatcgtaaagccaaaacctttttacttgtttttttcctcatcttttaaagatttgaattttcacaaaagcacctttttcactctggttttcacttttttgggtttacttcttgtaatgaaaataactctctctctctctccctctctctctctctctctcctctgtttttgtttattattattggaatagtacatgcacgtgtaaaaccaacatgaatttaattggttttaggtagaagcatttgggttagggtgagaagtacaagtacttgattttgtagtagtaactttaaagatgaagttttttctatcaaaaaacttttaaagatggagtttgaattttttgataggtggggtactaatatatgacactttttcttatgataatattctcttatttattaaatttttaaggcaaataatattatgtgttgttacttgttgcacatacaaagagaacatgcatttgttttgttgtgttgtgttgtaatacaaaaagagaacatgcattattgttattttattatatattttcaaatcctactttagtttaacaattattagtataaaacaaccacaatttttctcacttaaacaaatgataaacaaattcactccttattttattctctctcaactctctctttctttatgcaattaagcttgtatatctctctcttttacagtaataaaattaagtttatctagttattatttctttataattataactcacaaaaaattggaattttggaccaaaaacaagctcatcttcactagtaataatcaaatgctaggacagctagtaagaataaccaaaagaagatttggtatgtatgtatttataaagaaaatgaaacaattgaggatagagatataaatagtgccttggacaaaaggttgccgtcccaattcacaaaaaataaagtgtttgacttcaactttgtattaaatgcagtacctaacttttagtaaataattg

SEQ ID NO: 20690 - DNA, 2148 bp, Cannabis sativa
tcaagatgtgggacttcccgtggagagggttttttctgattcactttctttggtctcagctttggagggtcaaatagtgtatttgaatgaattgggggttatcttttctgatatcaaagtcatattgtctagttttcctaggtctctctcatattactttaatgttgaggcccataaattggctaagcatgctcttaggatagacaatgaactttcttagatggaagaaatccccacctactatgtaacctttgttacttttgttattttaacttttatcggttacccaaaaaaaaaaaaagtagactacaatgttcttgagtaggtgacttgagaaatgggaatatggaaccgtgtctgttatgattgttatgttctaatttggagactgcaattggacataatgtatgtatgtatgtatctgtgtgtaaatatatatagggagagaggcagggagaacaaactcactgttatttggtagagataacctcttctttgcttgtttatcagcttgtgtggatctctcttttggattgctttgagatctcgaactgacagcaggttttgagtttccttctgcagtttgatcttctaaatgtggcttggattttggcttgggatgttgtgtgttggaaggctcaactatggctgctgatttgctgggcgatgaactgcagccatcagaatgagcagcaccagttttctgttgcaaaagatttgagtgcatatttgttgtaattggctttttcccagcagattttaactgggatttggttccatttttgccctcagctgatccattctctcgtaccataactccatctgtaagatttatatctaaaaatcggttttcccaagggcgaaccgccatccatctctctaaccagttccatccccagctgcttttatctggttcaaatccagaaggagcagcctgttgtctagatcccgcttgccactgcaggcagaatgatttaagctcaatgatatacggtatacttcaaacaattattgcaaggggtaaacaactctagttttttagcttgcttagaattatttattccaattgatccctatactaagcatgaagaaatcattagttacacatcaaaaaggtaaagtatttcatttataattcttatttctatttcaatctagccacaatactattttacagcattttcacttatgtaaatgaaaccccaatcccaaatcttcagttagagacgcacatagaagcctgatgccatatcctacaaacattctctgttatccttcaaaattcatctacatcagctataagaatgatactaaagtctaaagtataaatgcatataatttcaaatcacccacagaacctagtaagtgatagtaaccaagtaaaaccatgggaaggtattttaactttcaaactgatagtttcttaattcaaaatggagaacactgtgatttaaaagcctaatacaacagatcatactgtcaaaaggaaacagctggctacagagtttcgttggtacagcaaaatagcagcacatttgctgctcaatgtctcaacattacatgaatgtgcaagaataacaccacattcataataacagcataaagagaaaacatgtaactatacatatccaaaccatgatattcgctaaatcaatttatgcacattacagtaacatttagcaagactattaaactgctcatacaactgaaaaaagattggtcttctcacctggtgagccaaagcatatgccattgctcgttctcgcttagcagcagcttcctgtctctttagcaatttcgtttgaatctgttcaacagatcctacactgtcacaccaaccttcctgcaccacagaatgatgtgtaaaatgatcaactgatagacccatcatttgtttcaaatacactagaagggagactcagttgagtgtgtactttgtacttgtctcgtgcttgtgtaaactaatagatagtggcttactgtgtctgttgggggtagttagttcattcgtgagctggcattaattgtattttgtatgtatatagaaagttggttggcctcaagggaaaataattatacaatacttgagttgttagtttccacttgtttgcaagtgagggaagggaactctcaaattaacatgtacaa

SEQ ID NO: 20691 - DNA, 1461 bp, Cannabis sativa
gggtaggagacctcgttcccaatctcgaatgccatagaagtaacaatataagcctcaggtgactctctgaagagaaactaacgcccaggttaacatataggctggtgcgctaagttgtgcttatccgacttcaatttcgtctcgagcatctgattgtttttccgtggtaaacgagagctatgatttgtgacaagtcaaattcacacttcgatattttaccttttcagcaaagtagaatattaacaaattagtcgcgaatcgggaagtttcgagtctactctattttgttgaaaagtgacatcttcgagaaccaccctttgcacctccaattttccctcccaaactttcttttccactacttttatttttgatctctccatgagcttcaaagaaatgcttaatcgagcaatccatgttaagccaatctccataaagctgaaccatcttccctgtattgcttttttccaatatttttgcctccatgcattccttctgatcatgccccattttccacaagcgaaacagagcaagagtggcttcttaaacttaaaataaatccagtgtttgattccatccatcttcatgtgtttcccaaccataatactttgattaattgacaaagcaatcaaaattctaacatagcagctcaacaacattttgtggttattactccaattaacttcaatcatttccccgccaacgcacccaatctcttaacattaggaaggttaaaacctttgagaggaaaatcggccatacgtatccaaacaagaactttatcaagcaccacatcctcccattgtcccgatttaggctagtccttcacaatcatgaaaccccctttaaaagtccatggaagtttactttttcccttttgatagtccttctcaaagtcaaagaaaaaaccagcaaaggtgctgatattatcatgcttcataatcttaactctccacattctcctaaatatagttcttataaactttcgattacatcttctcttaaagaatattcctccaacaatttacaagttaccaatttgggtaaccatattctcatcaactacccaaccttcttcgtcttcgtcaatatcacttcccatagcctcgtattcatcagaataattagttgcactcctaattgactcattgttattcactttcattgtacttgtctttgaaattagttcgtctacttctatagtattctcccttgttgccatcaaagaaagaaactaaagctttaaataatcttgaaacttttccttgaatcatacactctttctcataggatcctaataactatctgacagtatatcacatcttgtagtacttgataccgtgaaatttgcctttgagagtaatatatgttgtatatgtatcctagattagatgtaaaaactggcaaactttgtccatgaaaagaaagaaggggtatagatgggatgtgtccatttatctatct

SEQ ID NO: 20692 - DNA, 2430 bp, Cannabis sativa
gtggttgcaacatccttggtaatttgagcaggaactgaatcagttacagactctgttatgttctgctgggaagagtcatttgtttcaatttttatctgctcaaaagagccagacttctcagttcccatctcagagtaattgcctgcttccggacgattattagattgcatagttattgaaacttggttatcggaagaatttggcaaattatcataatcaaccttctgtgcaagagaaaccgtatccaaggaagtatgattcccaccagtttcaccttctgccacctttgatcctgcattgctttcaatctttttaacatcctctgggttgttcgatttgtcatcctgttctagattttttgcttctgtgttctcatttgtactttctgaacttattttctcagttccagtgtttataacttgtgtatcatgagcaacttcactggatgcatcatccctaatgtaatgttcctctcgtgcctcgtgatcagtttggtcacctccatcactatcctgatcctcagatgagtgttctttgtccacttgatcctcaatctcttcattgtcattttttttggtatcatcaccaccctcctcttctcgctccttctcttcatctacaaactcctcatcatgatttccttcttcctcttttctctcttggtcactttcatctatctcatcatccccacctcctcttccaccatcttctgcctcctcattcttgttatcttccgcatcttcattcttgttttcctcctcctcctcctcctgttcttgagactcattcttgttttcttcttcttcccgctcttctccatgttgttcttcttcctctactgctatttcttcttcctcttcttcctcatgcttctcaactttagttatatcctctcgaggatgtagatccttccttccaagcttgggaatctcaccgtcacttaccctaatcgtggttttcgcatcattttcatcaaattctttcttcttatcatgggaatgcttgacctgataaattagccaaaagcagaccccaagaagcagacaaatctgcaaggcatgcttcgccctaaaacctttggttctttgatttctacttggcaaccgcttcaacatgatataatcctgaagtttctattcttatccctcaccttcaatcactctcgccttcattccaaaacaaagaatatcattccagccactcgaaaaaagaaaaaaacaacagtagtataaattcaagcaaataagaaacaaaaatgaaaaataagaaatacataaaccattcgtgcaattctaaagtttaacctcattacaacttatagtgaaccaagtgcaatgtttcctgaagttttcatcaaaatcaaagagacttttgtatcaaaattttcataaaattttcataaaatattatccaaagttatcttagcattaaaatcacaagaaaaagaaaatgaataagctccaaaaatataaattctcataactggaaagttcatgggttcaagaaaactaaggtattcaacgtttgtataacaaccgaattcaaagcaaatccccaaaataaaacctagaaccataccgaacccacttccctaaaagatcagcacagagaaaataaataaataagatacttgttcacattcaaaatcggagcaccatttacgaaaatagtaaattacgatcacgaaaccattctagagcagaaataaacacctgaaaatgaatctttcgaaaactaattacagtaacatattatgacaagacttcagtgtaattgatgcaatgaaaccctattatgaccaagacgataaggaagctaatggagcagatgggtacctgaaaatgtcacctttgagaagaagatgccgccagaactcgaacaaggagatgcttgttccggtcttcaaagaggtttctctatggttaagttgagtgtgtgagagactgatacccaaccaaatatattttcttttattcttttttttcattgaaatatttcggtatgtaaaaattaaaaataataataataataaatggaatgtactttacagtttgactaattagtaatttttcatttaaattttaacatgtactaaattgagtttctgaagttataaagtggcataaaatgattttgctggaggggagactctagtctttagtttgagagaagatttgttggggtatcaacttaaatcccacattgaaaagtagataaaaattatatatgagaccaaagtgtacaatatcatacaaatgtaaaacttaacatatatatatatatatatatataatatgaaaaaaaaaatcatcaatttaatacaatcttatatggttttacacgttattcaattttttgaattagtaagggcgcgtttggaaagccacctagaaattagaattggatgtaattggaggtaattacacagtt

SEQ ID NO: 20693 - DNA, 2108 bp, Cannabis sativa
  modified_base (26)..(62): a, c, t, g, unknown or other
tcgctttagaaagttcatatttaggnnnnnnnnnnnnnnnnnnnnnnnnnnnnnnnnnnnnntggtaaaataatatccaacatctataggagtaatcttttcagagatgcgagacagaacatggtccatatgttcgcagttgggattttggctgatgaagagttgcacgaaatattattcaatagtggtcataatgatttgagtatcagtgacagttgaaccattagatcgagtgagtgagcaaattctattcttagcacatcttgaggaagtgaattggtaaaagtatggagtgttcttatcgccaagcttaagctagttaatttgagagtgttgttgctaatactcttcttctttataaagtacctgatcgaggtccccttgaagttgtcgacatagaagaaggtgagaattagtgggttggggatgtttttgagcaacatatagttgagattggaccttttgaacttggtgtggaagagggggatccaacgatttcttctattcagacaagacgagagcacaatgttgaagcttgttgcttaagttagagatatgagtgagctctaaagattcaggatcagggatccaagccttacgaagtcattcctgaaatccatcctcaactaaccagctattatgaaaatggaattgtggcttatgaggccccatacgatccttaacatcttggagggatagaattaatgcttggtgatcaaagccaaagaagtctccatggaggaggtgcgccatggggaaagaagagtcccatataagatttgagaggccccaatctagtctttcttgaatgtgggtgcgatgcgaggtttgttaatccagatgtagggactcccatggccatgaatagggtgaagaatgaaggtatctgaaaatttcttaaacaagagtgaaggccgtttattaatgtcacccctagttttatcagttggtgaaaagaagtcattaaagtcaccaattgaaagccatggtgtattttgaatagtgcctccaaggcgatgtaattgccacatgttataacgattattatgatgcgaaactccataaaagctagtgaaagtgaaatgacaatagttaggaaactaaatataacagtgaaaatggcttatattatatgaaagtaaagttacatcaacatcatgagtccataacaaaagaaggccgccactaaggctgactcgagggactttaatgccatttgcaaaagtaaacttagattaaaacttattaatagcaccaactgagagtttagtctccattaggggtgagaaaaaaaactaaaaaaccgaccaaaccgaatacaccgaccgtccgaacaccgataaaccgacaccaaaaaaactgaaaacgaaaaaactgccttcggttaaaaccgccttaacatggtcggttttagtgtcaatgaaaaatcggtcaccgagaaccgaccgaacatatatattatatataatatatatgatttttgtacataattaatatacaattttattaaactagttttacttatatcttttttatttaaaatctcaactattgattgctttattttattatagtttgatgcatttacatattatatatacacattcataaaataatacaagttttttaatataacgcattaccatattaatagtacaaataatttgaataaatttaaaaaagtttattttacattatttatttaactaagaaagttttattcttaaatatatgatatttgatacaatactctaatttttttagttttcaaataattataaaaaaatttaaaacttttttttttaaaaaaaaatgaagtttggtttggtcggtttaaatcgaccaaaccatggattaaaacagtcgttttttttacatttgtataatggtcggtcaattttcggattataaccatgaaaaccgaattttgaattttttgtgtgtaaaaaactgaccaaaccgactgttgctcacccctagtctccataatatacaaaatggttggtttaaactgataactaaaagggagagtcgacagaatgctcgtttactcccccaatccacaagtattccaattgatgaggctcatggctcctggcgggtgcgct

SEQ ID NO: 20694 - DNA, 2195 bp, Cannabis sativa
ttttttaaaatatatatattttttgaaattttcgtaaatactttaatttataataatttgtattttttatgctaataaaaattaaattcaaaagagcatatcatacacctttcccacacaaagtcgagtgatcaaaatcccattccccaatgtcaaaaagaactttataactcataagaaataataagatagcacaaacaacttctaacaaaaatgatgggagtttagaattgtttgtccttaatataataatgtacgaaaatgatgggactatattgttgtttgtctcatattataatgagaggataatgagagacactatatgtaatttgtctcatatatataaaatcactcattatctctatgtacatgcattctcaatcagatcctgtatgtgcccatatgaaatcctatctcaatccaaaatttttccttttgtatggccttgacacactttcattttgcaattattataattctgtataaatggagaaagagtccaccaaatctctctcctcaaaaataatgacacgactgggagatgatatttacaatgatgatgtgatataatgcttttcaaaacacagtgcttgcacgtatttactcttaactaatgacacatacacgatcgaccattcctacatattcttaataattatacaaaattcttaagatctaatccagtagaaaagaaaatatttttaataataatataaacaaagtcatatataattacctggttataattggaaaggccttgttgtgtggaagtgttctgtacaactagtttccattgaccagaggaggcagaagggagagcaccccaaagagcccaactcccagaagtagtgtctgtttgatgagatgggttttgatagtgaatgctgcaaactctggtgtggaatttgatgtgtttcactaaatcaaaatggcgtgcgtaagattccacataatcgagaacttgatggtggtgagggaatagctcagagtcaggcactgtagatggccatggaaaatcggagaattggtataagggtttgggagtttggagccttgtggtttcgatggttttggtccaaacaccacctattcggcttcgagactcgaaaacaatggggtggaagccttttgagagggcatatttgcaggccaagaggccactgattccggctccgattatggctacgcttacctctctttcacttgccatctctttctttctagtttcaactttttgatgagaactcactacactacactacctagtacttgtaatccagtcacaagtgtactcttgtgaatgtagtcgtttatttttctttctttcttgaatctagtgtactagttttaaaaatgagaaattttgataaagatagaattaagggtataattaacttttttttttttatggtaaaaataaataattaaaaaaaaagggaaatttgatttttttatgcttatatttggttaattttttttcttaaacacataataactaatatttgtaggatatgacaacttttatgatatctctaaaatacccttatttacatcaccccaattacacaatcaaaccccccatcggaccccacatcagacacaatcggaccaatcagaccccatatcggaccatatcattatctcctaccattttttttttttatgtttttgtacataaaaaaagtagcatcaagtgaccatcggacctccatcagatcgcatcggaccatatctgctactattttttttttttatatgtttttgcacattaagaaaaacagcatcaggtgaccatcggaccaccatcgcactaccatcggaccatatctgctactaattttttttttaatgtttttgcacataaaaaaagtagcatcaggtgaccatcggacctcatcggaccatatcatcggactaccatcggaccaccatcagacattcgtcttcaacctttactcattttaacaacaggaaggcatcggaccaccatcaggcttgacaaaaaaaccagttttttttacccaaaactcagatctggccattttcgaccataaatttaacatatactcatagataacaaacattaatcattcaattttcatttgacgacattgcccatcataaatcaccaaaaaaaaaaaaaaacaatgacaaaaataataaaaaaaaaagggtcgaatgcttaccttcaacat

SEQ ID NO: 20695 - DNA, 3184 bp, Cannabis sativa
tacaagtatgaatttttttttttttgatacagaaggaaccactttccattgaaaatggcccatataagacttacaatttgttattctttttacttgctaattctttcgaaaaaaataaaaagaaattacatattgttaagatacacaatttggtcctgaagtttcataatatcaaattccgcaaaccgaaaactcgtttatcaactaatttcagtatgaagtatctacagattcacacacacattattattgtttgatttgcgtcccgctgtgtttagcctttgatcttttggtaaggcaatagtgtaatacattacacacttgaattatcaagctttaacttgatccatttcacaagaatcttgccttcaatcaacatcacacactgtatttagcctttaatctttaggtaaggcaatagtggattgctcagtttaaagcttgagtttgagttagccttgttaaaaaaaaacatgactgaatcagtcaagaagctcccagctcatactttttcgaggtagtaacactttttattttttttcttttagcattaccaaaaggttattgcaagatgagcaaatatatagtctttgttatgcactgaagctggaaaaattagggacttttagcttctaattcaaacagaagcataattctgtaactttttggtatttgcaatataaagtcaggaatcttcaccttgtttattactaaatccttttgttaattcatgcttcttcttgcgctcaactagctccttatgctgcttctccaacattttctcaagtttctcagcaatgctgtctgtgctcatgtatagtgcatttatattagtataaatttcttactgatctcgcgttcttgaaaataagtggcattagcacattcagaatttgaatagtgaatactcaggtgtcatgagtgaccgactcttaatttgtctacaagtttactgtgttccagtgccatgaactctggaatttttacttcctagatcactataacaattgtaggtaaagtcaatagttgttgtgacgatttgtttattccgttggtacatattaatccatgttggattgggatattgagctagacccgagaactgcacataatggaaaccccaccttacctcaaaacttgctttaatagaacatgaccttagtttcccgaatccaatgaaatcgagtttaatgaaacaagttgtgtttggtttcggttgcatgttcaatacgaaatttgattgtttttcttttatggaacaaaaaaagttgtgtttaacaatgtaatgttatttggtgatttgaggtaagcagctcgtgtcatttaaagtaggaaatagataacttggttggatgtaataaaatttgtaatgaaatcaatatgcaaattccattctttgttttccactttgaactcttgtactattttcactgtaatcgctgtgaacatcatatatgtgaataacaatttcaacactgaacaagtaaaaataataatacacaaattttccatttccgtaccattttttttttattctaatgcttattatagaaataaactaaaacattataatactatttcactatattctattaattaattccattcccattaccatctcaatttctttacataggtattgtggtgcaatgaataatataacatacattactggaaaagagtataaccaaattaagggtaaaaaggaatatgatttgttaatcatttctcaaacaaaagccaatcagcattaaccaaattaacatagcatattgttgtattgtcttccttggctttttcttttctgtatggactcttgtgcttagcattatttatttaccaggcacttccataaggatgttaattatatatatacttaattaaagatgattaactcattctgataatttaatttgaaaaaagaaaattttcagtgattatattttcataaatatctaaaaagacaaaaagtttatacaaatatggatttacagtaattttaatatttaaaatacggatgtttgttttttgtgttattttttttccctcaatcattaattattacataaactgtgacatatttactcaagttataaataacacaaaaatatcattatttaatgtatgcatggaagacaagaaattatctcaaaaatggtctataattcgatagagaaatacatatattattcttgcaagattgtgtcaattaatattataaataagaatctaagattatgaagctaaaaaaactcccatgacagctcaagaattaaggaaaagttaagggcaaacccccatgagatgtcggaataaagatagaaaaataaggtcacctaaatttctttctagtctttctaaaataagtccaaataatgccagcttattccacaaaaggagatcttagtgatcactgtgaaacttgtttgatataagaaaaatatataatgattaaagatctagaaaaaagaacatgcatgcttattattgttaggaaatattgttttctaaccattattgttatgattattacgcttgttacttagctaatcatcattaagaatattgcattatatgcaccctttaatctatgatagtatatatactgctatgtgagatcattaatttattaggttaaactaataataatatataaatttggtcttatacgagcaattttatatgttgacacaatgatactgagacaagttttattttaatgatataactgttaactaccaagccaagtgtcagacttttttactcaatttaatgagacaattttattatttactcaatttaaacagaattctttttttttttttttgtctggtcaattaatcagatttatcaatgattctcaattaataaatctccatcaacgcacccattacttgctgaggctttggtggtgaaaagcccaaggtcgatcggcagttcatgaagaacttcaaactcaattatgtaaatgtgtgtgcatttatgcataaatgatgttagtaacttggtatgcagagttgtcacccgatctgacctaataaatgaacacgtgcaaacccaatccgtataaaaatatgggtcgtactcgtactgaattagactggcccatgagtcctaaatatttgtgtcgagctcaggttcatgttaagttttttacgagttgaaatatagacacgaatgttgg

SEQ ID NO: 20696 - DNA, 3775 bp, Cannabis sativa
tcatcgtcagagaaaagctcgactcacggttcagtaagcctttacttgtttagtaatttatgtgattagaaacaaatgttaggaagcataatagtttataattgtttaaatgcattgccttaaaatccataaagtgcggtacatagagtatatgtgatcgctaactaacctacctaaatgatgggtttacagactaagtcctattacatggatgccctgcaaaatacgaagagtcagggtaacatggttgagactagaggcggtcggggatgtcaaaaatcccccaaatcctcgtggatgcggcagaggccgtggaaggtttcaaggtggtagacatgaaaatccaccttaagctcctccagattgggagcaaaggtttgaaaagatacaagcccgaatcctctagcaagagaaagaaatttagaggctgagacagtaggttcctcttgtagtgcctttgtagcaagcactgaccgtcatggttctagtggtgccaggagaacaacctattgttcgcaaccgtatggagccgttgtatgagagatttcataagtaggcggctctagtttttttgggaggactggatgttatgaaggtcgagcaatggttgactgtaatataaagaatcctaaatttcatgagagtcgtcaagaatgaccgagtgacttgtgccacttttttgttctacgaagacgcgcttgtgtggtgggagttagtctccctcactcgagatgtcactaccatgacttgggaatagttttgggatatgttcaatgacaagtattataataaagcagtttgcggtgcaaagcagaaagaattgactgatttggttcagggagaaggcatgtcagtaacagaatatacaacaaagttcgaccgtctagctaggttggcttcgggtatagtacccgcggacttcagtaagaaagaaaagtatatagcgagtttaaatgcaaatattaaacatgacttggtgattaccacaagtgatacaacgacctatactatgggccaagtacgaagcccccgaaataatccaaaaaaaattcatgtatgtgcacactcaatattagacaaacattaagtctgtctggagtgataatgctaaagaactcaacttacctaccttttacaacagtaaaatagttattcgctacaactcttgtgtaggaagaccccaacaaaacgttgtagttgaatgcaaacaccaacatattctcaatattgctcgagcattagcctttcaatctaatctccccatcatatattggagttatatgattaaggcaggtgtttacctacttaatagaaccccctctataactctaaatgacaaaacatcttatgaaattttgcataattcacaacccaattactcccatttaagaagttttggatgtcttgcttatggatcacatgtcactcacatccataatttttctcctagagcaagaccctgcatcttcattgaatatccagaaaacatgaaagcttacactctccttgatatccaaacaaatcacatatttcattctcgagatgttatattctatgagtcaatatttccttataaaaactccaaccacaataccaacattgacattttttcccctcaaattctacccctacagtcaacactgacataaatcaacctgatgtcccaggtttaccacaatctggtacaaaccagacaccaaaaacatccaaatgttgaagaacaataacaagacctactcatttaaatgactatacatgtaccaccacttctagcacagcctgtcccatcaccaattttatttcatatcacaggctgagtccacaattttgaaatgccatccttgctacagctgaaataccagaacctacatcatatgctgaagcaaaactccataaaatttcgaacacatccatggatgatgagatagatgctctagaacaaaatgatacatggatcatggtgaccctacctgatggccaacatgccattagcaataaatgggtgtatagaaagaaataaaatcctaatagttccctacaaagatgcaaggccaaattagtagctaaaggttacacacaacaatctggcatcgactactttgaaacctatgcccctgtggccaaatttaacactctgaaattacttcttgcccttgccgccatcaaaaattggcgctacatcacatggacatctatagtgcctttctccatggtgaactacatgaggatgtttacatgaaactacctcaaggctacactccaaaaggagaaattcccaaaaatatagttcgcaaattaaagaaaagtctatatggcttaaaacaagcctttagacaatggtatgaaaagttaagcaacacattactgcaacaaggtttcaagcagtcccacaatgatcattctttattcataagacagcaatcaaacaatttccttgccatcctcatttatgtggatgacataattgttgctacagataacacttcagcactacaagacatcatatccactttagatgctcagtataaacttaacttggcagcctccatttcttccttggacttgaaattgaacgatgccccaaaggcatatgagtcacacaaagaccattcactctccaacttctcaaagattcaggctgcctcgaatccaaacctgcatcaacacctatggaacccaatataaaactcagcaatagtgatggagatctcttgccaaatccaactcaatataggagtttaattagcaaacttctctacctcaccatcacaaatcctgatattagcttcgctgtcaacaaactcagtcaattccttcaatcactaagggaaccccacatgactgatgcaactcgcatcttacaataccttaaaagcactcatggccaaggtttaattttctatgtcgaatgccctgccattcattttcaagcctttgctgatgctgattggggagcatgcctcgacactagaagatcaatttcaggatattgtgtcttccttggtcgatctcttatctcttggaaatcaaagaagcaagccacagtgtcacgatcattcgctgaagctgaagacaggtccatggcaaatgcaacatgtgaactcacttggctccacaacatcatcaaagatttcaacattcaaccacaactcccctccactctcttttgtgacaattctattgacatacatattgcagaaaacccagttgatcacgaaagaaccaaacacgtggaaatcgactgtcttattgtctgagaaaaagtctcaaatggcagcatcaaagtgaaccatgtctcctccaaaaccaacttagttgatgtactaactaaactcatgtttccaactcacttcaatgaaattgtatccaagataggtgataaaattttttacactccatcttgaaggggcctattaaaaccgttatgttagttatttctgttggctagttagttgggttagttcggttagttcaaaactcctattctgatactttgctgcctatataaacaacaacttcattctcttcattcaattcagtacagaaatcaagacaatttccttttctctgttctaataaattccatgaagctgagtttatataatatgagcactgctatttttagcatttctcatataatgtatataatagatttgtaagaatattttctaggttaattagaattgttatagtgagatttttctcacctagaaactcgagactagacttctatttgaaggacacgtgtactcaattgttagaatttattttacca

SEQ ID NO: 20697 - DNA, 2536 bp, Cannabis sativa
tattgtagtaagatattcagtctttcagcatcttatatactatttgtaggatatttttagccttcactcttctttggttcagccaaatttgtatattcctacaactacaccaaaagaaacaaagaaaaaactctaatttgttgcttcttttgagactttatttcttggttttcttccatgaatgaagctgaaatgactgttccttacttgttcagatgtccaattactctagacttgttcaaagatccagtcactctttcaacaggccaaacttatgatagatcaagcatagaaaaatggctggctgcaggtaatctgacttgtccagtcacaatgcagaagcttcatgatccaaccatggttccaaatcacacgcttcgccatttgatcgatcattggcttcaaatgggacaccaatttgatcatgaagacttggcaatagttgactctgtggctgcaatcaaacatagcttggaatctcatgacactgcctttgaaacaaaggttaacatgctcgagacaattcgagttttgtcccaagaatcgtcgtcgagatcttgtttgatccacttaggcttcttgccttttctgctggagctagtttttggtagaactcaaaaggaggccatgatatcatcagaagagtatgcgaagtttgtagaacaagcattgttctgtgttttaaaacttctgcccttttgtgaattggagtctctcaatattcttctacaagaatccaaattagaatcagtcttattcttgcttaagcatggtagttcattggtgaaaatgaacctttgtcaattgatagagaccacatcagcttcttcagagactaatcaactttgctccatgcttggtaaaaagagagagctattgcatgagattgttcagttagtccaccagaattgtgaagcttcagatgctggaatcaaagccttgtggacactactatcttcttccaaactgaatcaagaaactttgatcacagaaggcgttgttgatggactaatatggtacatttcgagcagcgaaaggagggaaagtaataaaagtcttgcagtaccatttgctatggacattcttgagaagcttttagcacttgacagtgcaagagaggcactgttgaggaaccccaatgggatcaccactcttgtgaagaaagttttcagggtatccaatcatgaggagagtgaaaacgcagtcggatcactcatgacagtatgttatggttcttttcaggcaagggaagaagccattgcagatggagttttgactcagttattattactacttcaaagccagtgtagtggaagaaccaaaactaaggcaagaatgttacttaagctccttagatctaagtggatccaagatccaagccatatgtctaattaatttctctccatatatataaatctatacacaccctacctggtaattctcagcttctctgaaattatataagtgaaaattatgtaatgtttggtttcagctgtaaaagtgaaaatttggttactcactcaaaatcccacatagaataagggtttggccattcaaatgggctcgtaagtcgctatagtaagttgaaatggatgaatgggtgtcagttttcaccaaataaaaaatttcatcaattaatagcatcgtatggcatatatgtaaaatttgctttcctccatttgtagtgagaatacaattcactatcgttatctaagtgtacttgtataaaattacattccctccccttgtacacttgttgaagacgtagcttgagtattcttagagtgtatcaagtacacatgatacacccaactaacctctcttttctttctacaccttttaataaaacaaccgttagatttccaaaagaaattaaacagtacatgtttaaatttggagaaaattacactacatacctcttttaacttatgcttataccctctcttttgaaatctcttatatttacctgttttataaatcattctaccaagtttacccttatcacttcaagatggttttcattcttttttaattaaaatattgtctcaaacttttctacaaatctacctatccatctataaagaacacaaatttattatgtttataattatgttttcgttctgtgaatgtgaggataatttaggtacaatactcataaaaagaaatatatttaaattaaattttatttgaaggtaaatttagttaatgtataagaaaagagagtattcttcaacttctcccttaaattttagcctcaatgtgtgaattttagtaatgtaattctagaatctctttaattacattatattttgttcataaatacttaaaaataacaaaaaaattatatttttataattttacaattttacaaaaaaaaaattatattctgacaaatttaaattttttatttttacaaatatacaaaatattatttttctgttatttacatgttaatgctactggacagcaaagaaaaaagaaaggtgaaaaatttgtaaaaactaaactcgtcaaaagatcaaaaaaaaaaaaaaaa

SEQ ID NO: 20698 - DNA, 7533 bp, Cannabis sativa
aaattatttcctttccattccagttacctccaaccaaacgcgaccttaattctcatcagaagaaaataaagtgcttctaaagagtgacccatactattaacaatactgcgaataggcaataatatccctcataatgcatccaatgtaccagaaatcagcataatgtttattattaatgtcagtgacaattgtcaaaacatgagcaaaattaagtttaaggcaaaattaaaatcaatgaccatgcacactatctcaaaaatttcttaaagaaaatttagtataaagaaaaacactaaaaattttatttagtagaatgcttttctcatgcctcttagaatgaaaaaagatggctctatatataaccatttacatggagtaggatacaaaataagaaactttctaaaaatttcctacaaataaacaaacatagaaaaagaaaactcacaacaaatggacaaatcaacaaaataacaaacagaaaaaaggaaaatctggcaacaaatggacaaactaacaagctaaaaaacataaaaaacgacaaaccaacaaaccaacaaacaaacgattagaaaatttcttacaactatcatgactatcaggaatttttccatttattgttatcatacaaaagtaagagatattgaatctttttgtactacttatgagctatctaaaattagggtcctcctaaagtgggtgccaacctgatggttcatctcatcactttcatctggtggacatacatcatattcacaataaataatctctcattctagtctattgtactgaaagagatagggatcctggttgatctcttggtccatgtatgaatcttatgaatcctaaaaaatgcttgtcttacggagtaagacccctatagtgtttgttttttttttttttttgaatagtgatgaatttttcttctttgcttcaggggcttggacctgattatgactatttttagaaatttggaatttttctagagcctttactatgcgccgtgaataatctaagggaaacattacccatggggcattatcttctatttttggccaaatttctggtggaatagtacggtttttctcaaaaataatcttttggagatccctgtactctgaattttctctaaaaggtgcttcttaggagccgtatagtttaaaggtggggttgcaaactattttcttgttctcatccaatttttcattaagactgatatggaagacagtgtagtaatctatcatgttggctacatgtggtcttgatggataaacaaagacatgcctattgttgcgaacttttttctattcatcccaaagtattttttttccactcttctagaggagcgtaccaagacaaaatgtccatttagatttggtaggctggcttattttttgcttgttcaaggaaagactgtttagcagtgtgaagagtcatagtttggacttcaaactcaattgtacattttcatgttaggtactagaaaagatgggctatgtattttggagtgaaaagtgcagtccagagggagactagattggaaaaggatattttgggtgaattaaaaaatcatgttgaaaatagggtctaagtttagagaggatttagttgtgagtataaacagtcatgtgagaggccttttcttttgctgactttttggttttggaaaggataagctttgcatctcaaggaaatgggtagggaaatgggtagtgagtaaatattatctgctacaaactttgcctagttttttggattgcttcatgaatttttggagaaatttcttctgggagcacattttttcaagggtttttaagactagttggaaaatttctccaattgtagcacccgttaggctctttcccaatccagagagtagcttcaaagtttctcaccaagtggctctggaataaaggaaagaaaggcttgttttaaatttggatcatcaatgccacctatttcgtagaatcgtttagtccattcttttataatgctttttcaagtctcttttgtccattgaacaacacttgagcttaaaaaactctgctctaagtctttcagttacttgtacatcttggctacaaaacttgacataaagatagcttaggatatttgtgatagatgggagttgcaagaaagtcatttgtctatattcacctaagcttgtccactaatcttgcaaagttttggtgaatcttaagacaaaattcaagaggatcgtccccgtctatgcctgtagtttttgtgtttccaagctaagccaagcttgaaattcttggaatttttctcgccatttacatgggagaatgtcaccaagagtaaaagtttgaaacttagaatatttactcttttgatgatgaatgtattctagttttattgtagatgcttcttattcttcactttcatcctcacttttgagaatagactcggtttgagaatatgcctcttctgtagattgagtcataaaatgtgggggtacatcatcttcacttgtatctgaatcttaagactcgtcactagtatctgaatcttgagactcgtcactagtatctaaatcttgggactaagtttcagaagtctcttcttggtcagaggaagaagactgattgtcaagttcttcatctgtttgatggatcatggtaaaattaggattattcacagttcgttgggccataaattgcttaggctcttttttcgatagggatgatgcttgtggaggaaatttatctaggctttctttttttctttcctattttggtttgtttgctgatatcactgctatttctttcaattttgttaaatgatctgctaataaggttgcacatgctttagcgcgatcttctctttatgagggtgattgtacttttaatggtttttctttaccgattataatctcatccttaatgattaatgatttgaattaatgaagtttgcattattattcaaaaaaaattccttttataaattatttaatatttaactctttcctttttgattctagataaattatgactcttgttgtaaagaatctgagtagcacaggaattcacaagaccattttgtactactactaatacatttttctctcaaacatatatataaatatgaaacctattatggttataattttttttagtttattggatcattattgaatagttgtggttaattcagaaaacaaataaaaataaatgacttgtaactagtactttatttccttataaaatcttaattaagattaatttttataatttttactaaataagtttctttttagcatttttttgcttaaactattgaaatatttatagcaaaagcccttatgattttaaatttttacacactgtttacaccaaaagtagcttgatgacgtggacatcaatgtttgacacatggcaagaaagatagcatctcggagttgagtagtcccgagtcatagaggtcgacctggaaggggtccctacgcctaagttaactctgggaactccagaatgggcgttcagattgcgataagttgttttgaactcactatatttcaatattctgtaccatgaagcattcaagactaggcctcgagagctgaaaatacacaaatcaacacctcaaaaaccaacctgggaacctaggatttcacccagcgcccaagttaaaaacccaaactagggtttcagtttttggcaccgtcttagtgcgaatgggtcaaactttgtattgagcacctagagcattagtgcccgggcacccagcgtctaggttgataatatgtcaacttaggctacttccaagcattagattaaaaatctgacttgtgcatcttcttcgtctttatcaaaaacggggaaacaagtgcttgcagagaagaaacaacccaacttgggtgctagaacaaggggccgacactctatttggcacttggagctggcccagcgtccaggttgagattttatcaatctgggccaattttgagaagttaatctaaaaagtcttctagacatattctctattttcatcaaatattaagattcaactatttttggggaccaaatggaacttctaagtggcctaaaactggacccagcgcctagattgatatattgtcaacatgggttgtttccaatcagttttttgaaaaaaagtgttccagacatttttttcatcattagaaataaaaaatatacaagtaatctcggggagaaaacaaaattgctaaaggcatcaaagttgagcctaacgcccaggttgacctggtgctggttttgataattcatcaaatgccaattctgctcttataatactcttcaaaatggtctaaaacgggctaggagaccttatcctgaagttcaagaaccttagaagtgtcaaaacgacatcccagaagctcttaaaaaagtacccagcgcccaagttgacaaatggcctggtgtgttgggttttgcttatgcgattttgattctgtcttgactgttcctctagtttttcataataactaagagccatgaagttagaagagtcaaattgacaacttcatatttttcacgtttccaacaaagtgacttactcagaaattgggagtttcaagtttcctattttcataaaatagcagcttcaccagaacataaaaacaggctaagtgatgtccaaatatcacttaggcatcaaaatacgtacatccttgacacattttttgatgtcaacttaggcgctgggtccagaatagtcttcaataaaacgaccataagtcactcaatattgatctgattaacgcgattcaactattgcatttcaaagttatttcaatgctctatcaagtcatgtattacactttaatcgtaattctgaagttattgactccagatttcaccccaaaggagttacaaatttaagctacaattaccaaaattaagcatgattctttatataaatagatcgggttaggttaacccgtttataaacgagttgggtttgtcttttagtttcttacatgattaataaatggttcagatttgggttaagcattttctagtaatacctaagcctcaacatgacatgacacaaacacgatccacagaaacaacccaaaaacaggaatttctacccctacttggaccacgaacccagaccctcactacaagaattattacgtttaccagcacaatttgctactgtgctggcaaaagtaaaaagtaacttttacaagcgtatctcgcaaactgcactggcaagaaggtcaaagttttaccagcgaacatttacaacggaaaaagttttaatttttaccagcctatctacgtatgagaaaagttatttttttgccaacgcttttcattttgcgccaacaaaagttctcaaaccaacgtttatttgccaacacatcaaaagtagattctgtttgccattgcaataccaaacttttgccagcgcaaaaataagttagcaaaagtgatatttcttgtagtgcctgtacctgaacccgacctcagcctcgcacccggaccccggcccccaaacctaaaccccgatccaggtccaatgtcgaggtctaaggttcaaattggggtttgtagtctagggccaaagatgggatccaactttagggccaaggtcaaagttggggtcgaatttatggtaaagatagtataattttacacaatctattaagacaagtcaatatcaaacatagtattatattaaataatactaatacaatacaacactctacacaacaccttgttcacaaattgcacaagatttaacaatttttataataatgatagtggtctactttagcaattttcaaagaattataaatatatgtatttgttttaactaaaggaaagtatgatgccaatatacattcatcttgaaaagctcagatcgataatataaattaagctactcacaataatacagatagcttgctaataattaattaatgcacttatagtttactaatcaatacatatataatatacagtcgcactcgcacaatattataattcatatctaaacatatatacataatacataaacatagatagatatagataatctataatacataataatcttaacacagtgagaagatactggtgagatatcgcttgtgaatccctggtaccctgcatttcaaaatatgtatagctagcattatttttttttttttggtataaacacttatgtacttgtatataacaataaatgaatgaacaaaatttgcaagtatatttgatcagttttaatataaagataatggtatatattatatatataattacctgtgaatatattgccaagatggattatatatatattggcatcatgcttcttgctgttgatctagcaacttgaccttgtatatatatacaccaatatatttattataaactaattacttaatcatatatatataattagtaattaatagtgtatatagtataagaggtagggaagtggtgaagagataatctcacttttttctggagtcgagtgttctcctctaccaatgctcgacgctgtgtacatacatatataattcattaattaaaacaacaaaatatattatcatatcaaatatagtagttctaaaatgcatgctcttttcttatattaagatctttcaccaaattaaagcaggaacaatgatattggcaagactgtacattcaattaaagccatatagcttacaatatatataatatgcatatatatatatatttaggacttatattaaccgatagtatataaatatatatatatgattgaactgtatgttgaaagaaaaacatgatgaaatagcatatatatatataggcggtttttcagtaatatagagtttaatacaaaattaaattttgggactggtaaaacttttaaaatgagttctaaaattcaatccttcctaactatataataatatttattatattttcttattattatatattttatttatatactaataattttttttttcacattttcatgtcgagaactcaagccgtataaactctcagagccgaccaatataaatatatatatatatataaagactgaatttttatttatttatttaaaaggaaagttcaattaccacattaggtgatagggagaggcaaatctccattaacataagagaatgccactaggaaaccccatctcaaaaaccagaagtcttacccaaacaattcaaatatactaacaatttaaataatatgtaactccaacatatgtatatatctattaggttgtattgttagttttttgggctttgtatagttagtatggtgagtttgcattttggctgcaacgtatcagttttgaattaataaggctaaaagaatagcagatagattcattggttaagtttctaaccacgagatttattaaatatatatttgatactaagtatcaattttttttttatcattatgtagatactttattggagggacggaaaatcacaagatagaacttttcttttataaaattaaggttacattgtctaatttctgtacatgcctttaggaattataggtt

SEQ ID NO: 20699 - DNA, 2240 bp, Cannabis sativa
  modified_base (2173)..(2200): a, c, t, g, unknown or other
gtttcattataaaatgaaaatatatatttttttatatggtacattcttctctttaaattcaatcctacttatataaatatataagaaaaggtcaagtactagacttgttcgaagatgaagttagttgcttcaagttccaaacaacatttctgtgccgaaattgatgccataaaacaatcctagatgttgggaactttctttataccaagtaaggtccatcactccctagaataacattacttcatgaatcttaacctgtatatatgtatagataaatatatattcatttataagtgcacacgtctattttaagtgtcagcaattcaataaaaaactcttagtagacgagtgggtgataacatgatgtgcttttatcttttttaagcaatggcaattgggacaagcattaatttacatatctgtaatgtcaacactaagattgaaacacttggtatattagacgggacaacaaagtaaatgaaaatgaatgaattcttagcttataagagcaatttatgggcgagaaacacggatatataaggcttgaccaacatgatgatataggtcttgaaaaaaaggagaactttaattgaattatagtaaagaaaagatgaaatttatatatatatatatatatatataaatatttatatgtaatgtaaggataattttgggttgctgaattatttgaagtctgatccgattaacaacgacaaattacgttggcagattagtagaaatataaaaggataacagtgattgacttaaaatataattacaaagattgatataatatcttcaaattccaaaacgacagtagtctgatcatccattgaattttatttaatatcttttatattttaggtcaatgtaatgtagcatgtagtctaacattgtgggttaccaattttctgttccatgcatattctaacaatgtcacaaagaaaaattattcataatcattaggaagaaaaccattaagtactaaaaaaaaaaccattagcatgaaatgggccttttaaaacacaaattggtcatggttttgatagctttatgcatcttcctataccattttcaaaaatattataatttgttagttttttaataataataataataataataataatagataatttatattggccataattatagcttttgtttatttatttatcttactttggatttaaataagagaaactacttgcactcgtgttttgaccgaggaagatcagtccttgttaactaaggaaactttcgaaaagtcttacatgacaaatgtatattaatttttacattttttaagtctctatagatatattccattaaaaggcactgcaataattttaagttacaattttttacatttttcatggtgttttttcttcaattttaatctaatataatataacatataaatatattttgttagccttaattaacaacaccccttcaattacgggtagaatggaaagaattctctccagctttttgcatttgaatttaatttgtatattaacagagtggaccgtcaagacttgagggtacttaattgtgaccgtattttcaaaattaaactaattaagtccctaaattaactatcattataaatatttgaaatacctcttttttgtgtatattaattaaaaaaactcttatattatatttcattaaaatgtacgcatttttgtaagtgaattgcctaatatatcctcattctccacttaagtctagcacataattttcattaatttaaggggtataatgaaacatattctataaaagtagttatatcttaaaaaatatggaaataaaagtaaaaattaaaacatgtaaagtaaagtgggtaataggtatacaatgtaattttctctaaatattttttttagaataaaacctgttattataaatcaaacgtattcatttacaacaacatatatagtataagagaggggacatcctctaactaaacagagacttcatccaacactaaagtatattttgttaagctatgagcgattttattagtatctctacgcacatgagagacaacaactctagagaataaggataaaagaccccaacttttacaataatgtctgtaaaagtagataacataggtgaaggttgattgattgtcgtggagactttaagggctcgtttggaacgnnnnnnnnnnnnnnnnnnnnnnnnnnnntattatattgaattgtattttatgtaatatttttatgtaa

SEQ ID NO: 20700 - DNA, 2550 bp, Cannabis sativa
  modified_base (1389)..(1390): a, c, t, g, unknown or other
tatactcttaattgttttacataattactatatacatgtcacttcaaaacatgattagagtgaaatagaaaaaaaaaactatattatataagttactttctttttgtcatagcaatgagtacctattatttgatacactataccaattaacggtaactttgttgaaagcaaaacttgaattaatataaaaaagatgaaatataataaaattccttatctttactccataaattttccaaaggaagttagatgaggacattataaagtagtgtacccaccatgtgatgacaactccttagtataaaaagtattaatccagctctaactactactactactgctacttctacttctctctgaagcaaagtgccaaactttgagtcaatttttccagtggtccagaacctttttctttcatttgatgctcacatgcatgcttctgtgattttttttatgtaccacaacacagtactgctcttctttcatatacaaaagttttaatttcgttgagtacgtacgtactcatcatcaatagcgtaatatgtatatatatataaggtggaccaaagtgggttcttttgtgttctataaaattacaacaacaccccacccacgcctggtctaatatcaatggtcaaattcatgtgtaaaatttggtcaaactttgttgttgaggcagctgagacgtgaatcaaaaagaggaagacattcattgagaattatgttcacagttgagttagaatgacaaagcatgggatagaaaggttaaaaatgatttttcttgtctccccttgccttgtctgcaatagaaatgataacacctaagattagggcatcatattcattcattctgctcaaagaagagcaagaacaatatacacatggcaattgtatcataaaaaaagttactaggcctagtagtaaacacacgttactataaaatagacttttgttctcgggtcaaaagactttttttgaccaccccaactctaaatatttttcaaatattacaatacaatcaaaaggtatcgcctaatgactaacaaaatttgagcccaagctgtccaaaaatctgaacactccatgtctagtcgtctagatacgtacaatctccatagagctctagactcattgtcgtacgttcagtttttaccttgcctttacatacacacgaatcacgcaattgtgagtcgacaaactcagcaagaaaaacataaagacaacatataacctaatttgcaacttaggcgcccatacacctatttacaaaaatatcatgcgtccaatgttagaattgtaaaatgcacgaagttccatctcaaaattaattgacaataggagaagtagctcattcatcttatatgtgatattttatttccacacattagnnatgtgagactaactctaatacatcctcctcacgtttgggcctggacaatgtgtaacgaatgagctttaagagaccacaagaccgaacgtgacatttgaagaatcccacaaagtgaaattgaaaaatttgtggatgtacatattatgaaatttgtggattttaaaacaggtcaaagacccaaacactaaaaactggcacacattggccgaaaatatcccaaatggaggttaaaatggagacagcgaaagtttttagtttatctgatacattgttagaattattgtaagatgcatgtggttccatctcaaaaccaattggcaatgaaaggattagtccattcatcttatatatgatattttatttgcacacattatcaacatgggactaactctaatatccaacgcatataaatgagtctcgtacattcttgacgaaatactactaaaaaattggttttccccgacaattttaaactgtctgatagagtattcccatcagtttctataactgtcactgaattttttttccaacagtataaaacggtctcgtatattgtcaagtatagggcacaattttaacctgttgcttatactattataggcgatgatttgaaaccgtaccatgtagactatagtgtaggctacgaatttaacactaagaatataatttctcaacgataattttttttctgttgttacattgaaaaaataggaaaaaaaatgtaaattttctaccagtttttttcatgcattaattttcaaatttttacaaatttataaagtaacaataattaaactaacacaagtgttgataaagctaatcatctaaatttatttacaaaattatataattacaatatttttttatgaatcagcatgaaattcattacccaaacaacatttcctatgagcagcttcaagaatgaaggtctgtaacaaaatctatacatcagtaaataatgacatatgcatatacataacttttaacatatcaaaccgatcccaatccttttgtgtaaccttctttagcatgacacaagtgttaataacttaatctatagtaacaatagttgaaatagtgtaagtatcaataacttaattaaaaatatacaaatcgttaattataattaattagttaatgttagtataaatataaattga

SEQ ID NO: 20701 - DNA, 2022 bp, Cannabis sativa
agttcctcaattattagatgcatcttgttgccccggattcaagttgaaatttttcatggttgaaatgatcttccatgcaatcttttcatcttccactgaccaagtacagcaacaaaataccgattcggatttattttgagaatcatctgttatcctgtgagagcagctatctttcaaacaaatggacagatgaaatgactctacttgaatatgcccttcgaaatcttggacaataatcccagcagaaatctcatcagacagtcttgcagaaaacaaacgaagccaaaagcctgtgctagaccgctctgagctctctatgttgccgatatggacaggaaaacaacaagaatgttcaactttgtgctcattttctcccaacatgagcaaaagctcgtcttgttgcatgaccttcggtttttggcttttctccaaaaccaatatcccgtcggataccctttcgtcagttacttgcaaaccattgcctgagctgcttttcaaaaacttgaaatttggattcaagcaactccgagcaaatgcatcagaggctactgctttcacatactgcgttgatggaatcgatactgtctcgttatttgcagggtcataacaatgaatgcctagttcagattgaattcttccttttaaagtagccatcttaggcttctcaccatgaacaagtattacatgcttaggggacagaaatttgataagatccatgatacctttggcatctgtgtgaggactgaaagacaattgatgaatctagcaacataaagaagaagaagaagaaaaattattgagacagtattaaacaaaagacaattaaataatatctttggatattagaaagctaatgattctttggctccttacaaagggagtgaaacaaaccattgaatagggacagttgccaagttttctgaaactgagacacaaaatgtttggagggaggatcactttcttttaggtccatttacattttcatatatataacaaaaacatattttcttcatacgtgtcatgtcttttactaaataaatcttgtataccatacttcaaaataaatataaatttttcataaaattagtttttctttcatccctattcaccaaacataaaaatatgttacaatcgttcacatttttctatcataactttcattcagtgaaaagaaacacaacttgtagtaaaatatatgtagcaggtaaaagagatgggaataaacctggcatcgcacatcgacagaagtgtccttgtccagatcaattttggaaggtttacctgacatcaatttatgtcctatggttccagcaacacaatacctacaaagatacacatcaataggattagttatgcaaggaaaatcataacatgcaacgaaatttaagtatgtttatttgtttgtagatgcatacaacataataaaaatagttgatatggtaaaacatgagcagaaaattacagtaacatagattggaactcttttggttaacaatttgaggtttattgtaagaagacaaaaaagttagctacccaggcagtgtaattagattcttttctgaaggagcccaatgtttaaagacctcgagtgaaaaaccaccacttatcattcctggtgtggcaaagagaacacagggtccaggcgcatctatcattgaccgttcaaaatctttaactgcatcatcaaaaccaaatgacagatcagtgatgaatgaggttctcaaaagattaggcattgggcaaaaatactcttttatgtcactttgctctcattaccatatctgaaaagtactaattaaactcatttatatcaccaaaagcatactgtatttccagtaagtataagagaaaaggaatgacaaaccatgtttgaaatcaaatgcattgtgggttgaatatgtctccttgatcctctggctggtccaactgataagcattttatagtacatattggcttgaatagttaaacctgaaaaggcatatgtaaaaatcctagttccacagaaatttgaaacaccaata

SEQ ID NO: 20702 - DNA, 3367 bp, Cannabis sativa
tatatatatcatatgcatgagtcatgccatgcagccatatatattatatatgatatgatatgatatatatgatgatatgataagattaggattgatatattaagtttcaaagaagcttcacacacaactactccgattcagatcggtaggaagaatggtattatcattaatattattattaaaatgagtatattaattaattatatgtatacttttagtaaattaaattaaataataattaatattagtaataagaaattaaaatgatcatcagcttggaatataaagtagatagagtgatgctttcgtgaaaagtctttcttgtgctttgttcttctataacactttcgcaagtgacaaataattctctctatatataatttatttaatggaggactatatctatacatattataccacaatatatattatatatcctcaaccaacaagttatgtatatacatatatattacataaactaaagtatttttgtatagtgtttaatgtttaatgtttaatgaataattatgaagttgaatttctcaaggtttggtcaatgcatgataatatatatgattattgtgaccaaatttcccacaaattagttggcttttctatagtaacttcttttttaattaatatatcattaatataacaaagacatagatatctttagagaattgctattaaatattattggtgtccaatactttttaaaggtgacgtttcacgattagttagcaatatttcctaaaagttatttccttaagttacatggaattcaatacttaattacatcaataataatttaacagtgaggagaatactaaatactaacggtactttttagcaattctcatatttttattgaggcatcaggatcaaagattaattttaaattattaagtacgattaagaccaatattgtgttattttttaaaaaagacacaaaatgatttttggaggagcaattaaaaaaaatatatatattaagttatgtatcacaaaaattaaaatatcttatttgattgctatataaatctcatatgattttcaatatttatattttaatttcattaattatcaagcggcatgaccaaatttagggggctttggttcgatatttgaaggttggagtggtcgtcgacctttctctttaggttctttcgacatggagggtggttagcttggatgcatttggtttttgtaggctagcgtggagcgagagctagggctcggctaagggatcatgtgtatgatgcgtgttggaagtcttttctcaatttattgccaagaatttttcttttcgttttttttttttcaataataatttttttgtgggtctaattagttggttcaccatttgtgtgaaccattttttaattttggtctcgtaaccattttaaactgtcaagaatggtaaatagctgtttaaaactgttaagaatattccattatagtcaacgattttaaccgatcatttttattagcgacagtccaaaaatagatttggggactaatgaaaatagtattttttataatagtagcataagcaataaagtcagcatagctaaatctgtttggtggcctgctatttatcctttctctatctcttgctagttggcaattgctaaggtcaccgtaactagtcttacattcagtcatctcttctggttgatcttggtttgtagggtagccatgtgaatggtcccccttaatgtgcataccctcttgttggacagtttgaacattggtagtaataaccttatctttcatggacatctccgatctttcttagacacaacttccctgcttatcaagcacttcttgtgtcctggttcaaggcaccataatttatagcccttgaacttatttgggtagccaaaaaacatacacttcaatgtcattgtctgtaacttatcttctttgatatgaacataagttttacaatcaaatactctcaagtgttcaaacttgggtggcttccctatctacatatcttgatgtgtcttaaaatcgttagcaactaaggaacatctgttgattagttagcatggtatcttgagatattctccccaaaatagtctctcaaatccatcacctaacagtagacacctcaccctttccaacgatatcatattcatcccttctattataccattttttgtggtattgtcaccactattttatgcttcaaaattccctctttcgcacaaaattctttgaatttattttagcaatattctaggaaattatctgctatgagcaccttaagtttattaccgatttggttctccataatttttttccactcaatgaaagtatcaagggcctggctcttgttcttctgcaactagacccatactttcctactaaaatcatatattatgctcataaagaagtatgcccctccaacggtaggtatttctagctggttcccatataggtcagagtgaacataggcaagtctctctatggtggtgtgctctcctttattaaatttcaccctgcggagcatcctaagcacacattcatcacaaaacttgagcttctctttcaatttctctatgaacaacccttgtctgtcgaattcttcaaaccctctctgactagcatgtccaagcctgaggttcaatagtctgttgtagcattacctgttacagtctcaccatctaggaaataaagaccattgttcaaataacctttgattgcaacttgtgatccctgagaaattttcatgatcttatcatctattaatcatgctttgtcaaacattccaatggatagtaagtttctcttaagttcagaaagacaacctgtcttgtcgcaaggtcttaatgttgccatcatgagtcttgaacataataatgctagcttattaccttgatatcacaagctttatcatttcttagcaagattaatgttccattatgatcttctgagaatgagttcaacatgcctttatttggtgtcatatggaatgagcaccattaatccagaacctttcactactacaaatattagaattcgcaacggtcctaaaaacaatttttttcgaggaccgtcactaaaaaaattaagtaactatttaaaaccgtcgggaaaaatttagtattcccgacggtttaaaatcgtagtaaacaaaataggcaacattttttttaataaaatacaaatttttaggagagccttatacccgacgaatgaggagagccttataccctaaaaccgtcaggtataagggctcattaaaaaatcctcatctacttctcaccgcatttcccaggtgcccacctatttttttttttctatttcccacatgcccatctattttttctccattttccacaccctaaaacgaaaatct

SEQ ID NO: 20703 - DNA, 6178 bp, Cannabis sativa
attgcataaaatacaattcaatataatactatacaatacaatacggtttaatacaacgaacctaggtctttcaaatagactgcaatattcttttgttgcgtggagagcatctattataactttataatctgtctctacttgatgaattgggaaaggcttctggcagcaccaatttaaggttgtgggaagcgatttagctccaaggattgatacatccctgttagaactttatattaattgatgatatgaaggcatataatatgaacgatatgaatgcaaaataaaattgtaaagattgaacacatacatacaatgaaaggatcaaaatacatgtacctccaatcattgatattgatagtttgatttattaaagttagatttgcaaaagaaagcgaatacagattacaatgagtactcgggcttcaaagcttttactagctcttttagattagaatgagcagcgagtttgaggatcggtatcgtatcttttcaggtgagatattttatcactatatgctacaattaattgtcaaaatattttgacaattaatttatgaaattaaattaagtaactaaaatatttgataattaaatttgatcatatttaaaatattttttaatcatatataatcaattcactatacatttgattttatacatgtaaatcaattcactataattgattttatatagaatattataatattctcctactttgtaagtatttaaattgatttatcatttaaatcacaatagtttttcttgctatataacatgaatcacggtgataggtcctcatttatgatggcaagtattattttctatgtattacaatatatttattacatacatgtacttaatgtgacaatgtacttaagtgagtaaaccctacatttattctggtcttatgaagataattttctcagatgaaattaaggtgcacatgaatatggaaaaaatatcgaaataagagcttcgttaataattttagttgtacaaagaaaagttgcataagggtaaagctgaatctcatatttactttatgatctttgaatttatgttgcaccatgcctttagtcaaggataccgcgatcattcaattcagtgttgcgggcttaatgaccacttgtaacacttctttatggctaaatacttaacgttgatatgctagcttataccaaaactgttatagttcttagccatagatattgtagctgaatttgttgcaaaattatcttaatggtctgaaaatagaatcattaactgtaaggcttagtatgtttttaccgagatttttagaaactaaatatttgaaagcgtaagatattaaataatgattcagtacatgagatggataatttttatgtggttcgggtgataattatccctagttcacgagtcagtatattggcctttggggctttaaaaatgtattacaaataagtattacaatgaaaaccctaactagctataaggtaaagtttctaagttactcttaaggaagaagaaagcttagaaaatatttttgcagagctttggctagtttttttcctgccccccaacatgaagggtaaagggctttatataggctaaacttcgggttcgggcatacctgtgaaccgtttcagttttatgttaaagaaggtccactatcagggaaaaatacacaatatacaagactatagggcccattagaagatcttttctcatggatgatggttccgtaaaagtaggaaaacttttggcgtcgcatggcacgtatcaggcagaaaccacgcttgacagacaaagtcgttagaggagttcttggaaaaaacatgtgtatatagaggaggtgtgcgcactaccatgatctgactcaagagacaatatctgatcttgtgttagaaaagaaaacacgttaagggagacctctagttttgcattgtagtaggcatccgacattcctcttgtagcgaatgtttgaatatcgtcttttgataggcttccaggtgtccccttataagctaagaagtctttgtcccttctgcgtcccaagaggttagaaaggcttctgagtcctggaaggttacttcgttccgcggtaaggctttgagtctttcttgggcttgggcttgttccaggtttgaatggaccttctacgataagaagacataaatgatagttatttagatcattatttttcattttatgccatgtgcctcttctcctgaaacacatataacatttaccccaagcttccggcactcaagagtggcataagcttgcaatcttcctcctagattataatgaagttttttgggcacatggacagttttgagtaagatggaagtatttttcttcatccggcactaagcagttgaggaatcaagaatttatgggagacaactgacatcatggacatgtcccttattcttttggtttgtgaataccttgcgttttttgattgcatgcctagtgcaggatagtgaagcgatgacaattatgatgtgacgtctattgaataaatgtggagctcgaggtggatacaaatgatgaatgaatgcctcgatcctgattaaggcttttaaagcagcctcgttagtttcccatctgttggattaccacctgttcatttcttaaagagatcttgacccttgattttgaatcacgtggatcacaattttttctatatatataggtgtgaggaatccatcgttactcttttagcattttcatacttttcaagccctttgtttttcaaattcaagctcaaaactttttctagtgaacccaacctagaaagaaaaacctagaaacccaggggctcgaccattagtgaatgtacgattcctttcgatgcccttactcaccatttgtggcaagtttgagctagacaattcctcaaagcaccacctttgtaccatatcttgaaccaccctcagtccaccaaagaagtcgacgctcaaacatgccgtgaccaaattctcctttgggcctttgacctccaacccgactaactcaaccatcctccatctctactacgtattacaagtaagtttctctaagaatcgtcaaactgtttaatttcatattagggtagaaatttttatgttcgagctttgatttgtgaaaccactgattgcatgtgagtgctaggaggaatgtttaggtagtgtttaacatgaatctgatagttgtagagtctcaacgttgagaatgcatgcttattttctggtgagaaatttgtttttgtgagggtaacattcaggctcaactctgtgtttccccattttgaagacattagggctccaaataggtttgctccagtttttctttcctggtcctctatgtgttcccaatttattactcagaggtgttgttctgtgagggccacacctctgggtaatgggtctggaggggaccactccaagaaattttaggggagaccttcttcgatatgtccttacgattttgggtatcaaatttgttggacctttcttctctttcagtagatttatctgatgattaattcaaccttgaggtcgtggacctcgaggagactgaaactgattttggccgaagaacccataagagatatagcaaaaaaagctgctccaaaatggaaatagaaggaagcaaatacccccaactccagtatgtacaatttgtccatatgggagatggaccaaagtgtcaacaaattcacgggatacaatatgctctagtgactcatagagatgatgggagtcagtaatattctagggttggtctagaattaactttcccttgtaaattaatctacctctcaaggcgtcgtagatgggtttgtttcctggagctgcgcccacattttgagtggggcacacctgtcactgaagacttacatagccaacatttgcatgaagattttgatagctcccttttagcccatcccgccatcatataagttattagctggatggtacattttgtgcaagacctagaatatcgaggttcttggatctgaggaagttttttatttttatgctgcaaaacctcaatcgatgtggaacaattcaaataaggtcaggttatacaggatggagagatacatagacatacgttgtccctacaatataaccaagcactcccacgacctttgggaatactggttttttaccactggtttctcagtaaagagacttccaagcctctcccttaacttcaaaattgtaggtaacaatgttctccttttgtttccttttgtagaattttccttttattttatagctattaactaatgggaatgttttcattggtgtaccgactgtggctcggaccctcaaaactgaggccttggtgaaaaagctgacccaatacgacaagatcctggaccctcttctacaagtaggatagtttgtcactactgaattgctccatgagcatgggcttaccaccatggtccaaagcatagatcagatcaacaataggggtatttgccatgacctcctgaatgtcaaagagacaattgatgtgatggtcgtcgaggtgataaaggaggcccttgaagaagatgagcgcttgatggcagactggttgcgacaccatccggatctagttagcgaggagtaggagttggcggagagatacgccactgtatacctagatgagggcacccctagagctagcatctacaaaagaggtaaaaagccctcccacttaatttatgcccctcgtcgggattaaatggctcaactagatgaagggggcttcaataattgttttttgcatctagaccctcataggtattcgataaaggagtgtaatgatagggttgacgagattattaggagttaggggcacttcaagttgtttcttgaaaccattagaatatacccctttctcttaatgtacttcctaaattttaaagaacatggcagcttcttgaattgggaagacatggctctgttttcccaaggaaaatcgtaccatagattagtcgacagttgcatccatgccaaagtctcatttgatatttctatctaacggccatattatttgtacttaatgccttgtagtcatttctaacgatgtctctattctttgttttacagaaaaacaaaggactcccaagataagtatgctgaactcgatcatgggcaagattgacaagaatatcgcccaaattaaggctacggttgggcctcaagtgatctcagaggctgcccaaggtaggggaaaaagaaagagcatggcaaaaagggcccgtaaatccaagactcttagtgccccatccacttctgccactctaacactccgcgagtcaagaaggtctctgctggagctgagaagatttctgcagaggcgggaaaggcttctaggaatcaagaagctctagttgttgaggatgttatagaaattcaacctatccagcagcttgatctggcaccagacagggttccttctagaagtctctctcccaaagcgtctcaaggtgacggataggccagcgtcccatcagatgaggtgaaaagggctttgtctttcctgagaaggttgctcatgccgctagacactcccatgctccaaccaactctgaaagggaggccaagaaggctaaggtggcaggagtaagtcaaaagtctcttagaggagagggagactagaggcaaccaaggaatctagaatagcaacaaccaattcaataacaagaacaccaacaacaacaacaacatccccaacaataccaccactgcaacaacaacagcaagaataacatttccaacaaaaaccacagaaagacaaaaacatcaaatacaacatcaataaatgcaacaatagcagcaaaaactccaacaacaaccacaacaaaaagagcaacaataaccacaatagcaaaaaaatcaacaacaacagcaaaaacaaaccctcactatccttccagctataccatccttcaactttaattggcccttgcgccccaaggtggttgaagcaaaagttttggagaaggtacaggaagctaacctttgcctaaaaaggcatcatggtaaggaaatgtcaaattcccagaagcagtatgctttactctagtcaaagaggtaggcggagcttgttgggaattattttaccaggatcttagatcgactcacaagtatgttgattaacaccctaaatatgaactctcagaaacgatgaaataaacacatataaggtt

SEQ ID NO: 20704 - DNA, 2927 bp, Cannabis sativa
gtagtttaatcactgtttgcagctataattccatgtgattctgaccatgccagctgtatattgatggttagcttcgttgaatgtcagttattgttttttctattcttgtgccaggtataattccaggcgaataccccctttgttttttggcgggtgtcttagtactaaattttagcacaatattttattgttgcatttttttgcttaagaaatgttttaggtggtgatctcactaactgcaaaatatatgccaaccattgattgcactcgtctcggatagcatccaaaaccttgtacttgaatctatattcatgagttttatattagaagtttaaatacaaacttatgtaaggtgtttgaaatcttttagtttgtaagtaacttctacattaggagttgtaaataaagctagtagattgattgaccacaagtcttcatactggatacaaggtggtagagtgctggattttatgttttggcacctacctacctacctgcgattattgtttgtcactgtctgtgtttcttgtgcttcaaagagttaatctttacttcaacttggaaatacacaagagaaaaaaaaatcttatcaattcatttggctgctagtggttgggtagatagtcatgattgtggtattattgttgtgcttgttaacctcctgtaggtcaagtggtcaaattcattatatcctctcataaggtctaggattgggttccttctagttacctgccttttgcttttaagttttatgtaattggttggtggtagtgtttgtaatttttttttttgcagatttcacctgattgtttttatgtaattggttgacagtaaatattcattgatttcagggttttaaaaaggttgatccagaccgatgggaatttgctaatgaggggtttctaagaggtcaaaagcaccttttgaagagtatcaccaggaggaaaacaactcatccacatcaacaagcacaagctccgagctctcaggttggagcatgcgtagaacttggaaattttgggctggaggaggaagttgaaagacttaagcgagacaaaaatgttcttatgcaggaacttgttaggttgaggcagcaacagcaaactacagatcaccaattgcaaaatgtgggtcaacgggttcaggtgatggagcagcgtcagcagcaaatgatgtcattcctcgcaaaggctatgcatagacctggtttgttggcccagctagtacagcagcaaaatgaaagtaacaggcacatcactgtaggcaataagaaaaggagacttccaagacaagaagaagaaaactcagctagtgagcatttgatttattctcctgatggacaaattgtgaagtaccagccttcaatgaacgaggcggcaaaagcaatgctccggcagattttgaagatgaacacatctcctagacgggagccctcgatgaacaaccctgatgctttcctgattgacaatgttccttcttccaatgcattagatagtgggagtactgatacctatagtaggatttctgaagtgaccctttcagaggttccacaaacttctgcacaatcagaccctggatttcttgtcatttcttcttctaaacccccttccgagattataacttcacctcttgtgggtagcagttctgtgaaggcagctcaattgcaagaagttaatgtgcagagttgtcacaaagaagaaactttgcctgatttcattccaatgatagaaactcagctgcaaagcactgaagatctctctgatgtgaatttggtgaactctggaactactaatgcagaaggcggagatatgtcagtagttttggatggctcaatgcatgtagaaagtgatgacttttctcccaattctcatgatggagttcccaagctcccaggaatcaatgatattttctgggagcaattttttacaggaagcccactcactggcgatgtggacgaaattaatgcaagttctgtagattgtgaaatgacacaggatgaggacttcttattagggaaggagaatggatgggatcatacacaacatatgaataatctcaccgaaggaatggggctgttggcatcggaatgcagaaggaattgactcttaccttctcaattgtatatacttgccatctagaggtaaaattacgaagcaccccaattattatatgaatgctaaccataaacatcaatttcagagggcctttcttcctcttaggccatggatttatttattgtccttgtaccttgagcctgtctttgtttttttgtctttaaaattatttaatacaaatctatgtcaattaagtttacaaaaatatgtatagttaaatttggctaatgttcttttagctccgacagatttcaaatttgttcaacgttccatttgcatatgctactttctcatcttttatcgaaggcacctaatagcacatattttgttaccatgtgatatgatatgacacgaggaaaagacttattttgttagctgataattattgcatggaagcctttggccttggtgctttgatatccacaacacgtagttcgatctagagatgtttgtttgtggtccatccatgtattgtattgcatttgtattttgggatgataatgattgaattgttgtaattgtgaaaagcataatactattgagtaccaattttgtacatttaaatggtccttgcagagattgatattgagctgtgctgcctgagcatgcaaccttttgttcaaagagaataccaagtcatctatcgattttgaagaataataattctcctttgtgcatctctctctattacttgtatccccttttcccctcttatgcaaagcacttgttataaggatgtgaagcttattattactgtgaaatatgcaaatctgtcttctttttccctaataaataaaaaaagctggaatatct

SEQ ID NO: 20705 - DNA, 2472 bp, Cannabis sativa
caaagcattgaaaacttagttctacccctatttattgatccatgatccattctatacctaaaattgtactcacccataaaatgaacttactagtgtgggtgtataatttggcctgaaaacgtaaatgagggtaaaataactttaattattattatttaaaaaaaatgtaaataaagggtaaaactaaacttccttaaattgttggggatgggcataaaaggttattatatttagtatggttgtgttgtggtatgtgggcgctcctcattttgcccaaaatgaattgtggtgtcaacctagagctagaggtagaggtacttcccaacactatggaccacccttcttatcaatactgattgagacactgcattatttaacaaaacaaaaaaaaaaaacaaaaaataaaaaataagggtacgtttgttgtagttagtgaaggatataggaatattagccttcattgctatttgcatcaacaatcatggttagacaaaagcttaagtcaaatcagtatgaaattaattaatacaatcacacatatctcaataaggcagtttattttattttatattcgaagaataaggcactttattataactcccaaattagtaacacaaatacaaaaacaaaaaagcaaaataattgatattgatggagatgggagtacgtttggtttgtcttctgacctctatgaaaaaggtagtgatatcattcatatatgtcttctttttttcatgcttttactttggctacgcaaaataaataaataaataaataaaaattatacatacaatataaaattcaacagtagtaaacgaaactagctttattttattctttcagaaaaatcactagtgttgttagcagcaataaataaaaataaaaaaatcttttacatcagaagctgaaattctcttttcttctcttgcaatgagtatcaatcagagaccacatcacatctcccagctcttttatcattatatacataagtaaacaaaattggggaagcccccaaaaataaaaaataaaggtgaaaaaatactcgaaaactttttgactctatgatcttcttcttaagctgttaatatgttacaaacttattcattttctttattcaaatcaactgtcaaacaaattagatattgcccaactacttggagcctccaaaactgattgaatccctttctgcaaagtcaaagagttaagtcagtttacaagaacattttcaaagatttcattgtggataatgaggcaagggatgaacatctgtcttaccttaatattatcgaagattcttctgaatctcggttttgcatttcgagtggttaaaacgaattcgtaagttgtgttatggggtaagagagtttgaactatgtgcctgttatgaaaagactggatagcattagaaacagatgaaattaagatcaatgtttagggtgtcccattaatttgagaaaaaaaaaaggaaggaaagcaaagaaccaattacattcttttaggattgtatatgcaacagtcattatgtctttatcaccatcaaggcaaggttcctttgcaagccgtgaccacctgcaaatggggaccaaataactgataaacatgagaaccaaggcaggaggaggactcaactatatcgactttaatatgaaagaagacgtattttacaaagatttattcatactttacaaaaatacgcactgtacaaattcaatttctcatgcaagagaaagagccttcaaaaaatttatcacaaaagtgtgtagcatttgaggattaattcatgtaaattcttgaaagcaacactgggaccagctcatatattttcataaaacaatttaaaaatgtgtaacagagctatgaccgtcaagcataaaggaaaagggggaaaattagagggaaaagagaaggtacctcgggtggcaagccaaactaggatctgagatcctaagaatttgaaatttatttcgggaatctttatgataaccatagtgttcctgtttacaattcattaaaagtttaaaactttagtaagtagtgccagttttaaaaataactttagtaatgaagtaaaaggacaaacaaaatataggaataaagactacaatggctaactcacttcaataggctgcgaaattaccaagagttgaaacacgagatcgatgttctactatcttgatctgagagatgaatagagaaaaatccaccatcaaaagaaattgagatctgtatatccgttagagtgtggcaacaactcttctacttcaatcctggaactagaacaactcatgcttttctttatccggttgcgatttaaagactccacttctgccacaaacatgctgtaaactggtctatgatctgagaaccttgactcgccacgaacataagacatctgatgcaggcctcttccataccaaagtatacgatcacaccttcacaattaaagaacaggtatcagtatatacttaaaga

SEQ ID NO: 20706 - DNA, 3027 bp, Cannabis sativa
  modified_base (362)..(364): a, c, t, g, unknown or other
ttatacacgagtacttcactctggttgcttcatggaatgacgactaaccctacaaatcaacacgagtgtttccagcgtgttttgtcctcactcgcacacaacctgagaaattaccccagaaattaacccagatcaagcatgcttgaccgtgatgggctactgaaaataaagatgtatcttttttatataggtagtattaatcaatccatttaagccatcttcaactattagtctcatacccacattctcagaatcatcacatatgaccttccccaaacgttgtgcgattgtacagctaccggtctttcccttttggatcacgggctctgactgtcacaataacaaggtgcatcttgtttttnnntagcccatcacgaaagaacttcacagttaagcgtgtttgacttggagtaattttaggatgagtgacctttgggaagttttctttttaagtgtgcgagtgaggacaaaacatgttggaaacactcgtgttggtttgtagagctaatcgtcagtccataaaatagacagagtgacgtatttgtgtataagaattatcattctgtaaatatacatattatacgagaaagcaagggaagcttctagaactaaatctttgtgttttatttgatgaactaaatctttgtatttttaaatcaaaacaaacatcacagttgggggaagtcacttgattattccagatcattcttaacgaccctcttaagttaaccacaattgatttttataataaatgagaaaatgccccatatataaagcccatcgtgctcttttctaaggacaaccaaaacaaaataaccaattatagtataactgctcaagtcaaagaaagactactctttcttccttttctctaattcaccgaaaatgttcagaaatgcttcaaagaagagtaaccacaacaacactcgtctctatgacgttcttggagtttcaaacaacgcttcccctgatgatttgaagaaggcatacaaaaaagctgccatgaaaaaccaccccgacaagggtggtgatcctgaaaaggttctttctttattattaaaaaactaattatatttcattttgtttgaatatcattactgatattgtacttgggaattaatagtttaaggaggtgggtcaggcatatgaggttttgagtaaccctgagaagcgtgcattgtatgatgagtatggtgaggatgggctcaagaacggaatgggttatgatgatgacttcatgaacgatgctgacccttttgatctcttcaacagtttctttaatggtaatggattcaacaaaagaagtggaaagaaacgaagtggagatattgttaagcctctgagagtttctttggagaatctttacttgggtacttccaagaaaatctccatttcaaaaaatgttatatgctccaactgtaatgggtatgtttgtctattaatttttctaaacaattcttcggtttaacttcttgaattaacaatgtgtttgtgttttagtaagggttccaaatcgggaaattcaatcatctgtagtgggtgccaagggagaggaatgaaggtgatgacaaagctgttggggcccaacgtggtacaacagtctcagagtgtatgtaaagattgtaaagggaatggtgaaataatttctgaggaggaccgttgttccacttgcaaaggggaaaaagttgttcaggaaaagaagattaaagaagtcattgttgatataggcatgcagaatggacagaagattacattctctggtgaatctgatgaagctgtatgtatatttgtttcttctttctttattagtttttgagttgggttttgatgaattctattaatggtttgtttggtagtcgttttttcagcctgacactgaaccaggagatgtcgtttttgtcatagaacaaaaggaacaccctaagtttaagaggaatggggttgaccttttctatgatcatactttggttcttgctgaggcattgtgtggctttcagtttgtattgactcatttggatggtcgtcgtttgctcatcaaatccaaccctggtgaagttgtcaagcatggtaagtaatatcaatacatatttataaatttatatagagataattggatgactcctttttacatttggtgttaggcgtgtcgatcttttgactcgtgttaagctagtcttatcgagtttgacctgtttttcgtgtcaagtcatgtagatttctttttgacccgcgtttagtttttccgatcctaactcataaaattcgtgtcggtatgtatagcaatgcttttaacagaaattgtgtgtatggcagattcgtacaaggtaatcagtgaggagggaatgccaatgtatgggaagccattcatgaagggaaatctgtacattcattttaatgtggagtttccaaattccatgagctctgaacaggttaaggcattggaaactattctgcctccaaagccattgttgtctcaacaagtttcggatatgacgatagaggagtgtgaggagacaacactgcatgatgtcaacattgaggaggagatgcggcaaaagcagagttttcagagtgaagcatacgaagaagataatggccgatttggcggccagggagtgcagtgtgcccaacaatgagtatattttacaaaaaaataaaaaataaaaaaaatgaatgcagtgtacagtgctgtatacagcaatgagataaggaatggttgattttttttttttttttttgaaatatgtaattatgtacattaaagaaaaaaaatagaatttgaatttgaattttccttaaaaaaattatttttttatagttctatttttaaaaattattttgtgaaaataatgtcttttttttatttttctgatatttgaaaataaggttttttacttttgttgataaatatatatatatattttacttttaaaaacaaaaacagtatttaattatagtgtcaagtaaccttgtaattggaagtgattatattatttgaattttttatttgactaagtaattgtaatt

SEQ ID NO: 20707 - DNA, 2404 bp, Cannabis sativa
gggaatatcattgattaataatgaggattaggcttcgtacatctataacagataataagttgctaaaaagaggtacaatacaacatcgaggtcatgaaatttttagcctttttcctatactgattgtgtatcacactaattcgagtacgtaccaacatgtcaacccaagcactggctccaacaagaacagaaaatccgagaagaacctggaagacagaaagtgaaaactactgtcaacaagatcagattcagataattaactaaaacagttgagtactattactattaactgacccatggtaagtaagctgctgtgaaagtaaagaggcccaagaaactcatatgaataaaaggattttgcttgctccatacataaacctataagcagaaaatgcaaccatataagaaacaactgtatcatatgcaagaaaatatgcctattttctggaaaaagaggaatgactaaccatcataaaggtaagtgagttgctaaggaatataatttttgcgaaggactctgatagatacggtatcattcccccaataagaacaattccagttaagacagaggcaccgaacaaaagcatgtaaaagaaatcagcagttcttcccctgaaggagttctcttcaagaagcttgcagtatcgagcaagaaagaacatgtggaacataaaatccaagtctggcaatgccacaatataattatgttaaaaataacaatgatcaacaattaattaacttcaacacaaactgtttttttaggaaacacattccactaactttcactagagttacataaatttccattttgcttgggtgaaaggatatctaacagcgaggagtttgtagaagagaattgactagcaaaggtgtgctattacataatcccaattaacaataaaccttttccataataaaatgttaaggaataaacaaatacccattttgcgaaagtacaagaaattcgtgacgaggcgccagaattgatactgcttgacaactagtttaggattcagatacaaattgtaaggagagattatctgcaaatttcaacaccagaaaaatcatccttagaatgagtcccggaaagcgattatcaaccttataaacatccaaaattaaatcttttttttcctaaatagtattgaacaaaagaaaaccgattggaggagaatttaaagaaaaacccaatataaatcagatgaaaacaaaaacaaataaaataaacaagattaacattttgagcaggagagttagaaacgaagaaaggggaaagaatcgaaaaaagtaaagaaagaaaattcaatcgatcaagaaacatacatcgagggagcaaccaatggttgtaacgatggccgcagtaagatatgagcgagtgatgataggcatctgcttgtaccattcctccactgcttgagccattgattttcgcccaaatttcgatcagggacgattacaagacagaggctttaggtttggatttgaacaaacaaacaataaaaatggattttaagcttcaggatttgggtataagagaaagaaatgtgttaaaacgatagagaaatgaagaagtcgaagaacaaaatctgaaagaggaacagcaaaacagctatatgtgtgagctcttgcctttgttcgacgaagctatacatgacaaagccagacgaataagaatgcgcgtgcctttcacggaccaattaaacgttaacattgtacccgacaggacaagctattccttaaggcccagctattgtacttaataaagacgagacgacttgtagttgagacatttggaacggaccactcagagcttagttatattgggcctaaacaatgggctttctttacataattacacttgtacgaaaaaataaggaaactttacaattatataccacaatataaaatttatgggtaaatactattttagaccttgtattttgcaaaagttaccgattggaccttatattttgttaaatgacaaaatacactctgtattttccaaaatggtaaaaataggaccttgagcttaatttttgacaattttttttaatataactaacttgaagacaattcctaataagaatagatacaaaacagttctatcataacacctctagatgagattattattaaattttattttgacgaaaaatcagttcaagatcctatttgtaccattttagaaaaatacaagatccattttgtcatttagcatattttaagatctaattaatattttttacaaaatacaaactccaattaatttagagatatattttttttaaatttcccttcaaaaataacattttataaaaatattaaattttgggggtaaataccattttggatcctgtgttttgcaaaaattatagattggaccctgtgttttgttaaatgacaa

SEQ ID NO: 20708 - DNA, 3622 bp, Cannabis sativa
ttaataagtaaatctaattatatgaaatgagttttatttagggtataaaacccagcataaccctttaaacttaggccatatgctaattctgattcaataccattatccatattctcaagatgtaaagggcatttattgaaaggatgaccaattctaccacactctatacaatactcaagaagtcgttcgtaccggagttccacccagaatttgtctctaattttttacatagtgatcatacgacatcttaaaagctattgcctaatatccagacaaacacaaaactgaagaaaaggacccgaaccttcataacaagaatcctcatgaacttcaatgaattcaccaataatattaccccatgtttttgccaaagatcgggatttactgaggaatggaagcctatatgcttgaacacaaaaagtagtaaaccatggatttaggtgtaacattttgtaaaatagtaggtgtataaaggacaatatgatgattttgaaagtaccatggatcctttcgaagagctctcagtttatctttgttgccctggtttattcccaatatacgtggtagctattgtgtgtgacatgtggtcgacataggcacgtcacctggagatgagttgttagttggattaaagaaacaacaagtatagctcatcatgctagctcccggacatgaacaaaagatctatcttctcctctggaagtctagacacagataggcatctccgggccagaaaggcttgagttgaatagtcactttgcatttaatgcagcatggaaaaaatgtttgggaacgcccataagatgaagtgtcagacatcataaacctgatttagggcgattacacgataattgaaggagatagtgacgaccccatcacaaagaatcacatcaatcaagaagggatgaaggctaatctcacctaacgcctatgcggcctactacgtaggtggtgcatgccctattttgtaccttttgggaacttgtgcatgccaatagttagctcttaaagactggtttctccttttcttcttcccccaatctctataaatatccttgaaaaaaatttagaaggggatcggaaaaagaccacaaaaaaaattctctgtatggaatactatcattgataacagagactcgtggactacggctcattaatgaccgaaccacgtaaaaatcacctgcattaattatccctaggctctcattattatcttatttaattagctgccaaaaatctccgccaacattttggtgctttcattgagagctgtgggaagcatcatccgaaacacgacaacaaaagatctcagttacaatggtggaaactcgaaaccacacgcaccaacctcgccctttctagaatcctcggaacccaaatgatgaagaggcggcctcaccggttaatgtaggttttgaggaacgagacaaatcaaacgacaaagaataagaagaaagctcagaagggtatgatgtttatgacgatggtagctataacgagttactggcctaaaggtataaagcagttgatcatgagtgcgaactgaaagctcagaaagagcaaaatagaaaaatgccaaaactagtggtcactatgcaggaagccatggcgacggctggaatccacatgcatcccaaggttgtgcctaaagtatcagaggaaacagaagaagagtcctcaccaagcacccaaaagcccaagactagggagccaagccccatacggtatccttctgagtacttcattggcccttagaggaaaggtttgtgaaaggttcgctctgatttcctgaaggggaaaggtctgcagaagggaaaggtcccttgagagagcattggccttcaggattgagaggaccgaaagagcctatcactgcatcaggaacctagggaaagagggaggaaaagtgagaaatatcccctagatgacttaaggaaaaaacttaatgataaacatagagacttgaaaaagcacctacaaaggaagaagcagacaataccggtgtcgggagatgccctgaatgagggaatcttggctgagttggcaatcctctgcaaagacattgctagagtcttgcgaagacagaagggagatgactcgtagtttgattgtgaggactggaagccttgcgccaagcacatcatggaagcagaacttcctaaaaattttaaaatgcccaaaatggcaatgtacacgagggacttagacaccagtgatcatttatctcgattcaatagagtaatgaccgtcatgagagttagtgatgatgcgaagtgcctatgctttccactgacactaagcaagtttgccgacgaatgattcaagaaattggagccaggatcggtagactttttgaacaagttgcaggttagttttcggcgacagtttgtggcagcaaggaaggttaaccttgaagtgagtgccttgatcaatataaaataattacccatggagactttgaagaatttcataaaaaggttcaaggaggaggcctcgaaaaccaaaatggttgaagatggacaaaagtttgccctactccaagatgagatccaaacaggaacccccttctggaatgacttacagcaagaaggagtagttagcctccaagactttcagacgagagtctagaaatacattaacctggaggaggcccaaatagtggcttacggaggatattacccgacgagagtgtgaggatatgcagcaggagcccaactttccaaggttgcactctctgttgctcctcaaacaagcggaatacagttctccgctacttcgagatacaaccagaacctcaccttagccgcgacactgtcacactttgggatgcccataggcaatccctctggggcgagcgttcagcttctgtcccaatctgcaccgaccactagcatggcaggagcccaataaagctcctagattaagaggtcttttaaacgtagcacacgaactgaagacaagagacaacagagggggtatacaccccaatacacgcagtacaccgaactcatagactctcaagaacgtgtatatttttccacctgacaatatacacattaccagaacctccccccttgtatagggattgctcccagagggaccccagcaaaaggtgtgaatatcacaacgatattggtcataccacaaacgaatgcaaaaatcaaaaagatgaaattgaaggcttaatccgattgggcaacttgtatgagtggatcaaaaataggctgccacacttgaatctagccaaaactggaggattcatgcctcaaggaggaagtgcagttgcgcttgagtgggaagtgcctccctgagtggtgccacattagcaggcgcccagactgccacctcgcccaaaaaggagagtcgccatgatctccggaggtcctcatattggaggaaccaccaggaatgagctaaagcgctatggtggggccctaaaatatgacaaggaggtatgggaagttactcaacttcaacctcaaaggcccagacacatggatcaacccatcaccttcaccgaggaagatgtgaagccagcgcgtttcctgcaccatgaccctctggtcatagaaactcccattgcaagtaaggtcgtggctagaacactagtggatgatggaag

SEQ ID NO: 20709 - DNA, 5278 bp, Cannabis sativa
tcggtttgggcgggttattcggtttgggcgatttacaaatttttttgtacagccctagtttttctgcaccttttttcatgaattcgaaacaacccatgttttgattgattctggtcttcttctcaggtgaagtcgccaaaattaatggtggttctctttctggttactggttaggttttattttagttgtatgttgtattgggttttgggttgttgggttggtcgatcgaaggttgcgtccgtgaggttgtttgttttgttccgcggggcttaaatagtagaagaaatggtatttaatttggtaatatttattttatgagttgtattaatgttgatagggcccatcttaagtattttttgtaatttaattactttttttatatatatatgaaaaaaaaatccctattaaaagatagaatacttaaataatatagaagaaacagatgagtattgatgattgatgtaatgtgaaattttatataaaattgagaaaataaaattttaataatgcatttagaaggaaaaagagagaacgatgttgagagattaatgttagattttggttaagcttctgtttttgttttagagattaaaatatataagaaaagtaaaagttttgattttccttttcttttttggataaccttaaataaatatatttttttaaaagagaaaaatcttttatatgtaaataattagaaattatgcaaaatattttatttttaaaaataatttcttaggtctttttggaaacttaacttcatgcgaaaaagtcttcggaaagtaaattaaaagaaaaaaaaaaatcttttttatctaaatatttttaatttttttaatcttaaaaaactgaaaaataactttaaaggacatacgtatacatatacgtctacaaacatataaaataacacgagtgtaaagagaagaaatggtgtgagtcataaatgtccacacaattatatccacacaaaaagattgaagtaggttataaggttttggcaaataaaattggtacaccttttcataatataatgtaataaaataataataatattattattattacaaataaaaaagaataaaaacatgtgatatgctctcatttgacccttccattacgcagcttaagccttcagcagcctctctcatcattcatatccttttgcttcttttgttataaaaccatttatttattaactaataaagttatcgaactccataaaaatatataaattacataaatagcgctttgcaccataaattcatactatattatataaaattctatattgtcagtcacctctcttcaccatgcaacatgcataataaatatagttttaaccaatgtatatacaaacttatatttttttttttgtaaggataaactatatttatattgatttcacatgaaggattttttttttttattattattattattatttctatgtttattttcttcatttggctctagattcagatttggtttcaaattgaagggtagacttttcgttttaaaaaaagcgtaatagtaatacaattgaagagtagaatgaatgaaaataatgggaaattataatcatgtgagttgtttatcgctaaagccgtgttttataatttataggtttggtataatttggatttttttttctcttctattttcgagaggatttttttttctcttcttattatagcagttttctttgaccttctagaatacttggtcatcactctactctatagtccatacttccatatttctttatacgcataaatacatatattgtatatattaatatacaatatttaaatattagcagttgacaatggcgttaatcaaacaagtatctctggcatcagttgacgtataattcagaacgccttcaaaaaaaaaaaaaaaagaaaagaaaagaaagaaagaagctgttgagattttccattttgtcggaattaccttactaataggttagttttatattttttttccatttcttttgaggtgtttttattttttctttccttgataaatttaactgtccatgaagttgaactatatgcactccatgctaagatgggatatggcccaaataaatattattcacgttcttactttgtaatcatagcttagttacaagtcaaagttgattatacaagaggaaaagagagagaaagagagtaaggaaagactgttcaccacgtttctgctttctttcttctaagaactccacttgtgtacttcctgtttttccaatcaaccctttacatttaaaaagcagatgtttttattttgggtttgaaaggatatagaactagtcatagtctttggtattgaaggcctctattctttattctttattttgcttcttattagttttcaagatttgtttatttcttttggttagttcatattcttgggtctttgggattaattttataattttttttaattaagaaataacagttgttatctcattgtatgtacacagtcctttacagaactagctctcgtactgtgtttataagggagattgagtttttgggtctgaaagttttctgggatttgtgttgaccaactgtttgttcaaaacactggtttcacaacgttgcaaagtttgaagcttttcttcatagcttgatttggggaagctcatttcctttttctggtggcaaattctttccatattccaggaatttttatgtgtttgggttgttaacgaaaatgggtggaggtagaagaaaaaagcaacagtttagcagaatccatgcctttcattgtggaaaggcttcgtttaaagcagaggagcactcactgattggaggacctgggttctcaagggtagtccattgtaatgaccctgaaggctttgaagccagtcttctcaattatggaggcaactacgtaagaacaacaaaatacacattggcaactttcttacccagatcattgttcgaacaattcaggagggtggccaatatatatttcctcatttgtgcaatattgtcgtttacacaactttctccttactcacctgtgagtaatgtcgttcctcttgtcgttgtgatgggagttactatggggaaagagattcttgaagattggaggcgaaaacagcaggtacctaactactgttctgtttctagttgttgctcaactaatattacttaacagtgagaatacaaaattaattactttatagaaatttttgccgagatttggttgcatcttaagatttaataataattccttctgtctttctatcattctaatgctggctttttaatcttgtttcttggaaaaaaaatgttatcaggatatcgaggtgaacaaccgaaaagtgaaggtgcattatggtgatgggaatttcaaagataccaagtggaagaatttaaaagttggagatgtagtaaaggtggaaaaagataactttttccctgctgatctcatgttactctcatcaaactttgaggaagcaatttgttacgttgagacaaccaaccttgatggggagactaacttgaagctaaaacaagcaatggacgcaactgcaaatttccatgacgactctagcttccaaaactttaaggcagttgtcagatgtgaagaccctaatgccaatttgtattcttttgttggtaatttggatattgaaggacagcagctccctctttctcctcagcagcttctgctcagggactccaagctaaagaacacagaatttatttatggggtagtaatctttactggtcaggatacaaaggttatgcaaaattccacaccaccaccttctaagagaagcaaaattgaaaaaaggatggataaggttgtgtatttcttatttcttgtcttggtggtgatgtcattcattggggcgattttctttggcgttgcaactgaggaggaccttgataatggaagaatgaaaagatggtacctaagaccagatgacaccacagtatactatgatccaaatagggcaccagttgcagcaattttgaacttcttgacagccctcatgctgtacagttatttgattcccatttccttatacgtgtcgattgaaatagtcaaagttcttcagagcatattcattaaccaggatctccatatgtactatgaggaaacagaccagccagcaagagcccggacctcaaatttgaatgaagaacttggccaggttgacactatcctttctgataagacaggaacattaacttgcaattcaatggaattcatcaagtgttccattgccgggattggttatgggcgtggaatcactgaagttgagagagccatggctaagagaatgggatcaccattggtttcaaatgagattgaagaagaaggccacattgaagatctcacaaaatcaaagccaaccattaaaggctttaatttcgtggatgaaagaatcatgaatggtaaatgggttaatgaacctcgtgcagatgtaatccagcagtttttacggtctttggctatatgccatacagcattacctgaagttgatgaagtcacaggaacaacctcatatgaagctgaatcgcctgacgaggcagcatttgtgattgcagcaagagaacttggatttaaattttatgaaagatcccatacaggcatttcagtgcaagagctagatcccttctctggcaggaaagttaaaaggtgaggttcttgcaacataacatattcaatgctcaaaaaactgagataataagtatcttctggtatatgcaatcttaattacatgatgtgatttttttaagttaaatcttatttttgttctactttttcagagattataagcttttgaacatcctggagtttagtagctcaagaaagcggatgtcggtggttgtaagaactgaagagggaaagatacttttgctttgtaaaggtgctgacaggtttgtaagctcaatccctactattgtatagcaatctaagagtttacggattaagtaatggagattttaacattgttttgtacaagcagtgtcatgtttgaaagacttgcaaaggatggtagacagtttgaggagaagactagaaggcatatcgatgagtatgctgatgcaggactgaggacattggttcttgccttccgtgaagtttctgaagaagaatacaatgaattcagcaaggcattcaatgaggctaagaccatagtgagtgcagatcgggaagatttggtagaggaggtggctggaaaatttgagacagaattaattcttctgggtgctactgctgttgaagacaaattacaaaatggggtatgtc

SEQ ID NO: 20710 - DNA, 4004 bp, Cannabis sativa
acccgaacccgagtccagggttgaggtatgaggatgggtgttagggccagatcgggggttggggtcggggtcgagtttatgataaagatagtataattttaaacaacttattaatataagttaatatcaaatataatcttgtattaaataatactaatacaatactatttactgagtttttcaaaaattgatataaaatattataaaacttaaagaaaataaataaaatatagagattgaaacgatgatttttacgtggttcaagtattaacaaactctagactatgagttaatattatttgactggaaaagcattatttatgaaccccatttttagtattagactagtattcttgcactatttatgaaccccatttttagtattagcttgtaagaaaatgaattactaactctttgcatgaatggattttgttatatttataggctagggtttccattaatgggttaaatacaagtaatatattgatattgagccaattttatgaggcacagctcgtaaagcaatgattatttgcttgacggtaggtgaaaaatgtgtgtcatttttgcgtgtaataaatgttatataatgatttcttgacaatcaccatatttttcttttatggaatgcttgatttttggagttaactttagaaataaactcctaatgtggtaggattcagtattaaatgatcacagaatcaaccttgacatttagaggccgattaattttctatttggaagcattgcttaaataagtttggatgattgcttcgctggactcttcttatcatctggacgagatgccttaccaaaaccttgatgactgtgaattgggtctttattaattgatcttggatcttaaaagtacatgcgttcctttttcgaaaacaaggataacaaatacaattcaacacaatactatccagtacaatacaatatagtttaccaaactagatctaatttgttccacattacgctctagacagataacacagaaaagtaaaacacaaaagtattaggatccacatatatcccaatctcatcaccaactctgagctttctcctaaccacaaaatgactcaaccaaccaagcttaaacccaaaaacattgccagacttaactttcctcaaggacaattcatgatgagttagagtgtctaagtccaccatcttgatcttcacatctcctccttccttagctttattaactttgtcattgctaatgttacaaaaaatatattctgcttctattcttgtgaacttgaacattcggtgtagcgccacatcattctcccctaagacttttttgatcttccattgatatttatcattttgagattgagtttcagtcatttgtgcatttttacttagctgtgtgtcacacaagaactaagtaataattaatgaaaattgttttggttatatgagcatattcaatagagatacaaataagtgataaaaaactaaattatagctcaatttgcaaaaagtttactctttaatggtgtgccaaaaagtaatgaaaattacgcacaatataaatattgtattttgacacaatatttactattctaatctaactttacgaaagaaaaaaaatctatttattatttaaattcaattcaatgtatttatttctaaaaattgcatttatttataatttacaaatcaaaatgatatactaaaaatatatttataactcatatggataacacctaaatgatttataaaaaatatgggacatttaattttaatgtatttgaaatcatgtgcttagttttgtttgtgttgttatttttctaacaaaatagaaaaatctcacaatgataaaaatagaataaaaaaatttaagataccacttaaacttgttttgtgcattcttttataaatatatagatttaactataacactccgttataaagtatatatattattatttattattattattgttgttttgcttattaaattaataataaagttattaagtttcatagttttaataaaaacattaattagatattgaattttacataaacttttgtaattttgtactagagtataatgttaaaaattaatgcaaatttattataaaattattttttgtgtcaaatatagtaaaatttttacatagacaaaaaaagaacatttgtgaaggatttacttataggtttttaattaatgattagaaatataataatttcaaatttcaaatagagtttttggcaattaattgagataaattaatgatattttaaatttgttaacgattcaataatttggagggttttactactaaaatttgagcttagagagctaaatacaagtaaaataatagttaagatagtttagctgccgttgattaaaaaaataaatattgttctcttattggtctaccaaataaatattttataaactatttttttttttgaattttataaattattttaattcatttaaaaatagaaaattaatttaaaatattatataatataaactaaaataaaaaatgattaaataaaaagaaactcatcagtaaagataaatgaacataaaaatgaattatcaaatatgacagggtagaatgttttgaagaaaaaaaaactcagaaaatgcaaataggtatctaatttccaatattatgatacgatgatatggaataattacataagacactattttttgtaaaataattacatttttacgtttaaagaatgttttcttacatttttatgattttccaaaaaataacacgaaaacaacataaaatcaataagaaaactacataaaagtaaaatgaaaatacagataacaaaaaatcaacaataaattaacaagattacaacatttacaatataaaaagaccgtattgtctgtaaataaaatcaaaaaaatcgtacaaatatttaaaattccgtgaaaccgtatatttttgtaatttttttgttgtttttatatttttgtgaaataattcctattattaatgtgggagtgatttgtgaatttattatattacacatttattaatatagctatcaagctttaactacttagagttttgataattgaataaattaaaatgtgtaaataaagtttatcaaaacaaaaaaaaaaatgatattgactgtatttataaatttgtaattatatcatgaatgaaatgtcagaaacaataagaagataaaatatgagataatacctatgtatagttaaaaccgatgaagcaagatcttcattcttctgtgttgagtagctttgcaagtccaaataaatatctaccaatgaagcattttataaatctcaaaatctttgtaccaataagccaacaatatatacaattatctcaattaaaaaaaagaaaaaagaaagaaagaacaaaccagacctcaaattttcgataaacagacaaagaaagaagttgataatcttcttagataataaatgatctcaagattttaaataaatagtttgatgaaaatgcacatataaaacgctattaatatattaatatagtaacttattctctaactttgagcctttaattgtgattagaaaaaatatattgaccgtcgatttaattaatttatcaaagtaaaacatgtacattttatgtgtaaaacgatccaatggttttgttcccattggtagttaataatatcctaatataattgcgtaaaataggattggatagtttgaaatggtcattaggaccttggggttggggtaagttaatgaataggagagcatctataagatgatcaagaaaaaggatagaaatatatcttatcttacttattacataaatgtctatttaacatttttaatttgttatgttttaatagtttttgttgtattttaagagaattttgtgtgtgttttaaacaaaagaaaatgtgttaactttcacataaatatagttcttgcgtctctccacaaaatgcaatcattgacaacaaagatgttggaaaagttctcgttacaagagagaataggaggattg

SEQ ID NO: 20711 - DNA, 5195 bp, Cannabis sativa
aatatgcataaacaaacacggtgacgacaaataaaattggtaaacgcagaaactagaaaataagttttacagagaccacaatgttaggccttagatattaaatacaggggtaatatatgagtgagtaggaaagggtgtgaagaatttggtttaatttgtaattgctttaggagagaaccaagctcgaaatcctgggtattaataaaaggcatagcattattttgaggcctccgtcatggtgccgagattgccgctcttcaatggagaggacccgtatggctgggttcttcacatagaagaatatttcaagatttataggaccccagaaagtaagaaggtagctgtggctaaagcgtgtttggagtgtgttgcttggagatggtttcaagcagtggaagaacaagatccaatcgaaaattggttggaatttcgtatcacgttattcaactgctgcccgaaaatcgttaacgatcctttcgacaaattgatggctctctgatatgataattcggtgctggagttctagattcagttcattccggttgcagccaaattgttggacatccccgtaactttcctttgtgatatatttattgggaatctttcggcggggtgaaaaggtgcatgaatataagctaaggacactccctgatgtcaacgacaaggcgttcttggttgaaatacaactgaggtttcaacatcaaactagcacacaggaagaagagttgcaaaatgacagtgaaaacctattcatcttcgtgtttctccaaagaaaatggtggaaaagggatcacatcttggcttccaattggagatgttctttgaaaatgaagcagagaatatgccaagctattgatccattccagcgaccaagcttacaacgccagagacgaagatcaatcagtcggcactagagacgacgccgaaactgtagacgatgctgatgttgtataatgagaactcgagccaaatgttctcgtgtgaatttcatcaagcttggaatggtaatgcgtcgtggacaagaagcactcctccgccattgtcaatggtggctcactgaagttgtccatacaaagcataatgaccaattgagggtgtctaacttctcgtctcctattttgattcctagggttagttgtttcagggtgtttgaccggggacgaacgatgtgttacaagacttttgctaaatgggtcagctttgagctcttgccttctcatcctataggctaggaacgggtggttgaggggacacaatatgggcatttgaagcatgttcgtgtgggagttacgccagctctacactgggttttggatagagggagatgaccaaagtttcaggttccattgtttgttaggtactgctgccatggattggttttgctggatttccggagaaggttttgtataaggaactgagaaaattcattcataggctccttgcaagaggagggaagtatacaaaaggaagccatactcaattctatgctactgagtgcaaactctcaatctcaatttctgatgcttttgattttgtattacaaatcttcaacagcattcctcatattgtcacaaaggtggctcatcaaatgcatctactggcgtggttctttgacaatggatgggcataatctgcggcaattgaagcttgatgttcttcaccttgagggcaaggtgactttcaggcaggcgatattgttaggccatagatattaaataaaggggtataagggtaaatgtaatagagtattcgtagtatatatacgagtgagtgggaaaggggaagggggtgaagaatttggtttaatttgtaatggttttgggagagaactaggctctctgggtattaatgaaaggcattctgctatttttaaccaaacactattgctctttctctattttctgactaatcttgataaggaaatccctataacacaactcttgtttatttgataaatatgcaagcatcatgcattgttagaacgttttattaggtaaaaccaaaaacctcataataattaaaacaagtttaaaaagtttccaatatctaatagcaatatgatgcatacagaaactattaagtgaacaatttattttaagaatgtttctaatacaaaccttccagttcgaagcacaaattcctctgtttctttaataagatcttccgtaagcaagggcccttcctgtagataagggtgcaaaaaatctcaataataggagtgatcacaaacagtataattatttattttaacaaggctccctgcggaccctacaatatttagggaccaagaaccacaacaattactatgtaagtacccaagaagggcccaaacctcgaaccttgtgagagcaaacaatatgcttgattatttgatctactcctcttaagttcaagatgtagtatcatttgagtaaggtcatttgtcaaacctgagttataggagagtacactggttctccagtttccaacattgttagatctcccattgggcgatcagcgccgagtcggagaacaagttcctcaacatttattctagcatacaatatggaacttgcatgaacatctttgaacgtagctaactcttcttcatttatattgccttccttaaggacaaagtctaatgattgagaggcaatttctcgacgtcttcttcgtgatacgcagcaattaatcacttgcagctgctgaaacagaagacaagaattcaaatctggaatgccatctagagggatgccaggtatatattgtttgtcagaccaatgtcttctcagctgcatccatacaagagtaagaatttctcgttaaaccagaaacaaaatgttaagaaaaaatgaagtgtgcatgagaatatatattaacaaagatgttattgggcacttggcaggaaaatacccaaattcaaaattgaaggaattacttatcaaagttttccgtgttgctctaatatagcacatgataattctataaaaaatgatgagttatataaatttccagttatgtttcctaaaaaatgcaccaatatagagatatatacttcccaagaaagaaaaggctactgattgaataaatgcaccaatatagagaaatatacttcccaagaaagaaaaggctactgattgaataataagaagagctatattaagataagatttaagggttataatgtaacaaccttacagaatttacctaacttaaatttctaatgaatgacttacttcggcaataactctgcaccaaaataatgccatctttcgcagggtcctgaagctcccaataacttcagctacctttacaatgaagctttcaggaggtgcaccatgaatatctctaagaaaagatgtaactgtaattgcatccaagcaagatctaatattccgtttgagaaacaattcatctgtaaacattatgcaaatattaaaatataaattaaacatcacatgataagtcataagttagaccaaaatgctatatccaacaatatattcaatatgcctacctccactaaacagtgactcgattaaagataaaaccttctcattgttacaaaactcagatgtaagattatcctctttttcacgaagtactaaagacttcactgctgagagactcagacctgatctctcttgacaggtgaagaacctcctgatgaggccaagaaatctttcattgagttggacttctttcccatcctaaattatgataccacaatgacaggaaatagattagtatcatcatcgaaacactggaaattcaaattcatgcatcctgctattaaagcatcaggaatacaataattaacatgtcaattaaaatgaattcaactcccaagttgtgcacgaaatttacatgaaaatggttatcaaaatgtcaattaatttaaatagcttaacattgaactttctggaataaacttcaaatcgaacaaaggaagccagagtagagggtcttgattaagggctaactataaactcaaagatcatgaataaataagttttcttacacaacctgactacaaccggaatcttaaatgttaattgggaaaaacaaaagaaaaacttactcaacagcagtagccaattgttttattgtagagactgaaggaataagcccaaggtttgcagcacttaatccttctgctgagggagttgtttccacaacctaaagatatcagatttcatttctaaatgaaattgaaaaccttattataaaagcaactggacagtacggtctattacttcaaactacatttctagcagtgatagacaatgaaacaatcaatcatctaaaccgacatgtgtagaacattattttctaatgtactacatttctaacgtataaaagagcacacagtcatacaatattttctagtcacattaatcatgcaaattcgctaaacgatgaatcattggtaccttgtgcaaagttttaacttctaaatataattttaactcagttaaacatcagtgttctcacataaattagaaccgacatgtgtagaacattattttcattctaaattagagtatgctaataatcttttttataaaatttgtcatctaatactatgagataaccttttatagagaacttatacaaaaactcaattgcaaatcaaaatatagaattggctgacatctctcacctttaaatcgacaccatttttcatattaagcatgtacaaattctcatcatagaaaggaatcatggttgcattttcaggtttatcagtatcttcgactcctttccttccaattctaatgtttctaaacttgtcctgccaatcctgctttgtcttaatgggctctggcctccgcttcaactgtttgaattcataaaaattaagaactaaactagtcaaattaatcacagataaaatgcaggggggaaaacagtgaaacactttaatacgttgagttgtaatgtaccaacgcattgagcatatatgtatcatatgatatttgcccattctattatttcttttagccttctaaataatcaatcttttcgttttccagtttgttttaatccataaaaggagaaaaaataaaacacagaaaaacaagtgtcgtgtcattttaatcgaacattttcgaatttcaaaaaaattagcaaattaatagcactaccatgcatacatacttttatagagagagagagagagagcgagagagagagagagagatttatatatatag

SEQ ID NO: 20712 - DNA, 1981 bp, Cannabis sativa
agggaaaaagaagatcaagaataatacccttgtctatttgttcttcgccaacaccccatcgcttcattgcaagtacactagttaaagtagataaaagagcatctttcataagcaaaggatgacgatgaggaagaccccatgaaccgtcagagtgctgattctctagtaaccaatttacacattgaggaaagaaagggtgctgcccagaatttgaagggatcattgccacccaggcagtgtcatatgacgagacagagagttcaactttattgaacatcttctttattctctctttggtctcctcaaacttctgctaaaaatcaaattcataatgttcaacatcttcttcatacaaatatgactataggatattaaaaacgtgaaggttatcgtaccaaaacagctatgttgcttttacttgttccatttagtcttggtatgggagaagctgttgataaaaaatcctcagtgaagacaagattgaataattcaaacagattgtgtccaacatgtgaatgtaaagaatccaataatccaattaagctctagctcagtgtgtttttgacttttgcagggcagagtgaaaaaaaagagctatacctgatgaggaagaagaagaggagcacctaatgttggaatgcaatgaatgagacatgattgttgtctcagaatgattgagtgttgcagtcactataaaaataagtgaaaataattaaagcaattggctatttagagtttatcaatctgcagaatactctccctcgagaaatgaaaatcaaacaccagttccagttcacagcataaacaaataaatgaatcagatcttcctgtgacactcaataatttaccgtaagagtcatcaaaaacagggagcacctgaaaacacgtaaaagagttttgtgggtctttgagtactaccaaccagtgtacccagtaattcacatatttatgcgaaacagcaaggactgtctctaacaaaaggccaatcatattcataactatcccagaaagcaaacttctgattgtgacattttctcgaacagcgccaaatacattcgtgaaacttaaatctaaggaatatatcaagcacctaatagattcaaatagtataaaggaaaagggggttcgatctttagagttatttatctaatatgaaggagtgaaaatcgagaaaaagaaaataactggatttttgagacttaccaccttacgagtcaaaggaacagcaagcaaccctctgttgcggtatgctcttttaacctacttctcactacaaaggatcttgacaataaaattttcacactatagtattacggttacaaatgaatcacaacacatatttgatatatgcgcatatgcaatgcatggtttgtattttgaaattgaaataaagatagccgtttcaaaacaaaattcatgatagttcatacagaacagattgttatctatatggaaacatttatcaatcaagaagccgatgacaaaaatgtacatgatggtctgcgtgcgtattttaaccccgtgtgtgacaaggacaagcaaacagacatatattctatagtctataataatgagaatttgtggtggagtacgcccatgtttggcccacctcacatgcttaactatacacctgaatgctatttttgtttaaggatgtcgttatctttagtcttcatattttttccttttttgggaaattttatttttaagagtaaatattattttttaccacgtgttttgcaaagattattaattagattctttattttgttaaataaccaaatagacctgatattttcaaaaatagtaaaaataggacattgagctcaatttttaataattttatttttttttaatataacctttctaacacgaacagatgcagaagatgtaataagttttactataaaatctctaaatctttttattattaagttttattttgacaaaaaatcagttcaagatcttatttgtacaattt

SEQ ID NO: 20713 - DNA, 2965 bp, Cannabis sativa
  modified_base (432)..(442): a, c, t, g, unknown or other
catcacatagagctaatgaattagattagaagattcaataaacattaacattaatgatgagatctcctattctatatagttaattatttctcatctctataaaattgctttaactttcatggaagtcttcaactttatctaatcatttcaacagtgttgttatatatttaatgtagtgtcataaatttatagtgccttgtgcatatttttttttatatattatatcaatagtgattaatgaaaattattttacatacaaaaacaaaaacaaacatcctctttattttttatttgtttatattttatatgtataatataaatatatattaaacagttgggctgtttgttatcggttacgtgaattaaattcttaaaattttagaaaataaaacatgaatatatccatccagaaataataataataataataannnnnnnnnnnataataataataataataactagaccgaatatattgccacctcaaaactttatgtgaccatttaagttttgtttatgaacataaccaactactccaactcatacattgaggttatattaattattggattagagaatttattgatgaaatgaaactatatatataaatccaacatgtattatagacctaattaacaatacgatttataaactttgtcactaagtaatttatagtataatttaatttgttaattttgataaaatataaaatctatataattaagagaagaggtttgattaattagtatatattaattatacagaactaaagactgacacaacatttatattctcaatgtcaagtagctatagttatcaaaataaaaaagaaggagaagaagaagaaagaaagaagaaaactcaaaaattgatgttgttatatataattatgtggtagacaatccacattgttttatgtatttaagaaaataaataataatattatattttttaaattaggagaaagggctataagatattattttattattaagcattaggagctttcgtattagtgcttttattacgttattgacaaaaagaaggtcatgccagcatatgattgtctctgaattattaaatataataatgcaagtagaccacgttatattatataccaaattaattaaaatcattattttaattaatgtcataggaaacatacttacgaggaatctaggcttggttattatttgattcttcaacatgtgttctctcatgctccccaatctcaatattatatatatcattgatattacttaaaattaaaacatatttattctctaataatcatatcgtgccaattaagcaacaaaagtattactttatattcaaaagatttgaatggttgttgtatttattaatttatatatatttcaattttttttttaaaaaaaaagacagtaaattttggtaacttaaaattatgtaaatagactagtttagaatgtaatttatttttaaatgataggttaaaaaataaaaatagttaccaaaggattaaaatattcaaattgtacgtacatatagtttttgagtacaaacatatattaataattagttagttatgaattctattataagtagaccttaaaattttgtcaattatatttgatttatcttatatagcattattgagcttgggtaaataaagctcatatacattaatatttggttgagggtagtggttaggatttaaaataagtttttaatcatttgaagtaaatgtcatgattggaaatttatttattaattttattttcttgtgctaagtatgattgattgatgctaataacaatctttaaactaatcatgctttatcgtcgcacccaaagaaagatttttcaaatgattaaataatgaatgatatatatatgtttaattaaacaatcttctttttctcattcccaaaatatataataataatccattaacagaacatactttcccaacaaaaccctcaaaattataatcacttttataattccaaaagtacccttgctttcccccacgtggcccaccacctgagagtttttaagcatgggcaaacatgtcaaaccagatctttcgccgtacgtgcaacgcacgtgcaaggcctaactcgaaacatcgattaacggaaataccgaattaagcaacgattcgcccaactggttaatcacatggttaccactttaacccagctaagccggtcacgtgcgacgatgccagtgggacccacccaaccccactagaagcgagctggctgtcacgtgcacgtgcggcaaatctctcgatccaacggttccaaattgttttactattttatctacggctaggtgtcgttcgtacaccttcgtggagagagaggaggggaaatgattttgttttagaggctgtgtggatttgaccgttgactaagaatccagcaaagacaaggtaagtttgacccaaaagtacacgtgcgggtggccaacgtacacgtgtgctttgctggccgtcggcacttggccccagaaggaatagtgcgccacgtaggatccacatgagtggtaataatagattatagagactcaacttgattgatgagaagccctagagcccacacttctcggtgtctcgccattacctattttagtttacttaattaaccctctcactacttttgcttaataaattttcatataaaaaaaataaaaataaaatattattaagaaaactctaatttttctaattaataaaaagttaatttatgaattatattattattgttatgatggcaggttgaaggggtacgtaaagattacaacgaaataaaattataagttaacagtttgattgggtttgaatttatgaaaattttactttgtgaaaaaacattcttgccttacaattgatcttcttcttcttcatttttttttttcaattcatgtggtgggtttgttagacaatttatatgtataaactgaaatatatatgtttatgt

SEQ ID NO: 20714 - DNA, 2857 bp, Cannabis sativa
tatatgagagtaaaaaaaagtaaagttttttttccaaaataaagctatatgagaaaaaataccttaatattaatatttaatattgttcgaatcaaactcaaagtgttttaagttagttcaagtcctcattcaacacctcaattttgttgtatccgccagatctccaaaccctagttcccatgtcgaccagaaagaagcaatcagagggtattgctatgctctccatgtacaacgacgaggatgaggatgatgagatggaggatgtcgaggaagatgaaagcaatcaagaacaacaacgagaatcgcttcaagacaacgattataaagacccaagagatgttgctgaagatgcttttatggtggataatgatagaacagtggctggtgattctggtaatgatgataatacaccgcaagatgttaatgatgagaattatactcccagtaaaaatcagtttcgtccctccacaccacagcaagctcaagtttcgtttacctcgcccccgccaccacatcagcaccagccgcataatagaaggggaaagcttgcgattgtcgattacggtcacgatgaagttgcaatgtctccagaagctgaggtattttctttttcttgtcacttttatgtaatgatgggaaatttgatgggttgcctataaattttgtaataatgaacgtttttttccccatttttgtttgggattttggttgggtcaaaactagggacatttgtgcatttaaggtcagttaggcaaaggagttggtttgttttgtttattaattatctgaaacatttcgcagtatttatcatatacttatgcttttgcaattggcattcactcagtgggcaatttgaatcaattggtgtggatacttacatgagttttctacgttaggatgataatcgtgatttgtagtagcttatgatccactgccttatgttgaagtgggtgaatgtgattgagggatatcgaaacccgtgtaagtttgtgagctaaatatttattttttgtcaggagtttgtgagctaaatatgaatctataaatgtggaataaactaccaaagggatcaaaaacgtagtatttccctaagaaactcaatgcacatgaatctgtaagtttgtgaactaaatatttattttttgtcaggagtttgtgagctaaatatgaagctataaatgtggaataaactactaaagggatcaaaaacatagtatttccctaagaaactcaatgcacatgcacttgtttcactctctctttggcacttcgaagctcactctctattgatggtgtaaactgaagggaattagatgagtgagcttggggaccaattgagctatttatagcagaggctcttcttttaagccttggtgcacattgctgcctttgtttggtctgttgcatgactgagcaacatagatgcatggccaaacttacaaagtttctgctgctggttgttgaatgctgttagtgttatacttattttgattttggtgctgattgattgcaggagggggaaatagaagtaagtgatcgtgtcatgtttggtacaaatatacaatctgtaaatggtacgaattttctatcacttagtgtgggttatgtggtttgatatctgttttttattcacattgttgcctttctttccttatgcattttttctgcaatttgttacttgtgagggttatttgttctggtccttttgctgaggttgtatttataattcacatgtttctatgccactattcaagtttggaatctttatcatgtcacatgttgtgcttggtagttatatctggctgagcttgtaataatattgagaatgagttaggtttccttagaagcaatgggtcttagttttttttgactggaaaatattaactttattaaccaacaaattcagtttccaaacaaggtaacaaatcagtaggaacagactccatactgaaggtacgatcaggatacaaaatagctgacctaacaaagctatgggccactacattagcagatcgtttaataagctacaaactaaaaaagattttataaagtaagctcatgaacattatgtagtagtagggattccatcagtggtggctttaggagaagcatttccttttatatggtttttatgtacagaaagtattatatttagttcactatatatgtgaaaaatgttagatatctgcttgattttatttaccctcctaatttgctttcatgctcttgtaattcttctataaaatatatcctgatgagggcatatctcttcttcttgtttctgtgatactataaggtgcttgcaaaaaattaagatcgtaagggaattataaaaaaaaacatagaaagatgaaggcaatatgaaattctttgtatgtgtgtatgtattttcttttggttgttaactcatttttaaagaataaaatgatattttctattacagctaatgttgtggttgtgggctattccacatttatcttcaatatgtgagtctaatcagctaaaattgtttgttgtaggtgatttccatgatagaacacctcctggaacagttcaaattccaacacctagtaatcaagcaactcctcaattatcagatccatcacaatctgataaaatgaattatgcaatgcatgattcagaagttggaggtgctacggagtctatggtagaagaacagaaggaggttgatccattagataagttccttccaccaccaccaaaagaaaaatgctcagaggagttgcaggtaaagttccttcttccagagcttttggttcctaaattgcacttattgaatttaagttttctttcattttctctaagagttcatatctatgtttttttttggtgttgt

SEQ ID NO: 20715 - DNA, 20868 bp, Cannabis sativa
gtaggaattaattccgtttcaatcattggtcattggctggttaacacaattacttcaggtactacatatacttacttcactcacttcccaaacttgcataattttctgattttgctttgtgatacaatctcatttcgatgctatttgtactgttcttacttacatatatttttattttatatttataagtttgggatgattatatatgtactatatgtattggtgttgatgatgaagtgattctatagctaagctaggcaatttgaattggaattgttttaactacaaatagtgacaattaagaacatccctaagggcaattctttattttttttagctaaaatattaaaatatagagttattcttcataatgttactccaatttttccaaaatttcttcagacctaatcacctaagtcgaaaatcgattaaaaacgaatcagacccagtttcgttttctgatcgaggagtgctttcttcgctttcagttcttttcttttggatcccttgcacgtactttcatcggcgagactggaatttggatttttatgttgtttaattttgcagattttcacacaaattttatgttttgggttttggatcccttttatttgactatgatttttgttttttgtccttacagaacaatttcttatacactgaataaccttgttttggaatcgtgattatatcgaagaagacggaaactccccactcgcagacgatcgaaccctaagcgtgtctatataatcaaactctttaagtccacatggccgacgatgattacaacgaagtcgatatggggttatttctctctttctttcttcaaatatataacatcatctgatctgagaacaaactaattcaacgaatcgaatcttttagagctattttaacttgatttatttagacctagtttcactacaaaccctaaacacaggctttgaatttaatgatcgaaactttatatttggttggggtgcggattagaaagtttgaatctcacaactacaagttcagtctttgatagtagttatgtaaatcttgaactatgctatgatgttttgcatttatcatgtgtgtgttgtgttcattcagaaaaaagttcactaatttcagtcacatatgcaataattttgtgccaaaaggtctttagcttagaccagaatgaatattggtacttgagcatttgacaaaagtagtgatttaatgttaaacaaactctctctctctctctctgtattcaattattttcattacagttacagaattttatgattttgatttatgcagttacgaggatgagcccccagaacctgaaattgaagtaagaacttagtttttcttatatggttgtcttgttttttttttttcaaactagaagccattgtttgtattaatatggaggagtgtacaggaaggtgcagaggatgatgtagagaatgctactgatgaccttcctggggacgccattgaaactgaggaaaaagaagaaacagaagctgtcgaacgtcctcgtagaacttcgaaattcatgacgaagtatgaacgcgcaagaatcttgggcacgcgtgccttgcagatcaggtatgaattttatcttaaaacctaagtgttgctgttttttaagggtaattagttgatagtttaccgtgtttgttattttgttttgtgatcttcagcatgaatgcaccagtgatggttgagttggaaggtgaaacagatccacttgaggtaggactctgcaccatgtttgttgttttttctgaatatttaattattgacgggtaaattgcggtataagtatccaacccaatgtttatttttagaggcataagtactcaatgtttgtaaaattataattttcttctagtttcatcggtacatactcctttttgtatttattaaaagaacatttggaagtaactgatactatatgtttctgtctaaatccaatgacctagaatttgagccttatatgtgctctgtttaagacaataacagagtttgtactaacgaaattagaaaaaaaattatagtattacaaatatggggtacttatgccgctaaaaataaatattgattttatgccactaataaacttgaaattttgggtacttataacgctatttatccatttttgacctatataatctgcagttgcagtcatatgcattaaaaattaaaattctatcttttagattgctatgaaggagcttcggcagcggaagattcccttcaccattcgccgttacctgcctgatgggaggtgaggcctgcgacctacttttagtagacattgttggagtttcgactgcgtgcatgtctagtgcttttcgactgttcgggtttcaaaaataaactaacttgtttgttttatgactgcagttatgaggactggggtgttgatgaactgattgtggaggactcatggaagaggcaggttggtggtgattgaagctactcacttggtcatggagatctgtatcattaggaattttctgaaagtttttatatggatttgaacattttggtgcttagaatttatcttttgtacttgtcaaatctgataatgaatatgctaatgactagggaaaaattatatttaaacatcaaaaaaaaaaaaataaaaaaaaattgagccctccatcttctacacctaccgacaaaatctatacaagaataccataacaattagaaaacatccatattaatttcagtgtgattgaaaaaaaaaaaagtgaaatcgacgtcaaataaataatcatgacaaaataattgtaaaataattgtgaaacaacattaaaacaaatcaaacaaaagaaagaaaaatatgattaaaaaaaattaaaaaatattttgcacagactcaatattcaatgcatagttatatttgtaagtctaatcttaaaaaatcagaataaaaaaattactaaaacaacacaaaaacaaatgtaatgtaaaataataagcagacataactacttagaaaggcataaaagaaccacacaccttaaactttttttttttttagtgagctcgtcaaatgtattttttaggcgaaccaaaataaaaaaataaccacaaaataaccatagagaaggaagaagaaatgtaatttatagccttcatctttcacactcacggatagaaccatcacagcaccacgagaacacccagaaatcaatcattaattccagtgggtgtggtagttctatctgtgggtgtggaagatggaagctataaattatattttttcttacttctctatgattattttgtggttttttattttttttttatttttgttctcctataaatacatttaacgagctcattagaaaaaaataaaaattgaggtgtgtggttcttttatatttttctaagtggttatatttgcttattgttttacatttatttttgtgttgttttagtagttttttaattccgattttctaagactgggcttgcaaatataaccgttattgcatctggtattgaggctgtgcagaagattgttagtttttaatcattttttccttttcttttgtttaatttgttttagtgttgttttacagttgttttgccttgattatttatttgacgtcgatttcactgttttttctcaatctcaccggaattaatggttgttttccgattgttctggtgctcctgtggtggttctatctgtgagtgtgacagatggaggcctcattttttttttttttggtgtttacagtataaaagaaaagaaaaaataggccaggacagtataaaagttatttatgccgtgtagcagtatttttgtaaagattgaaccaaaagtcagtatttttgtaagtttccttaaaaaaaactaacagtgtgcttatttggcaattaaaaaaatatttttataatatttttaattaatcaattcactaaatatcgaattttagatattttaatttaaatttaacacaaaattatcaactgttatagtattattgagaaaaatgttgtggtgcctaataccctcttcgatatcatatcactattaatataattaagtatcaagttaacttaagataattattaaagaatattactaattataaagtatcacctctaagtagtgttagacaccactaatatttaatagtaatgcttattattaagtggtacttaacactacttaaaagtaataccttacgattaattagtaatattctttaaaaattatagtgatctaaaggttgaattttgttctgacctactttattaaggatgtgcttgctgacctacttataattaaataaatatgtatatttataaaataaaataataataataaaaaaacttgtgtaatcattattctacactgtacatacacgaccgatttttcaaatttatattacacgcacgcatagctactaagtcatattttcatgataacgtttgtggtaattggataaatatgtgttattgaaattactctgctttctatttatgaatgaatgaatcatattcatataaacaagtcttacagccaaagccaaattcatgtcaagacaaaattgattgtgttacagtcaaattaatgaactctttttttctcatgtaaacatggacttacatgaaatactcttataacttatttttttttaattatatatacacacaccaaatatctatatcttgaaaagaatgaccaaagaattagtagaaaaataacaagatatcacttgaagttgaagctcccaacatggaattttgatagtgttgaactcatttactttcacataaaattggagttggcccatatgatagaagtggaggtacctcaactctgcatcataagcaaaaactaattaattagtaacttcaaaaggaagcaagaaataaaaatgcagcaattttgacgaaaacacaatgcaaaatttctcgactctcttgagtgttaaaaggggaaaaaagctaactattagcagcagagttagtttattatacataaaggttttcgtttaaagtactagaatatatggactattttggtggaaagacgattcctattcccattcctattcttgtattttcattctttaaaccaaatgtaccctaaaagtgaacatgtcaacttcgaaattacactataattctgttattgtggcattaacaggtgaagattttattctagagacagaaagaggccacagatttattcatttgattctaatttagttcgaaaacaaacaaaacttgcaatgaaacagatctgttttacctttgtctaactttgatcattccagtgccaagctgcattggtatacccatgattatgcattcacttacgccttcgatcatgtcttctcttccgtttactgaagcattgaacaagtgatctgatgttttctcaaacgaagcaagcatgagtacactctttcccattttttgaatcccgaacctagtgattccaaggacttcaccctgttttgacaagacattaataagcaaaatatcatgcattggtttactagttatattttctttaaaaagctagatagaatagcttgaaaaaacttgccctggaagtcatcacatctgctaaaagcatcatatgccgagtatctatgctcattccgtgacttttcattgtatactctatctcgtcgatgatacaggttcttgccgcttctattccaagtgtctgctgcacttcaatgatgtgattacttttggtgttaatcccatctactccttcggtgcccataacttgtaaaagacccgttctaaacaatgcaaaacagaaattagttcgctactagggtaaacttttggttgacaaacatattttcgatattggaattgagtactttagtcaacaacaatgagttgcctatttcactgagaaacaaaattttcattttagccaacgatccgactgattggtattaatgtatcgatctagacaggaaataatttgcttacgtatcacacactaggaagtgtgtaaacataaatacagcagttagaagaggtaatgcaaaagtgtataaactacaatgtgacttctctgccttaacaacaaaaaaaaaaggattgatcaaataattgaacaaccgggatcagttcattttttaaataaacgatttgaatgattctaacaattgatggcagagttcattattgggacctttcaattcatacatagatgtggatctcggacctataattggggatattcccaaagctcaaagggaaaaaaaggagaagtgctgaagcacaaaaacaaactcacccctctaccaacaatttgtatttgctcgtctgcgtttttttatcatcttctttgctaatgacagcacgttctacagtttttattccctgcgatgattcaaatataaaactaagtaactctattctttcgtgtttcaacaaaacagaggtttagatgcgacacctttattataatattcggaagcatcgtcttaagatggtggagatgaaaatgaagtttgcttctatctgcctcataaggagtgatttctaatttcctaggatctggaaccctaatatgctgcaaaactcaagatatgatattaagtgttaaccgaaacaataagaagatttttcaacaaaaatattattgagtgattttcacctcttgcttcaatttgattcttggagttcgtaatattgaatcttgaactaagtaagcatctatagacaacattgcatccttaatcatttccatgtcaagtgtgaccgttacagatgctgatcttgaagttatcacaacctttatactctttgcaatctgcagagtaagagaaaaatagtttaaaacatacttctgtagaaaacatttgaatatagaagttagaaatatttcaataacagagaagccttttaaaaaaatcgaaattctggaattttcggttaactgatgacttctcagatttgtatccaggaaatgaaagaaataataataacaaatctaccaatttaagagctttactgtggaactgaaaagaagctatgataaatgtcaaatagcaaaaataattatgcaataattttgtcaatacttttgaaaattatataggaaatgttacatacctggcccaaactaattttctccatccgacctcttactatccttgctgcatttacattatcgtcacactctagtgctgcagtgataatgggagtactaatccttttggcaccgttaatgatttctttgatacgaggaactccaagcgtaacatctaaagaaagagttaaagaacacatgctgaaacaacccagttagagaacagaatatgtcctctcaaatgatcaatgcagtttattgtagctttagaccttgcagacaaaaaaaaaagaacatttgaattttctgtttattaatctatatttaattttgaattcgaagtactaataaataaatttttaaattttaaaagggtacaaatctagtgatcaaaagtggcattctaaatgttaaggataataatgttcttttatactggctaaaaatatagaaagtacaagttgaataataagccagactataagttagaatgtattcatgccaaggaattctaaatacttgatcgagcattttaagccaccgaagctagcttagtagtgagagagggatggcttcatagtgttaaccatataaaaaagaattaattatttcgcttataaaagaaaagggtttgaaaaactaaaggatactcatgctagcaaccccagcaaagtgaaaagttttcagtgtcatctgagtcccgggttctccaatactttgagctccaattgctccaattgcagttccagcttcaatctttttcgaatgatagcgggagatacaagtatccaaaaacacctaaatgcatataaatgtattattttcctggtacaacaaactctcaaaaggaaaaatactaatatagttacaaaagctacaaaacaaagattattctaaataatgaaaataattaaacaaactggaagaaaaaaaaggagcataaaataatccaaacgattacaagaaaggggcgaatgagaggtaaaaggggacaaatctctagtagaaaacttcagaaaatatgattcgatacctctaactgtttagcagtaactccagatatatgtttgacaatatattctgcagtggttgaattttccttcccagaatgatcttctttcgattcaaaattttcttgtgttctattcaatgcttttacatattcatctagaaaagactgcagagaagttttgaaagcggctgagcaacctccctctggtgtcaagtcatgttttgaaagcctggtttcaactatttcagaaactttttcaggagacagcttttcatttcctctagcaggagaagtggcctgtgtaaaacaacattatacaagtttatcagataatagtatcaaacaagaatataatatatatggacaagactatagtaaggagaccacttttgtccctaccgatagggaaatctaagattttggcatttcaagaaattataattctattttttgggatgatttatattaaagttatagtagtcgttctatatgtttttgaaaaattcagaataatttacaatgtcgaaaacagagtttaaagtgcaactgaatgtttgaaccttgttttcaacactataaattattctaaatttttcgagaacaggtgaatgtctactataattacagcgtacattgtcatataagaaaattttagttttaatttctctaaacgctaaaaacagagatgactctattgataggggcaaatgtgacgtccctacgataaaatttcccaaatcacaaaactaattaaacaggaataacgatcaattacagcatttcaaacctttgctttgaaaaacaaccgttcaaaatttaaaggcgctccatcttttccttccatatgtgcaggatccatgccatcatccccataacagaactgaactatacctccacttgcattccttacagtgttatcataatggataaataagtcctccaaagcttttatcaatctacgagacatgtatccagtgtcagctgttttgacctgcatcgattaaaaaatataaaactacagataagggaccattgctggttgaagaagttaataacagactatattaaaacagaatttcctttattaaaataaactagaacaccgaacaagtgtaacttaaatatcaattaacatagccaaaaacaaatcctatgttgaaatagaaattgtaagatgacctcaacctgcaagtgtgttactgggttcctgacagacaaaggccaatgagaaagagcacaaaagctgtctataatgtgacaaccatagctgtctataaactgtcttttaatatccaaaataactattatgcaactctttggggacgagccctcaatgatcaactgagcgagccataagggttgctaacctagtagcagtaattactgctttttcaaaagcaatgacccctttaccaacaaataaaatacgttattaattttctgatgcgagtcctcatgctggtaatcatagtttaataagttattattaaatagtaagttttggcaattaaaagttgcagtagactggaacagtaaatttgttttcaaacatttgaaatgaggataacattgaatttaaataaaaatatttaaagtatagactacatactgctgtatcaacaagaccttctcgccctcccatagtgtggaaaaaaaactctgtagctgataagccatcatagaaggaatggccaacaaagcctttagcctgcaaaataatttgataaaattagaaaccatagcttatgtattaaagttcattcttataagactattccaaaataaatacctaattgtttgtctttgctttcataatatgattgagtcagagggttcaggaatattaaatagaaggttactccaatcatttaagcttacacttcattcaatcacaattgacaaatcaaatgtgagattacaataagatatattttagaaagcatagcttggatgatacgggctttttcagaaaattcatctgatccaaaaaggtttcactgctaattaataatagttggctccaatcattttttttttttttatgttttatttacaattttacgattgaaattttttatttacaaaaacatacttttctcagcaacaagttaaaaaacaaccagaaatcaacctcacaacaattataaataaactataaaacaaccaaaaacaaccgcatgccaacaactataaataaactataaacaaaccaaaaaaacggtttattattttaattgagaagtatttttgtaaataaaaaagttcaaagcgtaaaaataacattttttccgtgtggatgtattttagtaattcttttcaggccatcgaagagtgcagaacaaaatgatacgggttttttcagagaattcatctgatccaaaaaggtttcactgctaataaataatagtaggctccaaccatagatacatcaaacacatttctatgggggataaaaagaactaaaattgtaagatataaagagtgaaacttactgcaggggttttatcttttctggggaagtgaggtagacttcgatctatgaatccattaggtgcacgtttaccaccaaccgattgctgaccaacacacgcaaccatctgactgatattaataggagatcctttggaaccacactgagacatgatcaaaggactatttctccaatgaagctctttcatgcacagctattcaggaaaaatgggggaaaaatcagttcttctatagagcaaatagaaagtaaaacagaatatagaaccaattgagcaggagcaaagccggtatgctctaacttgaagcaatgttatgtaagtgaaatgataataagataggtctcactttaatgaacaaatagtttattactaaattaagatcaaacattcacacttgataaaacaaataatacacacgagaataaagaaccaataacatgtgcatcaagggcatagttatactaagagcatgaaagatttctaccttcccagttgcatctcgaataccatttaatatctgacttatccttgcctccagtgattgagcagcatcacaaccaggttcaggtggtaaattcccctcattaaacaactttattttctcatcacatgtgttagcgccttcattgattatctgttctttctgagcatgcaaatttttactcggttggacatcatcaatcccaattgaaaatccatgattaccaatccatcgagcactgcatagcacatattacaattaagtcttgctaaccattgtagcatcgataaaagggttctgcttctatacacaagtgatggtgattgaatcaaccacctaatgcgaaacacattctagactagtgtttgtatgttattctcacattacacatcatattcaagaaatggaaaaggaaatataggaatacatataccacagccagtcaaccattattctgaaagaggaataaaaaaggcataagtgtggccatggaaacagggcaaccgacaaaatatccattagtatgataagtgtccgtgcacaaaaaccaagatgggtaagaacaccatcttgtcactatgagcacttgaaagtggctaagccaccatttgctaaaccgcattgggacaaattttatcttgcaaagagtttagtaagaatacaaagttaaacaaactgggtagaaatatacctcaatttagctaggcgattcatgcaagcagcagcagcatgagctttgtagtctctcaaaagaactgagtaaagtccatccttgttaccatttcctagtgtgacatcatggatacaagatataacattattgtggacagagaaagctaaatcaaaagcaaaagcaaaagcggaaagtcaaatagaactgttgcaagaaatgacaattgaactaaacatttaaacatcagaaaggcaccatagaaagagagttattttgcccttttctcgaagaaaaacaagattaaggaaacttttttttttgcgtggtaggaaactttgcacgtgaaataaatattaagttataacttataaatatattttccttttataggcatgcttcacggttcacgcagcaaatcacgaagaccattaagcagaacaaagtaaaagagcttcattccccctaacaaatcacaaagatgaacacattaaaaagtaaagctagaaaagaaattaaaagacttgcccaaagttgctttcccaagttgcccagatatcagttcactattatagaaacagacaaacccatcacttggacacattgcttcaatttctcttccatttacttgtagtttggtgtagtttttctctcggacagtaagattcaaatagactctcacatttgcattgggtcgcactaggacactaaataattgttttccagtccaaagctctactggctgtaaaacaaataaattgattctacattaataataaatatcttagctgaatattagaaaaaacctttaatggtaaataatttacaaaatgcatcattttccccattatcagaaaaaaccgtgttagattgataaacattctcccaataaaataacaataaatagcttccaaattgcatttgaaagtaaacctttagaactcagaagacagcatcaaccaaatggtcaaatgacttatataaatcagcaaaaaacaccatagtatctcctttaaatgtgtgaaatgataataaaaacaaatcttaagttaaacaacaattaggattgaaagtcgtagtggagtcaaaggtgaaagctactaatgagaaaatcaaatacaaataagattacaaaacatcactttaaaacagttttgtacagctttgagccgagtgttatgctcaaatagttaatgtgataactgattatataattatgatattaaacacagtttaagtatccttagatgatagaatctttaccatttagaatgaacaagggaaaatgttcgccggtggaataatttaaaacggcataattgaaaggttcacctacacatctcaccttaataacagcaggtgttggcaaatcaatatgttccatgccatcccccatgtatgaacacatcaaacaaaaagctgcacggtcataaaatgtatcctttcgagtaaccaaaaacgatgttgttagaaaatcttgggtagatgcaaccaaaatctctccatttttcggggtacatagattgttctgcacctgtgaggacaatagaatattagagtcaagaggcatgtgacatgagaaattatacaagaaagaaagaaaatttggcaatacaatcatgaaaaaggtgccacgtttgcaatattgtaattaatagtgtacagataaaagaacatgtactttagcataaaatttggcaatacaatcatgaaaaggtgccacgtttgcaatattgtaattaatagtgtacacataaaagaacaagtactttagcatataatatgtgaaaatattagataactcggccataaaatataacagcatgatataaacacaaaataacgaaactgcaagcaaagaaaaaattacccccatcaacaaaattgcctctgttcgagcttcctctgtttgtgggacatgcatattcatttcatcaccatcaaaatcagcattgtatggattgcaaacagactcattaaacctcaatgttctccaaggcataatccttgcctgcatgcacaaatgagctcacttattctagtgtttgcaaatcggcactcagattgatagatataaataaatgcagttctgtttcttaagagctaatctcacagcatcatattcaggttgtaagtggcccttaattaaaaaaaaaaaaaactagcccccatattctaatcaatctgttgcttaagctcacacatgtgtaaagagtataagcatcgaccgatcaattttcagccatggtacagtacttaacattgttagtatataatgatagagtggattgatgcctcttacctttttcgaaaatcaatatcttcaaatggcaggaaatcctgattgtctaagtggttagtgtgtgaagcttatgtttgaagataaattttccaagggttatattcagctcagttcactgtgttcaaccatcaatatagtttttcagaaaaaaaaatatatataagtaataattttttttcatcctgattaaaactatggactataagtttaaattgacttgatataaaaactatgccacaagaaatcaattcaaatgtgtcaataccctatgactcatgatagacattcgatgcaaactaggttgtctgttgaacagaacaatgtccccatcctctaagtgacgctcaactatatcaccatacttcaactcatctgccaaacgctttctggaaaccttgatagacctacagtacaaacaataaatcaaacgaaaaataaataaataattaatttatgtgtgctagcacatgctgtaagtaactatatatgagcccttgccatgtagaaccatcagcacgcctgagcatccttgcaccaggatatttatcagggccattactgacacattgcctcaacttctctatattatgatgggaaacacgttcagggtaagtcaaaatccgagccattcgtataggaatcgcaacctgaatatgtgcaatttagaacaagaaaatcaatagcagatgcaaaaagcagcacaaaattaagtttgtgtacaacttcaacttcctaacctcggtaatttttagattaggatcgggagatataacagttcgaccagtatattcaacacgttttccagataaattcccacgaaaacgtccctgcttccccttgagacgctgaatcaaaccagctagagtcttttgaggttgatacatggcagcaggaccagcacgaacatcactatttatatactgtgcaacttcaacttgaagaaggtcccaattttcctaaaccaacaatctttgcataagtaagatgcactccagaacaattgcaataactattatacatctaaatttgtcaaagcccacggtgatagcaaagacattagagtgatagtacactgttaataataaaaattattacaggtgttgaacagcatgtattgaatcataattcgttggaactttttatgaatgtcaactaagtatcgtatgtaaattggtcccagttaaagcaatactaaacaacaataaaaaattggatcatacagatactacaaataattaaacaaagtttgaataaatgagcaaaatagttgacaatcataattattagtagctcatacctggtgggcacagaaaaagaaaataacaagaaaaatgttgttcgaaatcataagaaaaactgaaatatatttcttttaataaaaattaaaaaaatttacatctaaaatgtagcacatataaatgagagcataaatgaatcacaccatgcttgagataaatattcaccattccatatatgttcagacaaatggtaaaactggcattttttataataggatttcagaccaaatatagataattgcagctgctaaaaatgaaaaccctatgaccccaaaatagttgatataatcaaaaacatttatacatcttcatactaaatcttacaggagaaatttaaagttttgtactgctatcacacaccagatatctagctgcggtacttggttctgatgtttcctttcgaatactagcactgacttgaataatttgtttcaacctctcagttaggtcattttcattgctgaaacaaaggaattatataaacatatatctatcaacaactgcatcaccatagaccataagacaaaacaaaataaaacccccataaagatgaaagcaatagcttgataattcggcaaatgaaagcaaagataacctctgcgatccatccataataacagatggtcgaatagctataggtggcacagcgatgtttgtcaagataagattctcgggtctaccagaaagataaagcaactcacagtcctgaaatattttaaaagagattgcatgtaagttctactgttagtaaaagttaagcaaggaaatgcatgacacacactttcttttttgcctttatttgaataaatcaaaggcaactttaaaataactaaagaagcaattcacagtcttgcaacaattgaagtaaacatttcccccaaattgctatgtattctcatacaagaaatctccatagtttgggcaacttcacacttcaaaacatttatcaccttcatctatgtagacctaagagtatacctcatcaagcatccttttaaaaaggtgtagaactgtggctggattaagaatatgactttggatattaatggatcccttggactcttttgtgtgtgcaattgcagatctgcactcttctaaaccgtcatttagttttgaacgatcatgaagaaggcccagtgtagacacaactttcttcacagatcctgcaatagatggcaaatttcagaagccactaccatacaattttctattcaaaataaataaacaaatcttacaggtatggaaaacaaaataaaaatctttaacatcgtctgaatatatgtatattgaacatctcaaaagctaaaatgaaagtaaagagcctcagtagtaagaaacacaaaagggagcaggtcattaagtctttttttttcttcgaaagtttagtataagtttcttcaacataaaaggacaaatattgtatgcctttgattgcattagaagttgaaaactcaatgagaggccagaaattctcactcttgcccaaacggaaaccatgtcaggtgacctctccttttaaaacctgttattcatttctgctcacgcaactcaagaagtgttatgatgttccttccaaaggaatgggtttctatctaaaaggttaacctattaagtggactaacctaattccttgcaaaacaattcttattattatgtattgccaatttgggacttttctaacaaactgttctttctttctattttttctgaatttatgattgtcattctttctagctatctcaaccttcggtctttcaattttcaatttccatactcaaaatttgagtttcaaacagatcaacaaatgcaatactaaacacctttttaagagtacataaggtctacttcaccagcagactgccacctgctagagctaaaatttccatgaaagaacaaagagaagcccttctttaacagtcaaataaggaatgaaaaccaaaaggctataaagttttaaattaaatattaaaaacttatggtttgattatttacatctaaattctggaatgaggtggacaaatggctcaaggtctgcacagaaatccatacaattttaaggtactttatagaatttttttaaggagaaattcaatctttgacgtttgacataaaacaaataaataaagggatcacccaagtcagcatatagcaggaatcaagtgtgtttattaaagtactaactaaggaacatcgagagagaaagaaagaatccaaaccattaagacttccacatttggggcactttgctgctctactgttacacttcttcactatctttttcatcaattcagtcttcttcaatggctctatcttagtacttctcatcttcttcaaaaagtctaagcgtaatttatcatccagaagaatacgagaacaagtctgtgaaagattcaaagcattagcgataacgagtcaaaaattaagcttagaccattttcaaaattttaaatatatatttacattttaatggggctctagtaaaaatcagtaaagtgaaacaaagcataacctcatcgtgactagttcactatgacaaaaatgagtaaactttcactcaagcaattataagttttagtagtgtgtgtaacatttatataaaattaaaaaaacatacaggctagtatttatttaaaacaaaaacattgtacaagatgaaataaaatatttgggataagggatatgagaaatgttacaggagatggatttgcaagtatgcctcacgatatctatgtattcaaaagacaatgtccaagttattggacttggacaactgatagacatcaagcaatacagagaaaaacagagggaccaagagggagctagctttcggtaccttacatatgcacttcaaaatgtccaatatggtgctcaaatatccaacattgtatacaggtagaggaagcttgaagtatccatagtggccaggacaatccgaaaagcgcccatggcatgttgcacattcagaaaacttatttgcagcgccctaaaagaaatattccaacaaacagagcatttagttacaataattaacacttttcaccataaaatataaatgaaaggagaataaagggtagattttgagagcgagaaataatcaatctatataagatatgtacttgaaataaaagagtgcaaaaaaagaactggtgacgaaataagaaacaaaaaaaaaacaagcagagattccatccccaagatcaacatgctgaaaaagtcagctgtattaaagtagactatcttgtcaaagattcaattgcctcacagcatttaaattatcacgaatcaaacacaagaaggagatctctgcactgaaattcatcattgaaaaaaaaacaatctatttaaagaaatttgttaaaaactagaacgataacaatttcatatgcctcaattgatttgtctccaagtcttcaaaatagttctctcttcaaacaaataaaaacgatgatgatgaaaaggtatacaattctatccaaagcactaatcgaaatgtattctctgctacaaaaaaattcaagtctacgcaaagttcagtaaaccatggacactaaatcatcgacaatgacaaaaaaaaactgcaagatcatacaacaaccagctataaataaaaatgatgatgatgatgataatgaaaggtacacaattttatcaaaagcactaattgaaatgcatattcattctgcaataaaatcaattcaagtctaagcaaaattcagtaaaccagggacactaaaatcattaacaaagacaaaaaaaaaaaaaaaaaaactgtaaataaataaataacaaaatcacaaaatagttctctgttccaacaaataaaatcgatgatgatgaaaaagtatacaattctatcaaaatcaccaaccaaaatgtattcattctgctacaaaataaattaaagtctaagaaaaattcagttaaccatgtacaatccaaacattaataaacacacaaaaaactgtaagacaatagaacaagcaccacctatttgtaaatggattttaaatgattacctcaaaaaacttaaccaaaattaagaaagcccaaataacaaaatcagaaaaatgaagtaaaagaaaagtgaagattaccatgcgaggatccaataagccatcagcataaggtttccgagtgggatcataatactgacctttccacacttgaacctcagccattttggcaatctcagcagccgattgtacggtgaaatgcattccttttctgcaaagtaaaattcaaaaacaaattgttatctatgataaatattctgaaaaaaaaaagaatatacatatatataattctcacattttacgtggaccaacatcttcgatgaagggttgtttagtgaaggctacgttctgagcttggtctttactcgtcgtcatcgccatgattagtagcagaaatgggagctcagttgtaatggttttagtaggggttttgctcactgtatatatattaatatataaatctatataaaacaaaaaaaaaaaaaatcacacaatcaattatcaaaatacatttactatacaaccaattattcacacagacattatatcaaacattatatacacatacatatatcaactaaaacactatcactgtattacataatatcaatatatagctatataaaacaaaaaaaaaaaagtaaggagaaagagagaagagataatttaccgacgaggaagaagcaaaccaggttgattatggtacgaagaagaagaagatgaaaggaaattaaaagaagaaaaaagagggaaaacaaattaacaattaaagtgacggtggttggagtcgaaccctagacgccataggtcgataacactaaggtttagcttaagtggccaccaagctaagaattctaaattgtaaatgtgctacaagttttgtatttgttctaaaaatacatttatgaaaattctacatcccaatacattcttatctctttcgacatttggaaatttttttagttatcttttttttttttttcatgactaattatgttataattatttaaaatattatgtaaaatttaaaaaaatttaactcgctaaaaatagagtttaaaagtgtgttgtacatataaatttttaattttatacacatgtgaaatagagtgtttgaatattattttttatattgtaaattattttaaaatttgagaactttttgtagttatttatagtgaaagtgactctggttagagtcaaaccctagaccccatgaattgataaaaataagattaagtaagcaatcagctatgaatcttaaattagaaatattctactagtacttttattagttataaaaaatatatatgaaaattctattaacctgtgtatttttatttgttttggcattaagaattttttagtttaattcttccactattggaaattgaaatcggagaattttttaattttttttattcctgaatgtcaaatgtcgaaatagtaagaaggcctatttacaaaaatgtgggaaaataaaagtaagttttgatatatatggcataaaaacttaattacactaaat

SEQ ID NO: 20716 - DNA, 2076 bp, Cannabis sativa
tcgtctatgtatgtaatgtatacatttataaatatatctattaattatatcatattgcttatattggtatgtaaactttatacttgtatctatgattggtagaaaaaaatcaccaaaaatgcagattcagattcttattttgtaatattttattttgtcagcggaatatgacctcagtttttgttcaaagattccttcaaaaaagttatatttatcaaaatttgatggacaatgaaataagcagctgtacagtaagaattttcagaaattagcatgatgagtgagttgattttttatttttaaaatttaaaaatgatatataattgatattaaaaaatcttgtgtgttgtagtgtaaaaacaaaaggaatcaactatcacagcactacttttttattttaattttatagagagggggtagacctaagatgataaggattcgaaatatatatcagtgagatttgtgtgtactataactattattactacaaggaccactatatatatacacacacatatataaaaatcagtagtagtacatattccctacacttttgccaaagtagtctctttcagccaatgatattcataatcatcacataaggctctttagtctttacttctctcttttcaactccttaggaaacaaactaaaaaaatcccaattaaggattaatcatgtcaactatatagaatagaacaatacaaaaatggatcaattggctttttacagcatattaattaattaattatttgattatcttgtgatgaaagccaatttggctatatacttagtagtggtggtattattatttcttgttcttatcaatattgttcaagttttacacttcattgcataagtattcttagtgaactgtattaggctaagaattgtataatagtgtgagaatcattagtatactatttgttatgtgtattgtatataagaattaaaaaaaaaaaatgctaatttggttaactaaatgcaacaggacataaaaagcaagagtattaatatatatttcacaccttaagtctaatattatatcaaagtgaaacttataattagttcttagtttttttttattatattatttattaattaaaaagagttatattaaaatattctaagtacagtatattactttttattactataatttttttttacttttggtcacaaaaatcacaaaattacaatttattctgattaaatgtgtttttagttacaatatttgttgtgactaaaattaaattagtaaaaatatatatctaaatactatattttactcataaataattttatattatgattaattatcacatttaattataaaaaatttatgttgcgattaaaatattattaagttttatttagtaccaaattatagtatatcttttagtattttccaaaaagcaagtattattctacattaagtgatggatataatttttgttttttttttcaaagatataatatataaaaaatacacaaatagtcagcttattagtggggtatttaatataaacaattgtatataagtgctaaatgtggacatttcaaaaaaaaaaaagtgataaatgtgaaaacaaagaaatgaaggacattaatttagagggaaaggaagtgtactatactaaccaagttggttggtatggaatggaaattctgagtatcttcactgtgagatattatctcaagttgagaatataccttacatatatatattttttaagctgcaataaattgagtccatctattggttggaataacatcaagtggaagaatcaagaaccaacaataaaagtaataaataccatttatattttttaaaattataaataaataaattataaagagccactaaaatgataagaatcaatgatatcacttgggatcagatcatcatctaagatttgaaattggtccagttgagtattatcaatacattatcagccctgtttattaattaggaaaaaaaaaagaattagtagaagagtattatcaatccaccaataattagtctaggctattttcctagggataatttcacaaatgcacaaaaccaataaaaat

SEQ ID NO: 20717 - DNA, 1550 bp, Cannabis sativa
tttacttctaattctaaaaataaaatataaaaaaaattattgatatttttatgtagtaaaagatattataaataataaataatttaaaaaagtgattttactacaaattttaaaataaactaagggccatttactataattttccggtaagataattaacttctagctcggcaatttcatctacacacagtcgatgtgtagagtcactttttactcaattccagcaaaaatgtcacttttttcattagaaaacatatgcacaagacaaaaaggtacatagaatcagggcaagtttttttttttaagtgcttgacaactacatctaacaattaatgctagtattcttttatatgtttatatatattacattcaatgctataacgtaatcatcatattactattatagaaagatgcattttttttttaataaaatagatagatgcattttaataattacacaaattaatttattgtaataataatatacttgaaaactaatttgagtttgttatgggcatgaataaatctcttgatattaatataatttatatgttagaaatcaatcttgtcagcaatagttgtcttacattgaaaaaatgggccatctattaagttgttaccagctcaaatcaatggcagtaaatttcagtttcgatatgtatctatttgataagccattattgaaggggccttaaaattaaacatgatgactataccagtggttgatgagtaactgtgctctatttagcacaaatgaataagtttaagatataactatatcaatttttttatattattctccaatatataattttaaattttcatataaatttaatattaattaatttttattaaaaatttataaaacaattttgtcattaattttattatgtaacacaaataaaaaaatggatgtaaaatttttataatttaatattataactaaatataataataaaataatcaaaataaataaaaaattagtgtatttatagtgatattaattttaaattataataaatgttctgccaaacaaactatgtgtcaatttttttttagggtaaccggtaaaaagttgaaataacaaagtggatgattttgttacatttaagaaaatttattatatacttatcaaaagaaaaaaatttattatctattcttattctttttttttttttgaatggttatctattcttattctaagtgcatactatctgtcaaatttatatcagtttttgcacataattagtagagcatattaaatgaactatattttaagtttatatcaattatttattatacatcttatactacaaatacaaatataagaaaatattattatacattttcctattcccactttctttagatatagcctatcatccatcaaggaattaaagttagttctggtgatatattggtgctcataatagacaaaatatatgaagtacttactgatgtcacatctttttctttctttctcctgtaacagataccattaaaaaggttttgtattgtaaaacatctaatcttgagagagagagagagag

SEQ ID NO: 20718 - DNA, 4161 bp, Cannabis sativa
agaggtatgtttcaaataaatataaaattagaggcaaatttggttaattgattaataaaagaggtatttttcaactgacttttacagactcggtttgggagggctttgatgggcctaagcccatttcgcccactacgtattttatttctttgatttttgccaaggaatctttagtttgttatcttttaaaggttgttcaatattttaatatgttctcagtttccaaaataatacagctactcaattaattgtaacaaatattttgttttgctttttattgatgcaaattgtagcacatattgaattggctaggctacgaactcgataactctgttattttctccttaacctgtaagcatatttcttacgtggaatctgaatctcaatacaaaagcttcaacatgtaatgggacatattaatcaatgactcaatgtgaatgatataatgtgactggaactaaatttaaacgaaatacatccctttctagaaatgcacttttcgcatttggtcacttcgagaaattaataataataataatacagataatgatgcctatcaacgaaaagagatgtataatactctcgaaattttgttgtaatatgatgtagtagtgagaagaatatcaccaaaagtaaagggaaaaaacaaacaaacaaacataccatcattttgtccaaaggcatgcatttatcttgctattctaatcatcatgtggggataatgtcttaaatttccactaactttaccacttaaataattgaaacccccaaatatactttctcacttttggggatgacaaagaaaaatgataatcaaactacagggttttattttcaatataagttttttggggattcagtcaattaattttgaagctgacaacaaagctatgtacttcaatccatttgacattgcaggtatatgaccctagatcctcattttttccctgaagacttaaatcacgttaaagtaaactaaattatcatgttgctgactatttactgccaatgatatctaactcatgtaacttttttcttttccttttttacatggtggacctattgatcactaatctttgtcgttcaataaaatataagttttaaaatatgttataatgcaccaaaaatccacaacatcacaacatattatatcccaattaagtcttacattttatttaataattatgatgaaaatccactacctatttgcaaggcactcgtaatgatattccactttggtgatagctcttgaatgtcaatctattcagggatccagaacaacattatattatataatataatataaattttaatagaacattaaaaatcaaaacccataaaatgtcacaagcagtaagcactcctttatcatcatggtcatgaatacgaaaaataagtagaaccagatactcattttcatacacaaccttctcataccatctgagaagatctcggttggtaacaaaggaagatgcgtgaccatttttatttttgaaatgctgcagtctctagtatttatatatactttttattttcattccacacaatctctctctccatctccttcactctagtgactgcttttgaaacactagagtctctagtatttaattggaaatatgattttttttctcttcagtaaacctttttgaataacaaagacagttcctttttgcattgtaatttgtatcaaaatccatgtcctaagtttgtaacatttatttccatattatcttctacaatttatcaccaacaggcttctacgatcatattattaacttcgcctttagcagcatatattaaaatggagaattgccagaattcttaacttccactcaatatttttcattagaagaaaatttatcatttcaggacaaaatgaaaacattggaataaaaataagaaacatttcccatctaaattacaaattttagaacaactgttatcctctacctaataattagtataatgaaagcttttggaatcgaaccttagttgtcaacttccatagcctgttcagctttagctttggccaatgctgacaatttggtctttactttcctcttccctacctgaaacccacctgagcccttctttttcttattaccaccatcaacctgttttacacaattacccaatgaaaactcctttcagtgaattccaaaacacccaacacataaattttaacataagaagttgtgcaaaagaatcaaaatcaaacacattactattcatcaaatattataaatttataaccacccacccaatcaaataacccaagaaaattgcatttgataatggaaaaaattaaaataaaaacttcagttagcagatactcttgttggaattcaaccacgaaaaatgtaacttataaaaacaaaaaaagaaaagaaaaaagaactcattcctattgcaatcgatagatggggactcactttcatcttgttcttcttagcatgaagcttctttgccttcctttctttttcttccttctcccctgtgttcagtatagaatgattaatatgagtaaatattcagaaacaacatatagatacatgaatagatagagagattgcagagaaaaatttacttttgagttcaaattcgtgctgtactttccgcttagaaaggctattcttcttcgacatctctcccgctgttacttccttcgcctcttcttttcttttcctttttctctgactgacgagtaagtgcccaattctaaaccctaattcacacaagattcggtatttattatttttacccccaaacttttaagttattatagtatgtttcactaaattttcttttattacagatttggtcccaacgttttcaaatttgatttcctttttttttttttttttttgagaaaaatgcaaattataattaatcaagagttgacaatacaacaagcattaagaggtggagggataccctctaaccacgaacagatagagtccaccgaaagagcatacttagctaacaaatgaacagcaatattagcagatcgaaaaacaagagagatctgcactccaggaaaattgtacactaaaacagaaatattaattaacagacaatgatagtcagagttggaggcacgagatgattgcaatcctttaaccactaaaagagagtcagcctgtataaagtgtgtagatagtctaagatccttaagccattgcaaaccatacataagagccatcgcttccatgatttctggtttaaaagtacttgggaaaggcctcgacatagcaccaataatattaccactactgttacgtaggaccgcaccaaaaccagagctatttagtaatatttttattttttttttaatttttgaatcacaaaaataaaaataaaatttttatttttaaaaaataaaaatgcattctatggccacttttgtttttaatttttttttttaaaaaataaaagtatgtttcataacttttattttttggttttatttaagtcgggtcgagttctgtgtttgggtccaggattgtgttccgagtccggcattggggccgaagttggagtatgtgtattatggtctaagttagagttggagtccagaatataataaagaaaaaaattgtttaaaaaaaattttaaaagtgatttttttttttttatttaaaattttcattctctccttcaaaaaaaaaaaaaaatttcattctcaattaaaaaattgaaaaatagaaatagttttataaaatatattttcggaaaatatttttacttttttaattaaaaaattattaccaaacacaaccgtttttcatattttttattatttttatattcattacgtagtgatatctttgttatcaatcgtatgattgaataagatagcaagcattttatttttgactcgttggtttatagtgtcgatcaaatgaccgattatttttttggtcattaaatttttatttttatttatatattatttaataagaaaaatattatcatcagactttaaattttaaataaattggacatgggaagaaatgtagcttttctttttaaatttgatctttaaactattcaatcagctcttaatatctccaaagttacatttaatattgaatgtccctattgaaagttgaaactaaggatttggatcgattagtagaggtttcatcccgagtcagt

SEQ ID NO: 20719 - DNA, 4540 bp, Cannabis sativa
tccgatccgattggattggatttttaaaatttgcatctgatccgatccaataatgattggatatccgatttaattagatcggttggaattggatcggtcggttgggattggatgactttctgcacactcctacctccaaataaaatttaatttaaatatatacgtttttatgagtattgtacccaaattatcttcacacttatatatttaatttgtgagtgtatacgtcggaaaatttatgtattttgaaataggtcaaagaccccaacattagaaattggcacacattagccgaaagatcccatttaccaaatggaagttaaagggaagacaacaaaagtatctgtttggaccagctcacaacggatcacaaatggctttaataccatgttagaatttggagataaaatgaataagatgaataaggttttatctcaaaactaattgacaatgggaggagtagcatattcatcttatatatgacaatttctttaatttcaaatataataaatttgtttaaatataatttcaaattatcttcaaatataatttcaaaaaatagacatatattagaaaacaaaaatcagttactattatgcgctcaaatgattggttgaaagaaaacgaaagcattacatatgatataaatatcaaacatttcaaatatattggaaataaaatatcacaaaaatgtaaaaactaaaaaatatataaaaaaaaaaaacaaaaaaaatcttatattgtacgtaatagccaatcaattaggctatatgatctttgcttacagcattctaactatctagttaacgtttttcacttaatgaatcaggcgttttttaaagtattactattcactcaaattttctgttttggaaaatacctaaacactcatcatctttactactatatttttcaaaatatcacttcaaactgaattttctctattttactacaccatacatcacattttttcatttctttctctatttttctatctgaaatgaagaaaaataatagtctagattattttcttaataagagtcttaatattcaatatttattttcatctatctgaaatgaagttgcatcaattatttatctagctttacgatgaaagagagcttaaagttcttttggacttaaaaggttggtaactagtaaattttaacttttaactctaaaaaactctattaacaaaaatcaattttaatagaagctaaaatcaaagctcagccaaacagggccaaaatctgcatttgcattagctcaatgccataagcagatgcataatcaagattagaggttaacccaatcagtagtacaataagtttgtcagttttaattttaaaatcattttgaaagaatttcatttgttatatcaaggtgcttcaaatgctcagagcaaaacaataaaaaaaaaatgagaagaaaaaaatgccaatcttcaatacttgtatatgaacagtatgagatgcaaagaatatcatatatatattcaatcaaatttcagagctttttaatcttttctctcaaacaaaatatttagaggtataatttacaagtgatcatctgtaacttcttccagagtaccccaaaacctaaaagcaaacttgcaccttcttcttcaggagcttcaaatcaaattggctgtggctcaagcaaccacgattataatcacaatcagaagaatgattccaaaaatcagcaaaagcaaacatgtctgcaaaattggaatgttagtaataaagtctttccttgaaaacatcttacaaaaactatgaacagcttaactccatattgcttatactaatatactatgcacatttcagaaagggaaaaaaaaaactttatggaatatgaaagtacatgacaaagaaagatccaaacattcttaccagagaagaactagatttctggagcttggatgcttttgcaagttgaacagtagcttgtgaggttgcagcatgggaattggcaatgttggagccaatatcatctgagaagatggaattttcaattgttaacaggaatgaatctttaagaagaaatgctcatagaatagaaaaatggtcatagaataaaagggtattagtattaccaattattactccttgatcatggactagaacggctagatctttgaaaatctcattcacttcaccgatctgatgctgaatttcttgaatcccttgttccctttcttcaataatggcttcattgaatacaatttcattatccaacaataaaacttcgtttctgcattcaacaaacagattggaatgaaatattgaaacctcatcattgacaagtagcgagacaaaacaatgcaaatctttctgtccatgaagagaaaattgaatcgatgatacaaaagccatctttgcttccttgcttacttaccttttggattcaaaaacaagactctgctcttcatgtttcgtgttataagaaatctctggttcagtaaccgaataactgcaattgataaacatatccacagtaaaaaccccatgtttgacaaattattatacacagttgcaaattcaaaatatttgactatatctccatcacattgagagtatacttttagttataataagtttggaattagaattttgcactatttacactacaggttatgaattcaccatgaaggttatataaacttttaagtaaataattgcagcataagtaaccaaaatttgagtttataactagcataagtacctaatatctaatgatagtaaaactgtaacttttgtttaatttcgccagaaccaactctgtgaatttgttcaaagaagatttgaaagtaataagacactaacaaagtttatactaaactggactaaaattacaatttactgaaattggctacttttgcaaaattaattcggttacttatgccccaaatatctagacatttaatcatagcaatgatgaaggaagatttgaagaaaataagtgaccttgttgatacaaatggttgtttgggaagagaaggagcataggttgtttctctttcagctgcaagcctctgagccttctgaaattctttcagaactgactgaaaatccttagctagcttagcatcggcaattttcttggcagtctgtaattgattaacaaaaatcaaaaatcaaatccaatgattgctatctcttatcaaaactaataataagattaaaaacagactcacagtaatttgagtattattttggtgatcggcctcgctggcttgcctgagtttagatgaagtctctttcaccaattgtgcgatatggatccttgtcttgtgcctgtaagagacaataatatgataattaacaaaaacaaaattggagaagagaaaatcacaaagaagaagatgatgaaaaggaaggttttggggtttacagtttttcgcgaagttgaagagtatctttgggggtgccaagggaattgacgaggcggaagaaagaagagacggcggtgttgatttggaaaatccctgaagccaaagcctgagatgggtcttggcgtcgggagttggcggtgccggtgccggcctcgagatcttggaagctcattcctggttttgtttatttacgtttactccaaaaagaattgggttttgggtttggaggaaatttcgtaagaagaaaagaataattgaattattaattaaaataaatatgaatatgaaatttggaagaagaaggaaggataggtttgtttaggtttggttttttggggtatgtgatgtgttacctacaaagtcaaactaagctacaaaataaatagtgggacccaccacagactcttctctctctctctctctcacacacattaaatgctttcttctgtctaatgtttcaacacaaccaaacaacaccctattcaatcattcccatccactaattcaaatttaactacatattaaatgtttttttttttttactatttaagacttttgtctctaaccaattaacaattgtacattctaacttttttttttgtccctaacaattcttccatagcatttgtagatatagtggttagcaattctctcatttttaatataagtactaagtatgataaatgcttcttaacatttctcttatattacatataaccctatgtttggtagatgaaaaaggcagaacaaaaaacaatttggaagaaaaactcgagaaaagtaggaaaaaaaaatgtcttagttgaaaagaaaactagataaaaaaaaattgagatgacaccttagaaaatttttctctcaatttggagagaaaaatggagagaaaataatacaagacaacaatgatgtaaatttatttttgtaaggaattaattatgttaataatttaagggtaatatagtaattttataataatttttttcttttctttgtttttgccaacgaagcaaatagattttttttaggaattattacataaaaaaatataaattgacactatatttacaaaaatacctctataagatcaagacaacaactataccttttatgtgattttaattaccaaaataccacttacactat

SEQ ID NO: 20720 - DNA, 5794 bp, Cannabis sativa
acatctgatataatctaatattttttttttttattcgatccaatctaattaataattagattaaaaaaattatcattggatctaatacgattagacctcaaaatgcaatccaattactaattagattagattgattttgtaattggatattcaataacacacaaaaaaaatttatataaatttaaaaacataacaaaaattacataaaatctaattgatattaaaatcgattaaggaaaaaggaaagagctattaggaattctcttagaaatttaagactatatacctgtttggaaaaacacaataagccaagtctgctattcttttagttttaggtggagttaaattattttttagagaaattaattaattaaatatacttgttaataaagagacaatttagaaaatataattaaactatattattttttaaatatttttattgtatataaataatatttaattatatatattaattgtaatttgattagaacggtttttaatcgaattttgagattaatattcaataactaatccaaaaatagacattcaacttttgctaattcaaaagtaattagatatttaattttttattattagattaaactatagtagttcaatttaattagatgagattgaatcatgtccaaccctacttgctatcatagagggagcatataccatataggcttgtaacccccactcagaaaagcaaattcacttaaaaaaatcattatatttcttttagtttaatatttgtacattaaagaatgggattttaactctacttcttttatgctttttgtgtttttttttttttttgaggtctttttcaaacttatggctatgctttaaaccatttgaatttatcaacctactcatgttattttgttttttttttagaaaaaaaatttgttcatatggtactaatttcatttcatcccattcttttcgagtctaaaagtaatctcgagtatcatcgaaaggcgaataaatcatatcaagttttctctttacgaaaaatccttaaactcatcatgttatgttaaactaaatagtttcattttcattttagaaaggaactaaaagtgagtaatttatggtacccaagttttaaattcaaatttaattacttaattacatataaatgactatagatttacctaatgaacattattaagaacataaaaatatacctttagaaaaatataccctttttttataatgtatagaaagataattgtagaggtgattttgcatatagaaaacaaatgaaatctaaagatattatatccaaagaatagagactatagaagaaaattcaaaaagtgacaaaaaaacataaaataatatcaattttggaatttctttgcttgaagattttggtgggtttccaaattaagtgaagcctgacaatgttcagtattgttttggccactatttattaatttttaataagaataaaaaaaattaaaaacatatttgattttgcatgatatgatctattaattcaaatagactaacacattcacaaatcacatgacaactcaatgcacaactagggaaaaacattaaaacattaatatataggaccaaatatgcattaataacctttttaaaaaactaaacacaaaaaaaaaatatatatatatttacaattttactgtatttttttttatatttttataatattttataaagacacaacaaaaaattaaaatataataaaaaatagtatacaaataacaaaattttttattatttttgtgttttttttagaaatcatccaaaaaaaatgaaaaaaaaaaagtaagttcacaaatgaagatttggagaaaagaagagaaatcttgtcattttgtatcttagctatacaaaaacaaaacataaaaaaagcttaaatatatgaatgaagaaaattgagtacttaacatttataaataataaataataaaaaggttaagaaaacaacaaaagaaaataaaacacaaattagtggtcaaattgcagtgattataacattagattcttagctctctttttgatgtcccttcatccccaaaagcaatctctaaccctttttctttccctttcactttttcttctttctttatttttttttaaatatatattatttaaattttttaatttcaaaaatcaaaaattaaaccaaatcttcatcgatatctcacaaaattcagaaaaaaaaagaaagaaaaaagaataaaacttttctttaattcatcagaactttatgaataatcatgcaaaaaaaaccccatggttaaatttaatcattaaacttataagaattatatatctcttttccaaaatatgatagaaaaatattaaaattagtttcctatttttttttttccatgccaaaatcaactcccaaaaaataaaaaggcttttctttaattcataagaactttatgaataaattaacattgcataaactcttagttaaatttaatcattaacaaaaataatctttttctaagaattatatttctcttttccaaaacaagatagaaaaatattaaaattactaacctattcaaaatcaaacatccccaaaattaaataaaaaaaaaatgcttttctttaattcataagaactttatgcataaaaaaaatttaatcataaatctcttagttaaatttaataattaacaaaaacaaatcttctacaaaattacaaagcttcttctaagaattatatttctcttttcaaaaacaagatagaaaaatattaaaattactatcttaatcaaaatcaaacctcccttcctataattcataagaactttatgaataattaaccatgcataaaaaaaaattaatcataaaactctaagttaaatttaatcattaacaaaaacaaatcttctacaaaattacaaagcttcttctaagaattatatttctcttttccaaaataagatagaaaaatattaaaattagtattctattttcccttccaacaagaatcaaaccccattaaaaaaaaatcaaaataataaaattatgaaaaaaaaaatgattaagaagtcttactcttacatgcatagatcaaaagagaaaactcaagcttttcttgaagatctttattctgagtagccattaatttctcttctaaccaaagccttgaatccaaaccacttcttgttctaaacataaacacagcaaatccatgatgatgatgatgatgaattgaagaaccaatcatgaacatcccaaagcaaatcaaccaataacccatcaacaaaaatggtttgattccctctaaaattccattgaagtctcttaactctaatcacaactttcttatcaatactcaccacaagaacagggtgttctccactacacttgattaaaacctcatgagaaacccctgtttcagaaaactgagcttttgtagagtaaagagtgttaccagagcaatgttcatggcgtgagattagagatgttttggccatttgggttttgtttttgagctttttggaaacaaaatcttcacccaaatcgcctaaaatgagtccgatttctgaatcgaatgttgccactagataaaacccttcaatgggttctggtccgttttcgaatttggagttggaaagatcccaataaagttcgatttttgagccatgggaatcgaagattttgctaccctttttcttgcgaaacaaacgagagtttatgttgagtttcattgtggctaatgggtcttcaccgaatgatactgttaagccttgtactgagttgtttcgacaccatgtggtttttacaatgatgtgtttttttggggggtttgagagaatcactctgtggattaaaacgacggcgttttgaatggagggaattgaagaagctggtgttgttgttatacatgttgatgctgttgagtagtttgaacatgatgatgatgataatgggtttgatacagtcactgagttttcactgaaacatgatacaatgtctctcattttgagttttgggatcgaaaggaagggttttgtgatgtggggtttgtttgtttttggattttgagttttgggttaagggagatttgtgatttggacatgaatttttttagagaagatgagaggtttaaaaatctcttcttttccctttttgagactaaaatgaagggttttgagaagtttgtttttggattttggattttgggtaatgagatatttgagatttggacatgaattttgagagattatgagctttaaaaatctcttctttctctgttttcttttccctttttgagactaaaatgaaggattttgagaagtgggttttgtttgtttttggattttggcttttgggcaaatgagaaatttgagatttggacatgaaattttcagagaagatgagagaggtttaaaattttcttctttcaatctctctctcactcactcgttttcttttttctttttgagactaaaaatgaaagatttggagaagtgggttttgtttgttttggattatggattttgggcaatgagaaatttgaggtttggacatgaattttgagagaagatgaagtttaaaaatctcttttttgagaccaaaagcaagtattttcagagatggggtttttgtgttttggcttttggagaaagaaaaattaaaacttggacataaattgaatgagagagatttggtttaatttgattaaggaaaagaaaatttcaagtttctgacatgcccatatgagattttaatagagggattctctctattaaaaatggagtatatagaaaaggaaaatagatttgaaaccttcttcaagttaggctactttttttttttgtgtgacagttcatataagacaaataattaattaaataaataaattaaagaaggtggttttggtcttttgggacttggtcagtcaagaaaaacaccattactactattagtgatataattgatgataatggggggtttttcaattgttatgtttaattagtttgattaatttatgtaactgaaattttggaatttattacaaaatatttaataaattcaattcaattgaatggaatggaaatagtttttgtcagtgaatctaagacagaaaaatggtaacttaaaaatagtcaaattttggctttttgaaatttgagaatgatgtcatgaattaaaattggaatatttaaattgatgttatttgtaatcaaaattggaatattattctaaaaagaaaaaaaatatattaaaatattaatggcgtaattaagtagtaatagtaatataataattgctatacatacatagaatagaaaaagaatataaatattaatggtataattaagatataataaataacaataactaatttagctcattctattttagttaacttatgcttttttaatgttttatataaagttacgaaataagtcttaatactattttttggtgaaatatttttatgaacgttacataattacatttgctaatatctttaatataatcttttcaaataaatatctctaatataattaaaattaatttatcaaattttattatattgtcgtgttaatttccaaaaataaattatgatcaataggtttaattgtatttaggatattaaagtacaccaagttattaccaaaaagagagtgtaggatttattttaaagtttcttaaaataaaattattaaaattggtggttattatttgttttaaagagaaaaggttgttcaaaaataaggaaaatgaaaacatggggtctcaataaattacatcaagaaaatatattatttctattttt

SEQ ID NO: 20721 - DNA, 10184 bp, Cannabis sativa
gaaagattattattcaaaataaaatgaagaaatagaaaaagatactcatggtaactgatattattataaaaaatagctaagtatttatagagtgcttaatagcaatactaagaaaaatgtgttgggttgggaccttatatagtaaactcacaagcacaaacactggtgcagctaatcaaacttttacatttaggccaggattaaggcattaacaatttaactgaataaattacacaagcttttcctatctttgttctacactttctcagactcaaaatcaaatggtccccaagaagggggtacttttacatcttgcatactatattgacatatgctttaagtaaaagaaaccaaacgtttatattggcacaaacgagactgtcataaagctcaacccgatagctaggtaagcactctcaaaaactatattgtacaaatgatttacgatgccaaaacaccgactcgcttgtgtcctccaaaagcctcccgaagcctttcgtatccattcctgtaatgttcgatacagaagcatagctgccttatggcctctcttttttcttctgctccttctgaaattaccaccctttgcctctcaacttcatcctctagttcctgagttcttgaattcagctcctttactagtttctgtactgcttcagcttctgcaatcagctctcttcgttcgttctgtgattcgaccaattgtttgttcaattgatctacctgatcatctctagagctaacatctgctttaagtgtcaaaactcttgaatttaaatcatcagtttcaactttcagagaatcaatgctcttattcatagttttaatggtgttatctctctctaacatttctgccttcagcttctcaattacaccatttagtctctcctccatttctgacttctcggccttgatctttctaatctcctcctctaaacaccgtccttgattttctatatccttaagctgttgttcaaatcgaacacgttcctcaagcaatttagatatttcggccttcacttgtgctttttcaggaaaaatcttctgctcagcatcggacactgcttgtttcaaatccctagcctcatgatcacggtcggacaaactactctttagcctcgaaactctttccttcagcttcaaaacctctcttttttcaacgctgagtgtggatttcaatgtagcgatatctttctgggccagttgaagctgattctgcaaaatcttttcagatgatttatttctttcaagttcatatctcaaactagtgatttcattctctgacacttgaagcttgctttttgtgattctcagctctttctccaaagcctgaatcttgctgtctgagctaacatcttcttccaaaccaccattttcttcacacatcgattcttcttgttcctctaactccatctcacgtgtttcaacctctttctgttctgatgattcaggcaaagataaatcaatctcagatgacatgcacttttggagttcaatcttcaatctagaaatctcttcttctgagttatgtattttctcatttgcaaacctcaactcttgctcgtatccagcaattctagcatatgaatcttcagagtactcacttttatatcccctcgatgagctgctgctatctgcgttgtcttcctcttggagccggagcttcagtttcacttcgcgaagctcattttccagctcgaatatccttctttgaagcacttgatcaccagcaacaacatttccaaaaagtccagaataattgttgaccgaggaatcatcagattctgcttcagaatctgtcaaagtagatgattcatctccttctctctggtaattatcagagtttccacccgaaccaagaaagaaatcaaaaccagctgctcgtgtagtagattttcggcgtcctacctttaaatcaggagagggccaggcagcagtcaggtcagtgccattatcagacattgtagagctctgggattggagatcagagggaatgttcttcttcaattctcctgtcacatgatcataacgttcagctagtgatcggtacatgcgatagaactcctcaacatgagaaactaattctggccgcttttggtaatacatctcagccttctttgcaaatgaatcaccatcttcctcaataagcttcaacatccgtttcacactcttgtccatctctgaaatcaaggatcgtactgtcattttcttgttcatcatttggtgcaaagaaatcatgactctcaacttaaatatttcttttattattttaattttttattcaaatcaatgaatcaatctatcaatcttgcatggtttattgtgtcccaacatttggaaagtggggaatttaaagcatcctacatcactagatgatgaacagaagaaaggctaaaattatccaaagattagacgttatgacatttgcctcatttagaataagaaacaaaggcctgtgttaccggaacaaaaaaaaaaaacctagattttagggaacaattaacaaatgtcgttttagaataagtctcttatcgacaagaatttttatctctcaaatgaaacagcattataggcaacaaagctatgtgacccaaaaattgcaatagaaaactaaaagataaatatatatgagatacattaggttaaaaaaacactattagacatgttcagttgtgctcaccttcaagattctcaaagagccatttagaatttttagaattaatgtggctatcccaccaccaggaatgggacttctttgattctagccttttcatgattttgttggagtgaacctgaaacaataaccaagcaacgctattaataattttcctacccaacagagaaaaattctcaatttcacatgctcaactgaaacacaaataattaagggaggtggaaaagtacttctttcaaggagcccaggtaaaacctactcattcaactgcatacattgttgggtgtaaattatttttaaaatttaacttctctgagagtttttcatgctagtatctgaaaactaataatgagtaacacataacatatggcatgcatgattcatgtaatttacaaaaagacatcataataaaatatatgtagttaccacatagacagatcaaaataaaattgcacatgaagaaagaaaatactattattttcttttcaccaaaataaaatgaaataaaataatgaacaaatattcctaacttcctctgaaatccctaagaaatccatcagctgaccaatggctcatgcaaaagcaaaagtaaaaggtgagatggcattacttaccaaggaagtagccatttagctactactctggttgaaattgaaactttaattggaaatcctctaccttgtagtttcaacaatataatctgcaattcaattacaatacatcatataagaatgacccatggaaatattttttttctatcttccccttacgttcttataacataaaaaagttaaaactcaactgtataaagtcagaacaaattttatccatacaaatacaataaaacgaatcgatatgatgttagaatttacatctgacttgcatgcactggctggttctcagagaagtgaaactgcccccattgtacattgaagctaatcaggcccaaaaatccctaggcctttctaggcccaaaaattgacataaattaaaataatcataaaatgagcgcgtgaattacgttgcacaaaatgatctgtatgaatcagaggaaaattgactaaacccaaatttacagactgtctcgtacagaggtccagctattccaaccacccctttttaatcctctgttcaaacttaaaataatcatacgtgaattttaatttctcaaaaaatcttcaaaaaaaaaaaatcatactacagcttcaaatcatgatatagtcgaatcgatgaatataaatagtaattatggttcgatcaagaaagaagatcattatgtgatatcattaaccgttaagatgagctgattttttaaaaatgaattaacagaagaaaaacttacgaaacagatttacgttactcaattgagacgaaatgaaagttatacaaatcttggaattgaattttggttatggataaggaaaacataaacgatttcatcataatattaactggatatatatatataagcattaagtcaaaattcaaatactgaaagatgaaagagattttcatttgaagaacagaagaaaaagcttacaggagagaaagaggagtggctgatccaactgagtggagagagctgcaaatttctcagttaccaaactgacgttttgtagagttagtgaagtttttccgggaaaatattttggaattgttgaaggtaaaaggtaagttagtacgctccaagcgaagaatggtttcaaaaaagtaactttgttttgtttttcttctcttttcttttcaatctctcgctttctcattaaatagtttagtgccttaatataattcaacaaagtcaaatactaataatctttttaaaggatttttttttaggattcttatgaaattgaagagatttttttattgaaaaaaaatcctttaaaaaaatctccctctttatatatatatgttcattaaaatatatatttatttggaaaggcaactaatagtccgcgttgggctttaaagcaatgagtatgtctcatatcgtaacatccgccggtccgtttgaaattatgtatgaaattactatgttaaccctgtgttattaatcattcggagaaactaacagcataaacaaaagggtatatttgtcctaaacttttgttaactttaaagaatatgagatgaagaatcttcctacgaaaacaaatttagaaaaaggtatggtctactaggttcgtctcattatcccagttactaccaaaaatattagttgggcccacttgaaatttaacttgacgcggctagagatagcgtaagagtatgggctggcaattagaggaacagggcccaccatcaccgctccacgaaaaatgggcacgatatatttaatacttgcacgtggcaccagcatatcgcgcgatatattatatactagtcatttttattttaaatttgttgacttattttaaattaaagaaatttgatttggtcttaaaaaaaaaaaaaaaaaaattgatttgcacctaaaaaatttataaaaataacatatttaactgtcggactgagaatttcattcacgtaaaggtaaaagaaaatatgttcaaaaaaacaaaagtaaaagaaaatattgaaacaatataatatgaaaatgtaattatattcatttatttggaaagattatatatctatttttttctacataattaatttttattttaattttagtttacattaagaaaagaaaaaaaaataagcaaaacttccgtccttctttattggatctaccattactctatttgaagcaataatatcccaaaaatattttcagctatccaaataaatatacaacccaaataaaaaaaaattacacaaataccacttacacacactttcaacccaggatttatactttctgagcaaccatcgtgaaaccacgtagcaatccaacgcaattaaaacgaaaatccagtttaatttacataaaactaatgtcttgactttaatttttagatccatgaaatacagatctcaaaaaattgaaacaatccaattcaagtataatccaaaaaaaaaaaaaattacatcaatactataataaaatatttatcctgatgtattttttcgttgttttcaaaatttctaatggtgaacttgtttatattaaatcattaagagacatgtagataaaattacgtacgtggaaacactgttctgatttttaatgtttttcataacttgcattatagagttgcataaatattttaccaacagttatttcatctaatgtaaccttcggccaaccattgagcaattttcgtctaattgaaatcttcgtctgatgcaaccttcggccaactaccgagcaaccttcgatgcaacttcggccaaccactcagcaaccatcgtttgattgcttaagtgatagtgtcaaaagtattttagttattcaaagcacataaaatgtataaatgttgtccacactttatggatgtatttttataaataaagtatcaatttgtattttccatgtaataattctaattatatatttattaaaatatttattaaatttaatacaaaataatgtgaaaaaaataaacattttaagagtgctttttaaaaattaaaagttattttttaaaaatattagagtgttacttataattttatgggatccaaatataacatcccttaaattaaatatagagaattaacgaaaatgtaaggaaaataaacataattaacaaaaaggatattgacgacaaaaccacccgcttattttttttaacacataactacataaattgactttttgaccgcaaaacttaccaaactcacattccgttttactctttacacttccgttcaaaagtgtcaattaagtaccacggtggactatccacatgtacataagtgtacacataaaaaatttagtggtccacgtaattttaattttaaatataataaaagttattttaaaatttcacaaaaataaaaaaaaagaaatagaaaacattttttttcttttctttccttttcttttttcttcttcttcttttgaagtacccaattaataaccctaatccttcttcatcccacaaccaccaccacaccacctccattaacaccaccacctccattaacactaccaccatcataccacctccattaacaccaccaccatcacaaccattatcattgtcaccactaccaccacaccacaatcactaccattaccaccaccacacatattttctctaaactaccacaaccagaccaccgaaaaataaatcaaggaccattgaagagagatctcgaaacagttgaaaaataaaacaaaataaatctcaaatctgattttttttttttgttgaatctcagatttgagatctgagatgtgcaatattgtgattaagagtgagagaacgtgatttaccacaagttcgactcaaagtatcgtcagagctagggaagaagcagacatcgtcgaggttggggaagaagtgtgcatcatcggggttggggaagaagcaggcgtcacaggtctgggaagggagaggacgtcgcatgtttggggattgagcgggcactgtcggggttggggaaggatactaggcactgtcggggcgggaggggtgggcactgtcggggctggggaaggggaagaagaagaagaaaatgttttctattttttttatttttctaaattatttttttgaaattttaaaataatttttattatatttaaaattaaaattatatgcaccactaaaaatttttcatgtgtacacgtgggtagtctaccttggcattactgagacttttggatgaaagtgtaaagagtaaaacgaaaggtgggtttggtaggttttgtcgtcaacaaatcattttgtgtggttaagtgttaaaaaaaatataaagttcgggtagttttgctgccaatattagaaaaaaaaataacgtcataaaatataataattttatacaacaaaaattaaattaatgggaattttaaattttgtcgatattttgacctaaatgacatgtggcttattcttgaaaatccaacacgcaacatgcccatctagaataaaaatagttaagtacattccaacccgaacaccttgtcttggaaggtcaaggcttagtccactcgaatgatgatgttaatacgattaagcctgagaatcaactctttcaagaataacaacaaaaagtaacataacctccctcgatgaagattattattggtgctaaaaggtggtcaacactcgcttgctagattccaagatgaaataagagatgattagattaaatagagagacacataatttatagtagttcactcctcatgtcgcgatggtaatggagctacgcctacttcgagtttttatttctcacaagaattacaagagaattgactaagtgtgaaatctctcaatttttagagaaggaaaaactcagggcaggtcctgagttgaaacgggccatagggaaaaaatttggcctttactataaaaataaatagtacttttaaaaattattaaaaaaatatgtatatttttttgaaatgtatattttatttgggcccctaaaatgagtgggtcctaggcgcaggcctaacctgtcttagcctaaggccggccttggaaaaactagagagagatgctctaaccttatgggcacattctgaatgtgaaaaatgagctcgaggagctctccttttatacgaaagaatgtcctattaaaataataataaaatatttaaaaaatatgaaaaaatacatttaagctatttttgaccaatgatgatgatctaacggtagaattgactctggaggtcgatcgtcaatttttggagcttgagtcgtgtctgtgaaacccgtttttgggtaagttgtagttgaaattcataactctcttgaggacgagatttggacttgataccttcagatttgcaattggactacgagacatgacttgatatagcattaaaatagcttcaaaatgcaagttgaatcgcgttaatcgaatcaatattgagtgagttatgactattttactgaagggtgctttgataccaacgcccaaattgaaatccatcgcctaggttgacatatgatgccaacctggacactaggtgagtggaaaaacctattggggatgtattttttgatgcctaagtgatattatgacatcaattagtcaatttctttattctagtgaattcgttcaccaattctcgaagatggtgttgatctatttcacccccccgaaagcacttttttccacgttttggatgagacaaagaaaattctcaagatatttcttcagttttatgattagaagcgcccgaggttaacaatatgtcaacctgggcgttgggtgcctagggcatctagtgcttcgggtgcttaaaaatgaaagtgctctaaatttgactctgatgcctcatatatgttcgtgacatgtctaattcatgtcccagtacaaagtttgatccatttgcactaagacactaccagaaactgaaaccctagttggaatgtcaacttgggcgctaagtgaaaccctaggcgcacgagttgacttctgggatgctatttcgtgtattttcaacttctgaaccttggacttggattcttcatgtcttcatggtatagaatactgaaagatagtaaattggaaacaacttggcgggatccaaatattggttttatggtactaaatttagtacgtagcgaaagaattcgtattatctgattatcattgtaccatagcccaatgaatctttagatgtgtatacatttaaactaaacataaaatacatgaaaataatatatacatctaaatgactatcagggtatcctcaaaacttctcgtaagttgcatcatttttgttgattagaaactcacaccgtagtcttccaaattgatccaccacacgcaaggaatagtgtgggctattaggataaagtgtataatatgttcttaattaattctcaacagatgagcaagaactatttgagagagaaaaacaattttccttttctcacagtgaatttcgaaaattctagtatgaaaagcttcttctaatttctcaaattaagtttctatctatagtagttaaatccccattaactaaatcacatttaattatttaaataaatatctgcaacactctaattgcttaagcacactacagtaattttttacttactgtgcacgccttttctaatcaaagaatttttcaaaaattgtgtcaaatttaaactttttaattaaactttaaacttttataaatacataaaatcaggatcgcgtctttcaaatttacaatcatattcaaaatacattttataaatatgtcgctccgcgactacaaaataaaggtctaagttgtcccaagatcgaactctctagatctaaccatcttgatactgatatgtacaaccattctcgagctctggactcactggtgctcagccttcacctttcctttacctacacatgcaaactaggggtgttcataaaaaccgaaaaattgaaaccgaccatcaaa

SEQ ID NO: 20722 - DNA, 2976 bp, Cannabis sativa
cctaaaaatacatcagaaaaagatctacaaaggccttccatgtagagatcgaggcttcaggcaactgattaaaccacttgtgtacattatcctccaaaattgtggtgagggttcgacatttggccaattatggaacctggtcaaccttcatgatagtattatacttatctaaataatcaataggattagtcaaacatttgtacttgaggaatttggagaggcaagaaccctttggaagctgagcacgtcatacttcaacagtgaatggtgacgttttgtgcaatttttagacgagttttctttgttgcgcgaccatccttagagctctcttgatcaacccctccaggtgctacattagtcgctgctgcgaggttagggggaatgaccaagttgttgatgggtgcaacaacattgacaggtacatcaactgtgttggtaggtgtagcaactgcattgacaagtgcagaaattgtgttgacaatattattgattaccgcttcaggctgtcccaagggagagatactttgattgtttgttcagggttcatggggctccctgcttgtggtgttcctatggttttcaggtgtgaggattgtgcgaggaaagcttcattcaactgatctcccaaatctcctctgtggacatggtacttgactcttagtcgtgtgaaaattgaacctgaagaagtatatatgctaggagtacgactgtcagatcttaaagaagaggaaatagtgttagtattgcatacttctagtgtccttcgatggccgcgactatgaggatgacgttgttcattgtcgtcatctttatagggtctgtcctctctttgacttctattgacatctcttgggatgcagaatccattctgatcgtgagagcgcccctccctaaacgccattggttatcatttgggattgtgggtccctttcctcgtgtgggatttcgaggcggtttgttcaaatcgagtcctcctgaattattctcgtatgaacattccctctcataatacctacaacctccacttataataattcttcaccaccatgcctatattagtattattacgtaccttgttattaatgttcctcgtgttgataagttcacgtggtgggggtgcgtttggccgggttacgtgacatgcatgctacctcgatctgtaatgctcgcatttattcctccatggtcgtatattgtgcgaccgatagttgtaccataccctcagcagtgtgcgtgggtgtgatcggtgggtaatgagcaatggttgttgtaggagttgaaatctttccagcagctctaatagtagtatcattgtgatcttcctcaaaatcatagaaattttactggatcctcattttagcgtcaaatattgtcggaggaatttagacgacaccaaaatagagagtattcgagcaaaacaagaatactcacaagcagatacgctcgctagtattcatctaaaatggcagatactcaaaataaagtaacaagtaatagaatataaaacaatgtgtatataaagaaagacagagaattatatataattggtcagtcagagttcgatttgcttagtccacttttaaaagagatttgtgattagttttattcgagttggatcactcctttatatagaaagcaagtgatccctcaaattacatagccggtcagacatgaccgttacatcattaattacattcaatgaagattaaagatgtttataataaattaaaataaatactaagacagtttcaaccattctcaattaatactcaaaatgggtgtgactaacgaggtcgtacatcagccattaatattcttaatcacatgaacttgcgggctccccgatgttactcgcatatatatgaggtctttagactattcagatgcgtataaaacctctaggggttcgtacaaagtagaacacctgcgactatactgattgagtattggacattcatgtactgacaacatagaacttgcgagttctaaacgagttgtcgtgcagattaatcgttcacatcagatgctcgtaaagatgcaatctctacataggacacagaggagaaacatttggtcatcacatataattgatacatgcgcgactatgctaacttctctccatcatgctttctttactattatatgtatagtgcatgactagattttatctcagtcgcatattctcacaagtttcgatcatgctggatagccttattgggactgctactgacacatgaataattccttcaatcagatccaaaatccaacacatagttatatatgtatatgtgtatatatatgtatatgtatgaggtggtggctgtggtgtttaatttcatcctattgtcacaattcattcttccaaatgtatatctgtgactgtatgcatgtatgccctatatcaattattgtgaggattgtataccattcattaaacaaaattaaggattgtcatgagctacacaattacaatatagacatataacgacttcttttaattttttttttttaaaaaaaagaaaggtaatgagtaataacacaaaactgtaaagaatacaaaaaacacaaactatattatcgatgaatatgtagatctgaactttcccacaaacaaccaaagaattaagtcaaaatcggacaaagacaaaaagccaaagaaccatgagaaagtcaagtggggtgataataaacactgttatatatatagggatataattttattctgttattatactttcacggattgtactctgtgatgtagagctgtcatcggatgagagagttatttgatctgacgactgaaattgatctaagggtaataatgagggttaaaaaataaaaacgtaccttgacactcaatgtacgctgacacccatctaatgtaccatggaatacattccgtaaaagtacatcacgggacaaaatcatatccctatatatatacaatatatatacaataatatttaggatggtttg

SEQ ID NO: 20723 - DNA, 2825 bp, Cannabis sativa
gacatgttgagaaggtgctaggcaccaactgatgcctaatagcaatactcatattgtaataacttggatctcttctcattaattatgaccattcacattgacgtatatgcctacaactgaattaataagtagggcttgggttgtgacatgagtacgtaacagttctacacaattcaatgatatataacaaattaatttatatatgcttacgattattttattttcttctttatataacaaattaagaagagaaaagacaaggacgtagcaacgagctatttatatatattaactataaatagatatatagaggtatgtagagttttataattttgtggcacaaaatctctgtaaggatatggtatttgacagtaaatatagtagtgtgtgcgtagacatgtggtatggcatgaaagagtcaagagtgtcactattaatcaatacgtaacagtcaattttttcttaatagcagaagataaagcaacaggaaaatgaaacgaaaaatccataaatatatatatatatatttatatatatggatgcagaataattaatatatgagaaatataaaaatgtgtcaatggtgtttagtattttttttattatatcattattgttgtaattaaatatcgaattttgaagtatctaacactataaaaaaaatacatatggttaccgataaaattcaatatcaaattccttatattttaattgaataaataatataaaaaactgataatttgcgcaccttaatattaaatatatttatagtgtaatgattattagtagtgatgggagtgagcagactaaacctcaaagccccacttctcacccaccctacctatatataatttccacactgtcggaatcttggtcgcaataactactcacccttttacctattaattcatatttatgtctacaaatttcatgtcgggtatgtatatatatttatatatatatatatatttgacatatacatatccttttgcttattgtgattaattagctagtatcattgggatcttataatttgtgataatatgttccttattattattctactttctttttatgcttaatttgttccttctagatatatatttaaagtatatataaatctatatgaaaaattcctgaactttttatatactataattcttttataatatacgtagattttgttaataatgtaattcttttattatagtcttgaagtataacttttaaataaatataattcttttattatattatatttaatttaattttaaataagtaaagtaatagataatagttaataaatagatgtaaattaaataatttttttgttttttttttttacattaattataaaagatttttttcataataatttatatttatatttttagttttttaatcattaaaataaaaaggatgaagaatatttattttgtatttatttatcattaattaattataccattaattatattaaaaaaaagtattactaataacacatatattataacagacacaatttaataatgtaaaaagatctaaagccaaaatgctaatctgtatattatattatatgcacactattatacgatctcacaagagcatatatcatacataaatgtaaagaaaaacaagaaaatgatagaagttatagatgatgagagagaaattaagagtgagatatagaggggggaccaaatcaaattgaattaaatcatatcatttattatatcatcaacaccatatatatatatatttatatgtgtgtgctgagtgttgagttgagggtgatgatcatatatatatgtatatattatctcttagctagctgtctttgctgtgtggattctagtggggtccaccatatatattaacactacgtacgtacatactgatactgtcatcaaacacaggtttatattatttgagttttcgatagcttaagcttttggaatcttacaaaataatattggaattgaaaggtacgtacgtaatacttataataattaattacatctgtacatacatatatatacagaaatacacccaaatctgcagtcactagtaataatatatacaatttactgtcagttgtgtcaaataataataatacgtactgtcagaaaataatatcagtagaaaatttccaattctactcgattatgtagttaagggctacttgagcaatgaagttgggatgtaaatggagatccgacccgattatatgttgacctcatgatgcgaataggatccgctccgtttttatttgtaccgagtctaatctgacctatattttttttttttaaattattattatttttacaatttattgtttattaggaaaaatgaattatgtttttttaaaaaatatgaatagcatatttaagcttattcatacttagtaatagtaatcacacccactgtgaaaacagagagaaagaaacaagaatgagataattattctgttgttgtattcaaaataaaattgtgatgtttatatacaagagaaatcaagaaaagagaagctggtttgttacaatccaattcaaaactaacatcctaacaaactaatagttaaaaattaactgcctagaattatctctaaaaacccccctttaaactcatagtggaagaagacaacactctaagtttagtcctgaatgttacaaattgattgctagagataagcttcgtcaaataatcagctagttgatattttgttgggacatgaataaagatggaaatttatatcgcggggatgggtaaccgcagggacccgcccttaatggggtggggattccccgtcttggtggttaatgggg

SEQ ID NO: 20724 - DNA, 5264 bp, Cannabis sativa
  modified_base (5219)..(5237): a, c, t, g, unknown or other
taaaatagccctaaaactagaaacaaagagtgaaaactaaccaaaaatacgacccgaaacttagactaattttagcctaacacaaaccctagtggactttggggcagtaacttccattaggcatttatacatgaaattcccctgcgacaatggatgtattggcacgattaaaggtgatcaaaaatgtgtaagaaatttttgtaatgtctcaacatgggttgtgttcatggtccgggaagagacacccattgctcacagaatggaggatcaaatagaaactaaggccatttaggaggattttccaaacgagttggatcctaaagttgggatagaaagaaatttagagccaatggaagaggtagaggaagtaagcatcaacgatgaagaccccacaaaccatcagagtgggaagaaacctacctccatccataaaataaaacattatgaacacagccaaaaagaaccaggatgtgttgacatggagccattctgacataattggaattgaccgtaacaccattttccatgccttgaacatttgagaggatgcaacaccaattcctttggatccagtaaggacagaaatagtgaagatagaactggaaaagttgaccaccaatgacttccttcgggaagcattgtgccctgtctggtttgcgaatcttgtcttggctcctaaacccaacggcacatggaggatgtgtaccaactttactgacctgaacaaggcctcccctaaagattgttttttgcttccgcagttagatcaaatggtagatgccatgttcaggtacaagttgctcagcttcatggatacctactcaagatataactaaattaagatgcatgttgtggacgaggaacacacaagcttcctcatcgatgaaggtgtctattgttatagggtgatgtcgtttgagcttacgaattctggagccacttatcaacaaatggtcaaccaaatatccaagaaccaactagggagaaacatggaggtgtatatagatgatatgttggctaagtccaaaacctctaaggggcatggccttaatctcaaagaagccttcacagtaatcagaaagtatgtgatgaagttgaatcccaaaaagtgcacctttggggtttcctccaagaaattgctaggtttcattgttagctctcacagaattgaagcaaacccagaaaaaaatcaaggccttcctcgacatgccttctaccaagaggcacaaagatgttcaaagtgttactggtcaaattgttgcacttagtaggttcattttaaaatctatagataagtgtatttagttctttaacgtgttgcgaggcaacaaaaagtttgaatggactgaagagtgcaaagaagcttttcagaagttgaaggagcatttgacccaagctccaattttgtcaaagcccgtggacagggaagaattgtaattgtacttggcagtgtccgatcatgctataagtgccacactagtgcgagaggaagaaaaggtctagtacccggtctgcgacataagccaaagattgctaggtgcgaaatctagataccctatgactgaaaaattgacatttagcgtactgatcacgtctcaaaagctgagaccatacttccaagcccatgccataaaaaaactaacaaattatcccctcgtcaggtggttcaaaagccaaagtcctctagcaggctgctaagatgggctatggaacttagcaagtttgacatctagtaccagttgtgggtgtcaattaagggacaagccctcactgacttcatagtagagtgttctagcctatatgacctcccagaagatctagtcccagaattgcctatctagaaggtctacattgaaggaacgtcaaacgataagggagtcggagcagtgatcattttgatctcttcacaagggcaccagctccagagcgccatgcatttcaatttttgtgcctccaacaacgaggctaaacatgaagctatattggtcggtttaagactgctaagaaagtaggagcccaacacattgaaatacatagtgattcttaactagtggtgaatcaaatatctggtgagtaccaaacaaaaggtgaaaaatggctacttacgtcatgatgtcctaggagctactacaagggttcaaagattacaatatccattaggttttaagagaccaaaaatcattcacggatatgtgccaaacttgcaacaaacagcgagatcgtccaacacagagtagacccaatttgtcacctagaacaaccaagcattgaagtccaagggataaatgccatggtcgaaattctcattcttatatggcaaccatttacaactttctgagttcgagagagcttcccatagataaggatacctctaggaaggttcaatatcaagctccccgttatgtgatcatggataggaagctttactggcgacgaatttcaatgtcgtacttatagtgcattgctggaataaaaatcagcaccgtaatccacgagattcatggttgcttttatggagaccacacatctggacctagcttatcaaagaaaatcctttgcaagggtatttttggcccacaataagaagaattgcatagaatatgtttggaagtgtgagcaatgccagagatatgcaaagtttccacatgtacttccaactaaaatcacactcatgagtagcccatggccttttgtagtttggggtatcgatttagtaggatccttccccacaggaagagaaggagtcaagtacatgatagtggcggttgattacttcactaagtgggttgaggcagagctaatgaacactgtcacctcaaaaaaggccttggactttgttattaagaacatcgtgtgtcattatagacttccatacaagattgtctccaaaaatgaaaaatagtttgacagcgaacacttcaccgacttttgtgtagcatggaatcatgaaatgtttcccagttgtagctcggccataagccaatggacaagtggaagtcgtaaacaaaatgctaaaaacaatgttgaagaagaaactacaagcatgcaaatctcattggtcagaagatattctgcgagttctttgggctataggaccatggagagaacttcaacaggacacatgccatatgtgatggcttataggtgtgaagtagtaattccagtagaggccacgatcccctctcattgacgagatacctacgacctttcccagaaccattccctgctctaagaatcgttggacttaatcaaggaactccaggaacaatcacaggttcaactcaaaatgtaccaaggcaagatcgcccgacactttaaatcaaaagtcaagaattgtacatttaatgttggagacctcatcttgagaagagtatttccagcttcgcgagaaccatgagtgggggtacttagcccaaattgggaaggccccatatgagatactgcagaaagtggctcaaggaaatttttaacataagaggatggatggatcgaggcctcacacctagaatgcagaccacttgcgtcggtactaccaataggctgaggtgactaagcctttgatgtatctcttaagttttgtgtaaatttttgtacaaattctcttctttatgtatacctttcaggtataatgaaatgaaaatagaagaagtttacacttaaatttacgctttttatttttaagccacaagttatgttttgaacaagtgaccaagaagttggagatgtctaaacttcccatcttacttgggggtactatgcctagctgtgaatgcccctaaaaaacgtacaatgtgctatgtttatttactttgtttatgaatgcaaccttttagtgtaacttgcatataacctagaaatgagatgtgttttcagccaaaattgcctgaattccttctcaagattagacattagtgtaaaccttgaaatgacatgcattttcagccaaatttcccaagaggaaaaacttgctaaattccttctcaaaaatttaaatgggtttcctaaagtatagtctgttagattttttacaaggtacgaatggggaagtctcgtttgaactcctattcatttttatccctatcttaatcaaatgatactacctaaaatccatagtgtgtgcagcctactcctcagtttatttatggccttagcggcaaaagactcttgttaataaagtctaggccaagaaaatttgcttaaagtgttatcacggtttcagcccaatccctgaactagggatagcacctgaaatctataacatcctcaagccacctttcccaaagcccaattttatgaagaggaactgtcaaggaacgcttggaatgcggaagctcacccttttgcgggaaaaccatccctgaccaacatcttgcgagtagcattccaaataagtaattaaatattcaagaaactcaaaaagcgctaaaaactcaacatgcaaaaggaaatgaataaaattgaaaggtctaagtctatcttagtgccccgtggatcgggcatcataaaatgtctccgcaaaaaaattgtcttctacactattacaaatagccccgcggaccagacttgaaaaaaatacttctgcaaaaagtaaagaatgtcttggaaaggatagtaaattaaaaataaaggcaaggcacaattattgctgaggagggacgtcagactcaaggtttagcttctggatttttcttcaaagttgtccttttacaaatggtcaccttctcgagaagaaacttctgcgacctctaaagactggttccctccaacttattcgcactcagcacccttggttccaggtttagggtcaccaacctctgaggcctcatctatggctccatcataagtatcgaggtactcattaatggatctcttgtaaaccttaaccctattggaaaagtcttctgtatcttcaccaagatagctgaagatgtcgggaatactctctgataggtgcgccaacatgagaacatgtgctagatttatagagttaactaaggctcaatgatgggattcttgctcttgtttatgctcttctttcttgtttgcaagttccttgcgcaaggcagcaacctccttcatggcctgaacctgaccttgctgaaactgagacttgatgtcatgtaactcttttatggtttgggttgttttttttttttgaagaagcctttccttctcctccataacagcctttagggcagtaactgttggaaattattttnnnnnnnnnnnnnnnnnnntcataagtatgttgattaacaccctaa

SEQ ID NO: 20725 - DNA, 2620 bp, Cannabis sativa
ataccatataaaatatttgattagcaataattggacaaaattaattaatgctaagtataaaattatatcatcaatcactaaataatcactctatttgagtaattggcatctcttaagaaaataaagaagtttgtcaaaaatgattcaatttcaaacccttatatatatttggttgactagactaatgcctttacaaccattggatcacatgatcacacaatatgcttaatgaagggtcccactcaatccaacggctgtaaagcattacagctgctgatctctagttccataagccatatttcattccacctaagctcgagccgccactcggtactagtactgtaataaggaccagtcaaagtcaaacccacaacctttgactaagtcatttttttccacggtcaaacaaaaaaaaaaaaaaaaaaacctttttaaggctttactcttctcttctccatttctacatcaaataccaatttttaagctcatctcatttcacttaattttttctcattgaggggtttttaaattattatactttcttcttctatatatactctaagtccttaaatttaatcttactcaaaaacccaaacaaaatctctcatgactttttctttcactgacattcttgccaataacaacaacaacaactttaacatgaataataacaataatattaatattaggcaagaagaaaactctagcttgaccagttggggtctttcagaccaaaatggtaataatgatttttcaagtttcaaaacccttcaaccaaatcctcttcctaatcctaatcctttgtccccttcttcttttttggctataacttcatctgggtttagcccaactggttttcttaactctcctatgtttctctcttcttctaatgtaagtttttttttcctaatcttaaaaaagcaagcttttgtcttgtctttttagctttatgtgtgatttgttttattgggttttgcttatttttctttaattttaatgggtttgtcttgttttttgattttcaggctcttccatctccaacaactggagcttttactggtcaaacctttgactggaggagtaattctatttctaaggataaacaacaacaaattgaagaagaagataaatttttctctgatttctcattccaaaccagaactggccctgtttcaatggtatgtttatttaaacctttttttcttggatttttctgaacaaaaaaaaatcacttttttatgagattgcataaacatttttggacccttatgcttaatttttcttttttattaggaaaagtcaatggaaagaccacaacaagaacaacaacaagaatggcaatttgatttcaacaaaaccacaaaccaaataagtttaccaattgagaaaaaagaagtgaaaagtgagtacccatcatcatcatcaacttcagaattgaaaattccacaaacccatcattatgctcaaccatctcaatatgttagagagcaaaaatcagaagatggttataattggagaaagtatggacaaaaacaagtgaaagggagtgaaaatccaaggagttattacaagtgtactagtgttaattgtcctatgaagaagaaagttgagagatctttagatggacagattactgagattgtttatagaggaaatcacaaccatccaaaacctcaatccactagaagatcatcatcttctcataatattattattaatcccacaaattcagaccattctgtccagaacttaggattacatgaggattgttcttcagattcaattggagaagagggttttgatcgaaattcgccttcctttaacttggttgaagataatgaggacaatgagcctgaagctaagagatggtaagaactttaattcaagagaattgtgatgacccttttgatttaactctgtgttgagctagaaaagttggtttaattgttgttttttgtatttggttttgtaggaaaggagagaatgaaaatgaggttttttcagcttctgggaatagaactgtgaaagagcctagagttgttgttcaaacaactagtgagattgatatattggatgatggttatagatggagaaaatatggtcaaaaagtagtcaaaggaaatccaaacccgaggtaggttttttaggttttcataaatatcgagtcttacatattttaatttagaaatgttgagcaatatatgaattgtttttgtttgattttgtaggagctactacaagtgcacctcacccggttgtccggtgagaaaacacgtggagcgagcatcgcacgacatgagggcggtaatcacaacgtacgaagggaaacacaaccatgatgtccctgcagctcgggggagcagcagctacgcgatgaacaggcccgccatctcaaacgacgtggttactacaatgccacacaggccaatgcctttggtcaataacaacagcaacaacaacaacaacaacgctactactaaccactcgaattacgcgacctctgttcccaacgcaaggttaccaaactcggtaacaaaccaaactccatacaccctgcaaatgctgcagcatggctcggggagttttggactttcaggcgggtttggaaaatcaaacccgc

SEQ ID NO: 20726 - DNA, 1691 bp, Cannabis sativa
  modified_base (1639)..(1645): a, c, t, g, unknown or other
aacagaacacctttgattattgaaatgcgcttttttaggatgagctttttatcttcctcctcatcaaagaagatcccccataatcctgtcagcatcgtcttcattcaccatttaccttttaattgccaaatttttgagaggatctccttaacccttcctcttggcaagcttctctgccggaatgtctttaccaacacacctttcctatcaacacctacattcaattcaaagtctacctctagttccattatcatgaaatcaaaagattgttggcacatctcctccatctcttccatacttgtcaatttagcttcctaatttatttccacttcatcaaaaaatctcttcaacattaggaggttgttgagcgatcggattgtttgtcgtcccgtctaaatccattagggactgctctcgttgtgtaaaggaaaaatagaggagagaaagcaaataaacgttgtactaaaatctagtaatgttagtaagttggtatttcaacatctcactcaaagtatggctaggctatttaatttcaatatctcactcaaaggcggggtatctttcttttaacccctacttattttggtatattgataagttataatttcataccttttacataattacatttgacctctcataacttttagagaaatttaaaataatttagaatacaaaaatcttgattagacactttgtggcatgcatataaagaaatagtgaaacaacaatgcatacattaattgtttgaaacataattgacaactaatgctcaattacggacacacattgtgtcctacaaggctaaagccccgaaataattttttaagataattttaatttagtaattacacactaaattatgaaaaatgtcccaaaagtatataatgtgaaaattatagggcttttatacaatctgtgtaaaaatatattaggttattgttacatgcattagacgtatatatatatatattttttttagtatttatttttgctatgtgtattttaaaattttattaattaaaaggaaactacttattacttttttttaaaaaatatattaaaagttttaaaaatttgagaaaaataaatataaaatttaagaatattaaaattaaacatactcctaatattaaaaataacaatagaaaataataatattgtaaataatatattaatatttatatatttttaaattaatataaaataagtattattaatatttataaagctaaccctattaatacctgtaaatttaacgaaatattcttatattcttaaaatattctattaaaccaataaaaattattaaattattttatatatataaagatatacgagaaaaatttataacttattatctttttatccatatttttttattttatttttttgttgaatttttccaacaaaataattttttttttttgagaaagacgcccatatatttgtgaaggaaaaaaatgcaaattccccgtatatataatgtagggagtttctacaatacaccctcataaaagggatgcactgagataccctctatttatttcagcattcagaaaaaaaaatttgtccaattttctttcctattcacatacgttatagacgttatttaagatatcctataaaattttgagannnnnnnaataatttacaatatagaaagaagtgttcaaacagtctattttaca

SEQ ID NO: 20727 - DNA, 2923 bp, Cannabis sativa
atttttatattcaaggcatatacctcgaaatttctagcaagggaagccataagctttgcactaaagtcgataccaactgagcaggccatgcctgcaacaaaagcagcaaaaactgcagcataccttcacaagaaacatacaaaataatttaataagacaaataaaaccaagatgatatggtcagaatacatttttcttacaccacaaagtacaatgagaatcaaaaaggcacgagatactcaaaaaaataatgacatgttgtctgttgttaacttttttttttttgttttttttgaggtgtctgtctttaattactctcacatgattttcatcatctagtttaagaagcaaaactaagttcgctaaaatatgttggtctttaatgaaacttcagaaaaaaaaaaaaaggaaagacagataaaataataatttgaatcttgttgtaatcaaccccccttttcccggtcaaaaagaaagaaagaaagaagagtgaaattaccttgtgattgttcaaactataagaggggcgtatgttaatgaataatagagtgtgtttatatatataggtaaagatacacataggaaaatgcttagttataatatatgtctctgaaggagatgccagtctttggtgaaattctaagtatcgtttggagactttcaatgaccctgttttactactttgtttaactgattgaatttgtcaaatccataaacaattttagctagtatcgtttttagtaaaacatgattgataccatgaatagttagaagaagacattcaactagtagaactactcttgcattgtgttggtcaacaaaaagcaaataaaaaatttatatgtgacccatgaagtaatatgataattgatagcaagagagagaaaaacaaacaaacaataacataaataaaaaataagtaataataataaaaaagctacacttaactgttcatttccacgaggtcccctagaacaagaagctaaaacctcctcactgattatttgagaagctacactgcgggcaattgagcgaaatataccagacatttctccagtaattgattcaacattggattcagacaacctattcagaagtcctcgtactcgtctacgaatctgagaatgctcctccggctcagctcctttacgagatctcaagtgcggagcaacatatttctgaggtgctttgctgggaacttcatcaagcagcatatcatctctacacaaatccgtcggtatcgacacatcaatgtttgtgctaccttccatgtcactttcttttcctttctctggcaaccttcttttcttatttttcttcctcgcaggcacctcgtccagaacatctgatggagcctcaacgccattcatatcttctggttcaaataattcagccattgaatgggagggtatttcaacttctaggtcctgatcactgatttctattttgcctttcttaattgaggttctcttcttagatttcttaactggtaattcatcttccccatctgaatctaagacagatcgaattccttcaaataataaattcatttcatcatctgctccccttagttttccacccttcaccttaagtttctttgcaagctttctttccaattccaaatcctcctcagcatgcaccgcagcttccatctcaagaaacttctcaaaattggtttttcctgttctctttgaacccatttttctttccaccactgttgactcgcttaattcagcatcacttgaagaatccacgacatgctcaacacccttctccattttagaaggcttttgactccgtaagtcatcatccaactctgacaattgtgtctgttttacattataaggatgaagaaggaaactgttggacttcttcacactttttgatttcatatcccgagaattcttctgaatttttttatttttctgttgtcattaaattaccacacgtcaaaactattgtgcatattaatcaattcatcagtcatggctctcaaacaacaagacaaaactttggggctctcttaaatttagaataaaactcaagaacaaccaatcattactacaaaagcattgaaacccacataaaatttgctcaaaactaccaaaaagaaaataaactccaatacctgacgctggaggtgtacttggtgttttttggaattcttctccaaccgagcttcttttctcttttcccgtcgagatttttctaagagaacagataatataacaggaaaaagaaaaatcaaacacaatgtataaatgatagcatctctcaatcattcgaaaaattaaagtattaaacacagaatctgacaagaagaagccaaaatagtgcttacccatgttctctcgtcactgaagttcttaaagtgatgaactgtaagagaagaaaccatatatgagatagctccaatagtgagacataaacgattctacaacttatatactttcgaagaagatactctaaccatagctaatgaaaagggtgcaaatatcacatcaagggttccgataacaaaatcggaaagccgcatacattactaagagaaaatagagaaatactaaccaaaagaataacagagagaagccgaaatcgcaagagaaaagagaggaagagaattgggagagggaccagagaggggatggatgggagagtttaccggtggctaatgaacaggagaactgagaataggagcgggtcgagttttgaactgtagatattctcggttgtctacctgacctctctctaggtttcagtttcacatttaaaaaataaaaaataaaagcttttcaaaaaaaacaaaaaataaaataaaaaaaataaaagatgagctctatttacgcccaataaatagaccacattattaaaaaaaaatataaactttaataatttttataaattattcttaatatatttttta

SEQ ID NO: 20728 - DNA, 4376 bp, Cannabis sativa
  modified_base (4283)..(4290): a, c, t, g, unknown or other
ttattttggatgaacaccccttggcgtcaaacatttttcacaatatggtgtaggggtggtatgttctccgatgcagagggttgttattacttattaggcctgttgttctatcaaggctcattcttgtcttcgtggctggttgtttggtgtcctaatggtcagtgacaaagccacttattgttccatcatcactcgagtaatgcaagaccataaacatcatgatgaaaacaaaagtatcccattccagctccctactattacgtaattattatgaataaaaaatgaaatttctatctttaaaaaagggacaaagtagaagcatttcaagtaagaagacctcaagaaatacaatgccaatgaatagtacaaaacctaaagcaccatcccatagtgctgtcctaaatgttttccatctgagtttccattggtgtgaagggaattcttctggatctgtaaattacccagtatcccacaaaaacagatccacataaagagactactgataacaaaagagcaaaaacgccagaaccagagctacttgttcctgttcttaccacagacctccccggaatgacatctaaggatatccaatcacagctaatagaaaagtgtccagaaccatgccatggtaacccatccggtggataccaaaatgcaactgacatcttgcttgtttcgccgattgtgaattgagcatcctgcataatgaaccgggtaaaactgtatcagttctaattctagctgtcaagtttaagtaggccatttctggtttttcctgaagtcaactcaacagatatgtccatggaaattattgcacattattgtaaaatcatgttaagaataacattcagtgaacatcatacaaatttccacatacaaatcttatatatagacacacacgcacacaaaggtataggaaagaaaacagaataggaaaattaaccaggttgctaaaattttagttaaacctgttgtagacgatccagggttcttaaaggccttgagaattcataaaaataagtgcctttttgaccatctttggcataaggactatcttcctccacaaaacctgtgatatgctaagtgatattagtgtcaaagaaataacatagtgtcataatacggagtaggaagaatgtggcacatatatcagcacattaaaatataagataaacatataaagcacagaggacacatatttgatatagttaaagcatagttttcatagactggaaaagcaagcctttgagtaagggttttcttatctttaattagactaataaacttctgaaaactggtaagctaaggggcccttaatacaacttaaatactatatactgttaataaaggtccataaataaaaaatattgtctagacaaaacatgaagatcagttaaaggacaatatgacatcctttctttgatttttcaacccatattttttttttcaagatttggcaaaacagtgcacctgtcaactaaattaagtgtccaatgtcaagatatcaaggaaaagttagagctttacaagtataccagaaatatagactttacctgagtgcagtgtgaaactactgtgccaccatgcacctttccaatcattctgggagcgagaatcgtttcctgaaaatgtaaacaatgaacagcaataatatgcatcattagaactcatataaataaagagctaacttccagaggaaaggaaagaaagggagtgggaatcaatataatgattatccaatgtaactaggattcttgaagtttcttcgcgatgtattgcaagaaataaacaaaaattaaaagatgatattctatgccttccagggaagacaagataaatcctatgtaaactttacaaagatgcctcaattaaggagccagcaacaactattaactaaggtatttctcataaccaaatttttacaccaagaagcaataaaatattgacaaaaaaggaaaattgattgttttacttctaatagtgtagaatgggactttctttgattagttctttatggaaatgcaatacacatcacagcactaatccatggaacctttcctggttatgctgcatttcttttattgttccaatttttgtaaagaataagcccctatattagcagcaagcaacatattttttcttaaaaagcaaagggaaatatagcgtagactgatagtttagatacctgaaggaccctttccatctatgtatctacagtgtgggttccaagcatagatatcaactaaatggccaaatctgctcaaagaacggtaaacaaataagatttaaattaaattaaatatcgttatcgaaatcaattggccaaatgtgtgttgctgtgtgaatattctgaaagatgggattctagtgcatcacctatcatcgccattcccttctccattatctaaggggttgctaccatagagccttcctggaatggcatttccaattgagaagtgcataatgtcaacttcatggcccttacaagtcttgctagtgcaagagctaactccttccttacacccacccatctaacacaaagaaaaccatttcgggtttaaattttaaatataaaaaaaagatgagaaacaactattctatttatgaaattagtccacagtaactagtaagtaacttacattatgatatgaagcatcctcaccaatttgaaacatcaaagcaacagatggacattttttgttttcacttcaccacatagaacatacccaagtaagaaaaatgctttacacgtaagagtcaaacactcaagaagacatggaagtgattgatatccaataaaacataagggtcttctcttaatctcccatacacacaacacccattaagggattaaaaaaggaaagtataatgttaaagccaacatacaataattgatgctaaagtagctgaaatggttagaaatgtgattcatagggcaatatgacaaaaaaagatagaaaaatattatcatgctagacgctcactaaatctcaaagcactaactcattttatccttgaaaataaaagtctcaaaagagagagacttatagatttcagatcataaatacgataaagataaatgccagtttctcaattaaaacttaaagagagaaaacgaatgaaagaaagtttttcccgagaaaattagatcataccctttcgagtacacatagtctccatcaacttggagcataaagtacatatcatggccatcatgcaaagcctgtcatatcatataaaaccaagccaatattatacttccagtccaccatttctgagttcaaaatacaaaattaagcatagaaaaaacaataccttaacggtcatttttccatctttgtactcgtgttcggcatctgggtcgagagcggggaggagagagaactcaaatccatcaatgtctttccaatcgtcagtgtgaccatcgagggtgatgaagccgggtctgaactcagcaacgagttgggtttccgagtcgtctgagttgcagctccactcacccgattcttcgtgcgagttgacccgtccgatccacaaggaagaggagcccagtaatgaaagtattaacaggactcgaaacattgtagacgatgagatgaaatgatatgaattattgactttttatatttggttttctttcttcttttaatcgaaaataagaactcgagcaacaaagttccgaggctaaatttgaatagattagtttgttaattgttactaaaattaaattaaacaccctataagaaaatatcatatccaaatcccatttctggtcatatacattgaaataggataattaggatttttattcactaagaattttcacatgtattaaatcatgctcctagaatttttttagtagttaaaaattttcatgaactattgagattgttagatttaaatttttttttctaattttagtaagaaaagtcatgataaaaattcaggggcttaatttagtatatgtcaaagttcgagaaacataatttgatagatatcaaagtctagagagcataatttagtacatggacaatcacaaaattagtaaaattgaatcaaattaaacagaagtccttaaatctaataattttaatagttcagatgaaatttttaacgattaaaaaagttcagagaacataatttgatacaagtgaaattcaggaacaaaaatcttaaacataatcaaaaattacaattttcatttttcatattttttttcagtcacgctgtatcaattggactttaataaaatgatgtcaattttttttgtttttttttttttnnnnnnnngaaacatgtgttacaacacacctacaaggaaggtagaggaccattccatattaactcattatctaatccaagacccatcctagcta

SEQ ID NO: 20729 - DNA, 3539 bp, Cannabis sativa
tcacaaaaaaattatgttgtgactgaaaagttgtcactaaaagtagcagttttttgtagtgggtttagcccggaggaggttagaagtagcttcacctatgcaattactcataaattctccactgtttcagacttattcttgccaagatcctagtcatggaatgtcaacttgataagatcttgcttttctcatgaagtcgctgatgctattatccatatccaacctttggaggatgatgatgatcgagttttctggaaaagcagcaataaggggtttttttccgtcaaaaatgcttactggctctctcaatgccatcgtttccaggaggaaaatgtttgttggaaggaactttggaagttagagctacatcctcaccactctctgttgctttggaaggctatggggggatgtccggctctcaaaactaagctcaccttccttaatcaccaagacagattgtgctacttgtgtaacaatgagttggaaaagggtatccatctcttctgggactgcatttttgctcgcaatctttggtttcaatgtccctgggctttgcttagtggaaaccaacatttcgactcgtttgaaagtctctttttatggctcagcaacttcggggatccaaaacttctgagctatgctgcgtgtgtggttgaagggatttggcagtgtaggaatgagttcatctttcaaaacattgctctagactctattgtaatttctcgcagtgtccacagacggtttgaggagttctatttgggtgtggctggcacccagcactgtgaacttcttgatgttggttgtgaccagggacagtttgtggcttgctttatggttgatgcttctgtggtagattgttctgctggtcttggtattattcaggtggatgaatgtgaatacggctatctcttgccaagcggtgtgttctgttaacagcgtgctagaagcagagttggcggctattcatcttgttttggtggtggctcttgaggagcggtactctttggtggtaattgtttttgactcagctaccgttgttgcaggcactgaatatcaaagagctgcctcttgtgtggggctcctatcttattttttgcaaatgtgtatctcttttgaattccttttcccatattatgtttaattttactcctcgtgagaaaaattatgttgctaataggcttgcctatttggctagagtgaacaatgtgtgcaaaaaatctgttggtagggaggcagttccccttgtgactgctctttaaggttttttggtttaaataaacatcaaaaaaaaaaaaaaaaaccaccactagtgtctagcaatcttctcggtgtcatattacaatattggtgtaattaagtatcggatctcatataacttacagaaaatagcttttagggaatatcgctaaccaatcgtgggacgccacctatagaagatgttggatactattggtgcccaataacaatgctctattcaaaatatgcatcttgtgtgtggaataggaatatgaatgataactaattataatatttgatttgttgttgaattgagtactgtaatcaaaattattttattttgtttggtgtgaaaatgtaatataataaaatgtatattgaccaaaatatctctattacttttatttttataattataaaatatttaaataaaaagtaaagtatccttttgagtttcttttattatattattatattaattttgtaatgtagtataattgtaatgaccattataattttttcagcataatgaatattaccttatacaaccattacaatgtaattgattacaaaattttaaaaagaatagcaaacaaagtaatggacacgttgattaccattataattcctattcgtatggaccaatcatccccaaaggtattgattgaatataatttagaggtgttcatcaaaccgttcacaccacacaaactgcccgcactgcaccacattgcataaaaaacgtagtttgaaatccatggtagtgtggttgcggtttgcatttttccaaaccgtgtggtgcagtattgtttgtagttttgaatttaataattatagtttaaaccgcaccgcactatatattacaaatttaccaatttttacaataaaatttttattattttttttatgtaagaacaaatacatgtaatacatgtacatattgcattatttttttagagacaattcaatataatgacttgatattttttgaaaataaagcgttgatagatagaaaaattagacctctcggtcgttacaaaggatagtatcaggtatcgaggagggttccacaaaacctgaaatgttctgggcaaaagcctaattagccacattatggaccgcaaaattacaacaccgagaaataaacgtaaaattacaagataaaaagtttttagagagttgattacataaataaacataattatcaatattccacatagattggagacctttcagtgctttgataaccaattctgaatcactatccaccaaaatatagttgtggttcttgagtctagccgagtctaaagccagatgacacgccaccgcctcaccaatcagaggatctctaaagttgagcttggaaacagcagcccacataacagtgcccgagtggtccctagccagagccgcaatgcacatggaatctccaccaaccttggcatcacagttgattttgagccagtcttcatgcagaggggtccaagccggagaagccaccagagttgtcgggtgaagtaagcagggcacataatctgtataacaatgagaaatagagtcaatggccattgcaatgttactcgggtgaaagttatgaaccttgtcattacgggctttccatattgtgtcaacgacgattgaagcataaaggaacagcttgtcagagtccactccgttcaacttcaagttccaaagaaatttaacccaatcccaaactcgacccccagagtcagggatcgggaacaccccccaaggggaggacctccagagatggtaagcaaagttgcaatataggaacatatgttccatcaattccacagtctccccacacaaagggcagagttcatcatcaatggggattctccttgccagtaggccacggataggcagagcattcgaaaggataccccaccaaagaaatttatgtctttcaaaaattttggagttccaaagtttgttccacaaggtcggcgcaaccacacaggcaggggttctctcgaaagcctgtatcaaataagtagattttgttgtgaatttgccgctcgcttccttagtccaaatccatctatcattcccttggccacaaggctttccccctttcaagatgctggtaacaatatcagagtcaaacagggacctgagcatggcaatgtcccagtccccattactattaagcagctcagccaccttaaccaccctctcaggacaagaagagatgggtctagaatagaactcattgccatgaacaacccaaggatccgaccaaacatttgtatcttccccattcgaaacaagtttataag

SEQ ID NO: 20730 - DNA, 4421 bp, Cannabis sativa
tttttttttttttgctttgaaagaacattgattgttcattaaagcaagtagttgggaatcacatagcatcgctttgtaccaattgttcaataaaataagcattatgcgatattttaaaattgaataagagtaatagtcaaataatacgttcagccaagatccttaataaatggtcgatagaaaaccaaccatgatttgaccaaggttttagattattcagtcatggaagaggcactgctactagtcccagaagataaaggatgttgtggtttagggaaggagataaagaaactcagttacatagcggcgccaatggttgttgtgtctgtgtctcagaacctcttgcaggttgtctccgtcatgatggctggccatctcggcgaactttccctttctggtgtcgccattgctagctctttcaccaacgtcactggttttagtctccttgtaaacttctcttaacgctcaaacttttcaaatatattgttttcattttctttattacttgtgttaattcagaaaatgataatgatcagtttttcaatgattttccattgggttgttaaacctgtacaagaccaattcggtttccatattcaagtaacagtagtaccagatgaagaaaagagatgcttaaaataataagaatctgaaacagattctttgaaatcatgaatgttgttcaaaatagcaaaaaaaagacccttgtttaatgtttgcagtgattttcagtagttaagataactttaattttaattttgatcttcattttctttaattgtttaatttaactcaatttcactcagttcggaatggcgggtggattggagactttatgtgggcaagcatatggagcagagcagtacaaaaagctgggatcctatacttactgctctataatttctcttatttttgtatgttttccagtatctcttctttggatgtttgtggaaaagattctgattatgatgggtcaggatcctttagtttccagtgaagctggaaaatactcaatttggctactccctgcactgcttgcctatgctatacttcaatcattgatacgctatttcctcactcaagggctgattctcccaatgcttttaagctcatgtgccactctatgtttccacgttcctctttgttgggcattggtatataagttcgaacaaggaactactggagcagcattatccattggcttctcatattggttgactgtaatattccttgtgatttacatacagtattcttcagcctgtgacaaaacccgcgtttcgttttcgcttgatgtatttcgaagcattccagaatttttccggtttggtttcccctcagctgttatgtcatggtactaatctcattttctacaagttcggtcaattgtgctacgctgctttttttttctttagaatttgagttacaactttataacatgggacctttttcatattaatattctcttttgatagccttgagtggtggtcatttgagctacttatcctgttttcggggcttctaccaaattcgaaacttgaaacatcagtcctttctatttggtatgatctacattatcttcaattctctacgagtatggtatcttaaacctgttgttgcctcttacttcctaacgaaaatgttcatgagcagcctcacaacaatgtcattgcattatttcataccgtatggtgttggtgcagcagcaaggtttgctccagctactatttaccaaaaactattttcttatgcacttttatttctctaaactgtacttaataatattttgtagtactcgtgtttcgaatgaactcggcgccgggaatccaagaggggctaaagcagctgtcctagcagcaacaatgattgcagcagtagaagccatttccgtgagcacaattctcttcagttgccgttctgttttgggatatgcttacagcaatgagaaggagatcgtggattatgtcactcgaataactccactgctttctttctcagttatcatggacagtgtgcaagctgtgttctctggtttgttgcctatatttatgttcattgagtttacattttaggcctctttatgtagatattttatgcccattgcaaataggggttgccagaggaactgggtcgcaacgtttggcagcttttgtcaatcttggagcgtactatttggtgggacttccacttgctttggtgttgtgttttatgctacagttaagaggaatggggctttgggctggaatattggctggtactacgactcaagcccttttctatgcactcataacatccttcactaattggcaaaagaaggtttgtagtgaaactttgtccaactccaaagttgaatatttttaatctactcagatcatcattttgacataaacaaagattgagtagaaatattgctattatatgtggttatggtgcaggcagttgaggctagagaaaggatatttgaggggactagcgttggtgagagtgtttttggctaaactatgcatactccttgtgatcaggccgacccatacgcagacgagggagacggtcttcccgttaaaaagaatatacatatatatatatatatataaatcatgtattttaattaaggatattctacgaatacattaacatatttgtaatagagggtatacattttaggttaaatttggctaaaaaaacgagttagtgttatattgctcaaatattacaatttttctctaatacgagtaaatttatttatttatttatttattattttgataaaaaatgtgtgaaaaaaaaaaatcaacaaatacattaaattaaaagtataacaaatcttattaaaaaaagtatataacaaatctaattaaatatataaaataaaatataaaaaaaattatcaaaggtactaatgaatgacagaagattaaatataaatgtaatatttattatggtgcaaaatttgatttatgatatattttgtattaaatttgacacaattagtatgtgtcaaatttagaccacattatacaccaccactaaagtccactaaagtccactaaagtttaattttatgaacatgactaaaaaatacaaacacaatatcattataaagatcaaagggtgtaaaataaattaattagtaaaatataatataaaataatattaaagtctaatataaaaaaaatatatgtggcaaaatatatattatgaaaggaaagaaataataccatacttgaattagatcgtgtgttttgtaaaagttaacgattggacttccactactacaacatgggcctttagaggttgtttttcagcctaatttttaaaaagagaagctaaagagtaataatacctgcctagatcgaaattgacatttagaggcagttttttgataaaaatcgtaggtatacaaattgataatacctatgccatcacttgggttgaaaaattttcagcatatataattacactcatgtcgtcggttattagcaaaataactggcaccatagctgcacattttattgacacgtgtgcacctatgacgtcagttatttcctaataataataactggcggcatagagtgtgtatatacaacatcagacttcatcttccccactttgtcttcttccttccttcaacacgataacaaccaccatagcagaaccacaaaaacccacgaaaccctcgccaactaccactaaaaattactatatctccctcatttctacaccattttacgccatttttcttttaaaatcttttattttcaatacctacaactatagtgtaaaaaagtttggtttttttccctctatcactgtaactgaacccattaaaaaaaaagtggtggtaaaactccgaccactaattttggtgaagaaaacgttaaagctcaacgtctattagagtataaatataatttttattcattttattaatgtatattgctttatttttcgtttttgtaattttctttagaatttttccattttattattattaagttgttgtgtgtgcatggtagtcgaattattgtcgcaattagtcgccggattgggcttataatgtaaatatttattaacttgatatataatatatatgtatatgttttgtgtaaattttgtaattgtactgtatatatcacattgggccgggccgggttggttcaatgggttacaaaatttccagcccgtgatcaacccaatagtaacgggtattgtaagcttttcaacccagcagatattcgacccactaaaagagagcatgctcggcccattttcaggttgggttggtcggtttggtcggcccatcgggctaaatgctcacccctatatatacttttgaattgttacataaatatttgggccaagatgcaaaatggccctaaatttaacaattaagttaataaatgtccaactttaaaaaaaaaatt

SEQ ID NO: 20731 - DNA, 2064 bp, Cannabis sativa
aataataatatatttattttttatacacaaaacatccccaaacgttaccgatgagggaatccaagaacaatatattaaagtttcaaaaagagatctaaaagtttataacatattatattattatgttcaatcaagctcttcaattaaacgggtcctactacctgtacttaatgatcaccatgttgatcatgatcatgagccgaaattatctgcaaagccttatagatctcaataaccaatcttctctccacttcatccccagaataaacgattgtattacgagctggcttagattttgggattcgttttgctccaaaaacattattagtgttcaaagaacccacgttacctgccaagctgaccatcatgttaacatacccactctttattttactccacagcttcagaggcgatcttccaattaatcgcagtattcgcagcctctttggagctctcaacttccactttcgctgcaccggctcactaccaaaccgcgccaccgctagcttcttccgccctcttgccgcatcgtccagccgccggtattttctccgccgccaaaatcggttgatgtttctatacaagggttttggaagcaactccataattgtgctgagaatttggtaagatagaagtgcaaggaaacttttctctctttttttttcttggttgacgaaaaaattaaactaagtctgttaaatagggtgatggtagagaaaagtagtatggttgatatttgaaaagtatagaaaagctatatatttatagagcaatgtttgaatgaaagggtattattgtcataaacatttatatttgtcaacaaagtcggtaaaatgtatgaccaaatcgtttgccacatttttttaatggttgcacacttgtgtttcttactcaaggagaggttggtgccacccaacattattatattttacattgaaattgtttaatttttaacattattggttcaaagtgaataacagaaaaggtcatggcttgttcaagtagagaaaatgtatatacaccggatctaatgtagtgttaaaaaagtcaacagttattttactatatgaatacgtactaaataaataaatttgtaaaactttgatttacatcatgaattagaactagtaataagttaaaaatattaacgattttttccttttgttgagctaataattaatatatgccggtgtaataagtgtttgctgagctttttcactatatatctagaagtatttgacaatattatacgttgtgattggtagttaaaaggggacaaaccaattgacatttagaattcattaattagcggatcgtatatatatataagcttttaaaaattaggtttatttatatctgttttctaagtgttagcaaattgcaattaattaattagaagcattaacacgtattaggactatgacatactcatgaacgattgcatgttccaattcaaattcaaagagtcatattggaatagattattatattaatatcattactataatgtgtcaaatgttacttcgatcgaaatatatgtatattttattttgaaaatccgcttaattatagaaggaaaagatatgtagtcgtatgtggtgtacggtagtggtttcttgcactttggtcaattgctgtgctgccatagtactaattttctactttttcttccgaataacgtttggaatggataacccaccgccgatacactgtccatattacttctcttattcatttttctttttcattttgacatcaacttttcactttgctatatgattctccattaatttattcatttagatattgcggaaaaatatgaagtacacccaaaaaaaaaaaaatatggagtgcacccaagaatttattaatttaattttttcttcatggttgttgtagttatagttttttttaggatcattctcaaatttgttaaattttttttgaataattactgaaatttttgaaaactaaaatattcaagaagtaaaaaaataataaaaagcggaaaataagagagaaattttttttacgtggttcaggtattaacaaattctagtccat

SEQ ID NO: 20732 - DNA, 2627 bp, Cannabis sativa
agtacaacacactaataacgcatggagtatatagacaattgataaaaagcattgttgattttcttaatattcttttcgttgtcatattattatgagtataattaagtatcaggtcttatttaattttaaaaaataatttttaaaaaatattattaacgtactcgacactaatgattataacaataacatttattatttatataaaagaaaagacaaaagtaatcaaaatttgaatttgttccttccaaccagaaatgaatatgcaaagatgttaaaaagggaatgcagagagaattttcaaacaagcaaatcaatattataaagtttaaaaataaaattctttaataatcatagtgcagaaaaaaaatattatatgtatatatattctttagcttatcctgtaaatcatatgtatttttatatatacaaattggtacttaaatatatatgtaaaaactaaaaagtgagtagatgagtgaataatgaatatcttgggaaaacaatatttatagcaaaaaatatattatattaagaaaaaaaaagtgttagaagtgagagttttcccgacaaattcagtcattaaaagaaaacaaaacacactgagattgagagtgacagttacttagagaaagatgcctttgagggcctacttattaattttcactatcttaattaattaattactacaattttattaatgtaattgaaaaatataatacatatacgtaagcttaacttaaatttgaagtcagtaactcagtaactgaacaaaagctctgcttattgcagtgaataataatatatatatttaagagatgctaatcttattttggattaatttttatatcattaatatcaatcagtcttgtagtaagtaccatcattatcagataatgttacctgctgtcacaaacagtcagtttctgtttaagatttgctagaccaaatttccacatatcagagagtctcactgtaaaagaaaccccttcaataaataaatcatgtttttttaactaacttttatattatcttatatattatgggaaaagattattttagatccactatttacaaaagttattagttagatcttcttttgttaaatgaaaatggatcttgtattttttaaaattatacaaatagaaccatgaactgatttttttattaagatgttatgacaaaagtggttatatttactgtatttattcatgttaaaaattgtcttaaaattgagtatattaaaaaaataaaaataaaattattgaaaattgaactcagagtcatattttaacaattttaaaaaatataaaatattttattatttacaaaaataaaaggtaacttttattaaacacaagttataaaatagtatttatccatataaatataaatgaaagaaaacaataataaaaaatatatttagttaagaggtaaaccttatctaaatggagatgtaatatttatttatgagctaaaattttaagatactcatctattggaagggtcatttgaagagtattgaggtataatttagttttgtagctattatactttatttattgggagtactcttagagcagtcaataactaatgtaaaatagttagaaaggttaaaaaatagttaaaagttaaaaaaaaaatgtcaaaaatgtgcatctaataaatgagctaaaataacttaaaaatttaccttatgaataatgcttagctaaatgtaactaaatgttatcttagttttagtacttagttataacttttttattattataatgtatttttttaattataagtgtaaaaataaataaatatcatataatatacaatactttattatttgtgtgtattataaatatagtatttaaatgatttataaaaaattatataatataaatgtgtgaagtaaaataaaataaaaattaaataatagagtaaaaaaactgttaagagttctcaccatacaaaaagataaaatctttaataaaatagcattttttttttatttatacactaatatctccttcaaatcgtctttgtcacaataaaagttatttgtgaccacttaaaattcttcttctttttttttttttggctatattattcattaaaatataaagtaaaatttatttgaaaaagtgagattatttaatgccactttgcttgaattgcttcatatctcattctttttattgaatggaaaagaaaaagaaattgtatttatatatttcttaaagtggaaagatataatataatataatatggtgagaatctatagaatatttattaacaaactataagatatagtattcttctagctatttcaatctttctctcttgtgaattaagaaagcccaagtttaaaatagctagcccagcaaagtagtacaatgcccaaaagcttcaatattcttttctccctttacttgtttttacttttccctaaaaaatttgtactaagaaaagttggagaattaaaagagaataaaacatatatgtatataagtgtagtaggatatggagtgacgcctattcgaatgtgtagaaaaaaaaaaaagaaatttacatggtatactaacttttaccatttttttacaaaaatactgccagacagtattttttacttttttact

SEQ ID NO: 20733 - DNA, 1965 bp, Cannabis sativa
  modified_base (374)..(376): a, c, t, g, unknown or other
atacatcaatttctctattttttttttctttatattatttaaatattatatttttaatatattttatttattttatcttaataattcatataatattacactcgaaaaattaaagaaattaatattaaaatatatttagctcaatgaatagttatctctatatttagctaatcactattcattaagctaaaagaatatgtaaaacaattaaagtttacctcacttgttgaaatcttaattttataattttttctttataatttaaaaaataaattattttagcttatctattaggaatgctcttatagaaaaatgttaaaagtagcaccttctaaaatattatatcaagtataaaattttatataatttaatannntaatttttataaaatattattaactaattataaaatattactattataatttactggtgtataatggcaatattataactataatattctattaattttttataaagtttagaataatttacaattgaaaacaaatactatttatttaatttattttttatatttttaaaaaatcctcaatagtttttaattgtatttttggcataggaaaactagtagagaatgcataatacataattatgatataccttggtttaaaaaaaaaattataaaatacatttttatataaaaaaattataatgataatttatcctacaccagaaacaattttttttagagacaaaaataatactcacccttctaatatctctctatattattgacttaataatttaactcatccaaaattccaaaactggtcaactcaacaacatactacgctacgcgcccccatcccatcctctctctctaaacagttgggtcaaccaaacagctttaattaatttactgggtcccacccttgtctttgtactttctctctcttcttcaccaatctttataagccatcttaatcttcgaatagaaagaaaaaagaaagaaaaaacttctctcattgaatttacattatcttcaaacatatatacatgcaatgcagtcaccggtatcagctgccatggacgaagaatcagctctgtttttcccatcagaatcagatctcgacttcagtttcaccagctttaccactgctacgtcatcctcaaccacagctcgcaccagcttggctcgcagcagcctcaccctcagcttcaacgatcgcctttccaccactcaagagagcacaaatacgacgccgctttgttcccgtccccaccgtgccagggacccacactggtccgccattaagaccgctctcaacctctcctccgatggcgctcttcacctccgccaactcaagctccttcgtcatctcggcacaggaaatcttggaagagtctttctctgccgtctcagggattccgatcaagttaataacagctgttacgcactcaaggtcgttgataaggattctctgagtcccaagaaactctctcacgtgcaaaccgaggctgacatcctctccttgctcgaccacccttttctacctacgctttacgcccacattgaggtctcccactacacgtgtcttctaattgactactgctccggcggtgacctccactcgctcctgagaaaacagcctggtaatcgtttatcggttaaagcggttaagttcttcgcagccgaagtcttggtggctctagagtacttgcacgcgctgggaatcgtgtaccgggatctgaaaccggagaacattctgttaagagacgacggccatatcatgctgtccgacttcgatttgtgcttcaaggctgacgtggtccccactctaatcgaaacgcgcaccacccgacgcgtgacttccacgtccgggactgagtgcagttgcttcggctgggaaaatcttagcagcagtagtaatagtgatggggtagaatcggagggtgaggagacggtgacggagtttgttgctgagccaacggcggcggttt

SEQ ID NO: 20734 - DNA, 2506 bp, Cannabis sativa
agggtccaatctgtaacttttgcaaaacacagtgtccaaaatggtatttatcctatttcctagttatatttgatttgaacaattctgttatttaagagtcaaaattcattacaaaaaccccaaaaggttagagaattgacctttcatattgtgtagtattaggaaagggacaaaaccaaaaagtttaagggcacttattttgctatatatcaagtcggtacatagagataaagtcaaaaagttgaagcacagatattattatgttttgatgccaaaaagtttcaatggtacatagtactcataactgaattttgttgttttggtatttgctgcatgtgaacagaagttacagaattgtgcatgattcttacatgctttgaaactcagaatgaagcataacaatgtcattagccacttatttgacatgattcttatttctaatcataacaagacgaataggaaaaatatccaatatctcataataactagccattgaaaaatattttattattgtcgctattatatatagtgctctttatagattcagctgtggcataaaagaaacaaattaaatacagtcatgaaagttgttatttgtatattgcaacatgaagttgagattgaagtggaacacgaagagcaaattattgaaatcaagaggaagatagaacaacacttgggcattgcgatgagttcacaaactctttccatatttggatgggagttatttgatgaactgtacatgaaagattatccaatgatcagtgaaggaacaagaattgatctcaccatacaaggcattcaccaaaatcatcatcttattctaggccaacccaataaaattcaaatacttgtaaagctttcatctaaacaacatcatcacatggaagtggaaagaacagaaatggttcatagtctcaaagagaaaatccacatcattgatggaacacctatgaaaagaatgtcacttttcttttcaggaacagagttagatgacgattatcgaaatctaagcgagtatggagtatgcgagttttctgagattattgtgacgcacaaggctgcgaatcgcttaggagatggtggtggtggtgagctaccgtcaagaaaattgagcatagtagtacaaacttcatctagtttgcttaatggtgcatgtattcctttgaagttgagtgactcaagtactgttaatgacttgagggaactgcttttgagtgggaaaattcttcctttggatgattacctgttcatacacaaacaaaggatcatgcgtgattgttctagcttaaggtggcatggagttgaagatggtgacttcttatatgtatttaagggaactgtcagtcgtggtgaatcttcattctaattgttattacagctatagtgaatgttagacataggcaattgtagaagaagattgttatatgcactaatctcaattagtcaattacactatgatattatttagttttaattctaaagttcactcttataattaatattattactgcaatagtggaaatgttcttttccaagtgaaataaacaatgattattgctattgtttataacatcaaaagtattaaatttgacaataataactaccaaatagctattaattgagaatattatgtaaaattgtttatgtttcatcctataaacaataattaatttcatataaagagggaatgaatcgtaaataacatttccctatatataattattacattcttataatatggaattacaacatttttcattcaaactccaatcatattgatacatcaaaaagatatatgtatcattaattaagagattaaactcacttgtcacttgattcggaagttaaataactatacattgccaaacacataaacaaatataaggacatattaaataatgtatgttattagtgaaaagaaaaggggttttcatcgggaggagcaacaacgagataaatatgggagccatcatggattccatgatcagcaagggtgaccctgctaccagctgctgctgctgcttcgacatattcgtcgttgatcggacggttgtgattgccatcattggaaaggagagtcaagatcagacggtcataagggagattctcttgggcagcgatttggcgctttaggtcgctaacagtgtcatcgctccccacttcaatgtagaatagagttccagtcaagatctccacaaccaacttcatttttatttcacataattattaagaaacaatcaattcaacaaattgttatatatataggactcatcaacgtactaaatgttcacatttgcggcattctagcatgttagttggttttttatttaaaaaaaaaaaatgtccataatgaagtatatgagtatgacatacataaggtgtgcaatagattggtcgtcaaattaaatccgcactattttgctcgcattcgatctacattaagtgcagattttatttttttggatccaatctaattcgtacaatagttcaaatccaatctaat

SEQ ID NO: 20735 - DNA, 5210 bp, Cannabis sativa
attttatttatatttacttatactaaacaaaattttaaaaataagatcattcatgaaataagatattacttaccgtaacaagtggtgtaaattttaccgattacattgagtaagaattacaggatccattagattttgaacatttctttattcttatgaatttggactattttaacataaacaataaataatatcatcataaaaaaaaaaaaaaacatatagatagacccgggccagttttctagtaaagtaactcaatatagcatacatatatttaatattttttcaagttttcaataataactacggccatccatattgaagaaaaagaaatttggtaatatatccacaaaattttagattgtaggctaagaataagatataataaatgccaaaaagaagatatatcgtacataatgaattaaattcctgactcacatcctctgccattacatactgcacagcctcaaaggagaataacaaaaatctttggaaacagctttccatctcgatctgatttgacaaggccaagcaactaaaggctttctttgcctcctcttctaaaagagttcattatcccaaacttaccatataacccccccactctacattatacaccaaagcctctcccaggctcaagaaattgatgtcagcactctgcaccctgctgcatataaataaacaaatgtcatcatgtcattcgcctcggcattccacttaagataatcatggtttacagcatagtaaattcagagttaaacaaaaaacctacctacctctgcctactagtcatttttcttggctaaacaattggaggcgtttgatgagatcttctttcaaagactctggtatttgtgaaagaaacttggatttcgcatccacaatcaacagcttcctgagttatgacagtgcacaaatggattagactttgttgatcaatacaaagaatagatcgaaaactaaatccaacctcagtgacagatttcacagttcaaatctgagacatttgctgaaaattataactagatgtcaaagtacttgaatacttttgagctaagtatccaatgatgaaaattattaattattggcatacaacgtgattttgcagcatatatttgcaatttgtaaatagaacgactgattcagcttcttcttctctattttctctctcccatatatagcaagtaaaatctatgacggacaaaatgtactgtcacattgggctatatgcagcctctagaccaaatcaaaaactaaaacaaataaaatttaagaaaggagcaataaaaggtgcattacgacacacaagcttgaccttaaatccccaaattctatgaatctgttatgatacacaaaggggtcaagtacaaatatctctaccaactgtgtcaaaatagcacagcgagttatttctttcacgggaaattttctgtaatacaaagtttttcatcctcccaaaacagtttctaatgtaatgtgcctcccaaaacagttagaagcgcaataaatataaatttctaagaaacgtttaaaaaacaaaaaattgtattacctttcacattttgagcaattatagaataaaaatggatatttacaactaataagaaataccacaacaaaattcatgacctgtatcaatgttacatgagtatttatcaaacagcccacaccgcataaaccgctcgcattgtaccataccacataaaatatgcggtttgaaatactttgcggtacagttgtgttttgcatttttgccaaaccgggcggtgcgatgtggtttgcaattttgaattgaattgcggcttaaaccacacaacactgcactaatataaaaaataccaaaattttaaatctatgtgcaactactacataattgataaacactaaccaagtttgtatgtaaataggaaacaacaagaagctaaactataccttaactcattgtcagttaatgaagttgttccagcttcttttgtacgtaacctcttctctgaactcatgaaactataaactttctcggaccaaccacatgatcgcaaaactgaagaagcttctttcgcaaggctgatgaaattgatggggtaaaaggtgttaaataagcaaacgaacacaagtaaaccaattgttaaaaagctttagacagaaaaaagggagtaaaaaagccaattgttttcaatgctacagaacaggaaatgtccacacgcattcatcaaagggatctactcaatagacatagtaatcatcatgaaactgcatcttgactcttctcagaacatgtcacaagacatgatgtattaccaaaaaccaacgtaaacgaatcacaaattctgcagaaaatactacatacatataacagaaagaaccactaaaacacacacaacaaaaaagatttccagaatgaagcagcaacagcaatggactaagcaccttaaccaaattactttgaattgataaataattatggcatgaatgggaccaatagttctccattaactagaaattattcaatctataatgttattccctccttttacaaacatcagcaacgtctcaagtttagaagacaaacatgataaaatcatgatccaagaaaataagagcaaaacgacttatattttgatagcaaactcgtctaactcatacttgcctaaaaatcatcaattagcaaagttagattttattcacagatttaatgtagtttatgtctaaaaatagaaaatgacataataatttttttaaaagataatattaatgaaggaaagatgccttataaattgtttttttacccctcaaggatgatcagtgaaatgattgatgcttgatcttttaagtgacgtgagtataaattagaaagaaaagcatctttcacagtagtatttagtgtgagtatttgagcaagaaaaaaccagttaaggaagccagttcaagagtcagaaacacttcaaagggagtgaaggggtgtatacttacagtactttcaaatcttcaactttcttccgagattgagcatcctttgctaataaaatgcaagaatcctccccatattttcttttggaactaggcaccttagcaccaccattaaccaaaccctggtgatctggtcttgtttttaactcgtctcttgtaacattctcactaatctccagctctttagtatgaggattaccacatacttctgtgcaaacagatgctaagccatccttactggcaatgccattagctttcccattgctgtttaaaccatttttatttaatgatattgacttagccttctctactttctccaaacaaatggtcttttttgcatccccattacttcccatagacccattcttggaaattttcccattactgattaaagagggtcctttggaaatagaacttccattaatgttgaacttaatatgtgggctggaacccactttatcagccttagaaacagctaacatatccattcgagaagattcttcacatgtctttgcatgcattcccttgagaggaatagctgacttcagacttttagatgcttcgtgaccattgcagtcttgggattttaccccattcaaaacagtgtcagcaagggaagagctaacagattctgatctttggctggtacgagaaaagaagagaacataaaccttttctgacagcacctcttgaacagtggaaagtgatacatatgaatcattgcaacaataccaccgacccattgcatcctacaaaagttaggagaacaagggacaaagtatggtgagctgacatgctttctccatacatatttacaaattcaaaagagcattatataccttaatatatgcataataatgtccagactcaggtgagaagcctgaatgaacaatagtaccgaaaagcttatactcaggtcgtggatcctgcacatgagaagagaaaaaataattcagttcaagtagacaaaacaaatctacaaaaattactgactaaaacaaaacaaaacaaaacaccaatgtcacagaactatagtccaaatacagagatttgaaaaacaaaatgttcttacaacaatacagacaaataaaatgaagtctgaaatttaaaacgacaaatgctattcatacatccaatacgtattttttttattataaaatagggattgaaagcccttaccccttccaaacacactcacacacccaaccatttgagctagcttcaagcagcctattcctacatccaactgatacacaatccttccttaaataaacttttttatctcattacttgcaaagaatctcatcatacagaaaaacattttataatgttatttgttaggagatatgctatcctgttagcctggtgtacttcagatgtttttgtgctaattgattcctcccacaacattatgacactattagtagagcagagagttccaacacaagatccataagattcggtatcagtcatattttgctgtgaaatttaactttattatgtaaattgctgtggagattttccttggagtaacaatccctaggacataaagttcataagttgtagcagtttgcattctaaggaagttgtgtatgggtcactctcacttataaaatctatgcttacacatctcttctttctatggtagctttgatggcctaggttgcttgaaagtatataaagagtctgatttttagaaggattactgaataaggggaggagcttttgaagaatcaatgtgataatttccagaatttcagaagctcatatcataatagacctattgctttattcaagctcatgagcacagaaaggtttgcagcagcaggggcagcggtggaagtttcttttccattgtcaggatatagatgactgagaaatagggtatcggattgaagtactctacttgaatcagcaagaaactgcagtatgcataataatgagttctgttgcaggtctttcgtgcatttcttaaccacaaatggtaattagcatagcttccagctatgttatttactttgaaaacaaaagcacccaggtttagcctttaagtgttcaactggatgcggggtttggaagattacaaacataaagtaatgcaggaaaggaaaaaaaaggccatccgacgaactgcttccaagtaagattattttaagtggctggttgcctccatctaatattaactaagcgtagagcggctgctgccttagtaatatcaaaggattatggtatgataaacaatt

SEQ ID NO: 20736 - DNA, 4306 bp, Cannabis sativa
  modified_base (3779)..(3782): a, c, t, g, unknown or other
tatatatatgtaaaaatatttggtgccctttttgcttttaacaggacgtgtagaatggtcagataaaggacataggaagtgaagtgtcttattctctggtgaaggtggttgccactacccattcaatccgaagactttgatctggtgaaggctgatatataaatacatacatatgtacatatatatttttttatagacttggtagttgaccatttgggcattcttatctggaacttgagaaggtcaaattaaagagtggtgttttgctgactttctacaatcccaagcatcaatgaggcttcttggaagtctcatgatgcttttacttctgatatgctttttatggctgtcagatctcaatgctcaatccattcccgagtcttcaggaagccgtgctgaagctctagattcacttctccaagagtatgcttacagggctcttgttcgtccaaagactggaactgtctatgatggtaatgttccgaccaatttaacaggcataaagatatcggcattgaggctcagaagcggtagcttatacagaaaaggagttaagtacaaagagttcaatattcctccgggtgtctttgagactccatatgtaaagaggcttgttttggtgtaccaaaacttgggcaatcggtcttccaccttctacaatttatcgggttatagctacttaactccagtactgggtcttcttgcttatgatggttcaaacttagaagccaagaatttgcaagagttggatatcagagtaactggtaatcccatatcgattagattctcaaatgtttcaccagccccctcgagggaaacagcgaagtgtgtttggttcgatctgaagggtgtcccaaccttcagtaatgtaatatcagacaatgtatgttcgacagtccaacagggacacttctccattgtgacagagtctattgctccttctccggcacccacatctcctgttccaactccaggtttccaacctccaagcgagattcctgcaccaaaaggcgaagaaaataacaaggggaagagcaattctaaagtatggataattgtcgggtctgtagttggcggagtggcacttttaggactcttggccttgttgcttctttggggacaaaaattccagcaaaaaaagaagatgcagcaaatggagagggctgcagaggttggagaagcactgcatatgaccccaatcgggaacacaaaggcaccagcagcaacagttacaagaacacaaccggtactcgagagtgaatatgtgccttagacaaaacaacattattgtgacaccatttgtacactcggaaaattcgatattcaaagttcattccctgtaatcagaaagaaaaaagaaaaaaaaaattgacaccacttttcggtggcgcgtcttcggtaggttgtttgtttagtgtgagtaatataggatttttgtgtaattttcttcccatttccctcctctttggttcaattattctttactgtgtgaaatcagccagatagtgattttttttcctctttgtgatgaattcagtttccccattgactaaaggaataaaatctgtccagtgatgtttttttttctccaaaccgattgatgatgagttaactgttattgagattgttggatttaacatattttgtctaattttacggttgtgttcgaggtccgtacataaacaattattgtgttactaaaatataatgaaattagacaagtgacaacttggatgatgatgagggcctaaaattcttcatataatccaatcatttcatccaacaggtgagaacttggctttgctacaataattttggtatgttatggactttgaattgttgcaaattatttataaccttaacattggaatgtggaggtaagctcttatgccattgctaacacaagaaggagatcatgaatttaggtggaagtttttacagagctaaggtgataatacaagtgattttattatgggatattatttgtgtataacataggaacgtttaggattgaaagtccaaagaaatgttggatttgagtttatttatccaacttagctgtgggatgaatcatttttagatgacattattttgatttttataaatgtattataaatttaaaaagaattcataggggacaatgaagagatctatatgtatatagtattttttttttttaggtgagagcatttgtgtttggcaattgattaattgaactggtgggagtatagggttgttcatcaaaattggaaaatggattatggaactttctgaggcttttgaaagattgtgtgggcacaagggtgaagtcttgttgtccaaaaaaaattgatccttaaattccttcttgtttggaagatctacaatgatcatgcgatcccccgtaaaagtttcaaagtaaaagaagccttcaaaataatttttcttcacttgactaaaaagcaatgttaacaggaggtaaaaacaaatatttggctaatgggtatttagtaagataatggggctcaggccaaggccaagcggcttctagcaagaaagaatatttaccctcaagaaagaaaaaataaagagacaatgaaggcatacaaaggggatgctgctaattttgtgcttgatgtacttggataacaatggtaaaaatagtggtaagaaataaaatgctagtcttttaagtaaaatcgtaagcactgtacgattaaaagatatatttaatcaaggacgattaaattacaaggtagttggaaagaacatttatcaccaaagacatggttaactctttatcgggaagccaaacaccaccaaagcaaaaatttaatgagcttacttggtacaaaaaggacaagtgacaactatgatttaaaaagtcttttacaaaaataaaaaatattttttagagggcttttgttatgcccatatttcgagcgccaaatatgaacacaacacgtgtcatataagtctaaaagaagaaagagaatagtaaatgtgaggaatgaataaataacatgcctcgggataaactacggttaaaaggatgtgatgacgtcgcgtgatactatcaatactgattcgcgagaataacaggattacaagttaagtcctcataacttgaccgatatgaacaaatgttttgtgaggataacaggattacaagttaaatcctcagaacttgaccaagatgaacaaggcaagtgaattacgggaaagaatgagttaagtagaaaatatcgataacgagttctttaagagcttgtaactcattgactcacatactcgtgagtagtatgttgaaagactaagagaaataaacataatacaacttatatcaaaagactaagtcaaagggttgccctgtaaagactatagcgatgacaaatattttaattaacatcttgcagaatacaaccagttatcttcgaacaccgttgaataatgtgagtcatagctagaatgtgtcatcttggtaaaggctaactactcctcgataagaataaaaaaatggttaccaataattattttattttatctatatgttgtaaatataaaatatggggattatccacatttcatgaacaattacttagataagatcaaagaagaataattgttattcctagaaccctgcaaataaagagagaacctaaggggttggagattgatcattttggagaggagagaccttgtgagattgagtgaagtttcatagttatttctctatattctaagtatatttttaagaaatactcaaaaaaaattaatgactcgtggagtatgtagatttnnnntacaaaaccacgtaaaaattcttaagtgttctatatatttattaattataagtattattaatttttttttatttacaaggctctttatttattgttaacaaaaatctgagttaacactaagcgacaccttaaggtgtcaagtaccacaagagttggcataccggtattggtccaatgcaatatcgggtcttatatattttggttaataattaatgtaaaaaattactaatcactcacaacacgccacatcaatattgtgtagggcagagacggagggagactttgaattaagagggccaaaagaaagaaattaaaactagagcttaaattgttatttttgaaaaaaataaaaaaaaaaaacataaaaaataaaacaaaattatcattattttgaaattttgggggtgggggggagtggccaccctttgcataaaggtggctctgtccttggtgttgggcacctctgtgacagtcagtagtcccgtgatccgtatggggaaataccgggtaagctgtgcaatccc

SEQ ID NO: 20737 - DNA, 5158 bp, Cannabis sativa
aatctaactatttggtgattacataactgtggggatattattattcttttatattgatgagtggtcctgattttgttactaatattttcttattcatataggagttaacccctatcttttaaattagtatttcttgatataaatataaggatcaattataagctttatcttcctacaagggtcaaggtgtgacctttgaccaccaaagttatggatattacatatttgccacgacctagggctcgggtcgtgacaatgatccccaagatacactagaagatgatcacaaagacatgcctgctgacggtggtgctagagagaaagacaatcctgaagagacagatcatgtggtcattatggctaagaagttagagttaactgaaaagaagttgtctctagaagattcattcaatgtgataatgcctgagaaaatgaaacgaatggaagttgtgatgacaacactgactaatggaaacaaaactaaataaacgattcaaatagatgatgctaccagaaaatctaatcctaaagatcctagaacctctaatcctcataaggataaaggaaaagggaaaatatgtgaaacttttaaacaaaatttcttggcaaaacaacaaaagaaatctaaaactgttagccaaaatcaatagaaaaagaaaggaaaccatgcttcgcggcagggtgaccagactaattctagaggcaaaggtgcacaaaaagataagcccgatgctggtatcaaaaagcctacttcctagaagggcaagagtcattgtaatgattctagcaatcaaagttatgatgttgatgagttgcatccagtttcagatagtggcaatagaagtctctccataaatcttcttcaaagaaggttaaatgaaaagaaagagaaagctagaacagaaaaagtcagaccttatggggacgatttgaggaatcacatcaatgatcgaatttgtggataggaatcttcaaatgataaaactcagcatttggaataaaaattggaagagttatgaagctcatgaagaatatttcccaaaatttgaacgtaatggtgtccaattaaaaggaagaagacaccgaataatgtctgaagagaattatagatgcatcgctactggagcactttagaatgcctcaaatggaattttatgaagtcaggatggaccgcagggaccacttgtctaaatacaatcgcatgatgcaagtggctaaggctagtgatgatgtaaagtgtctttacttttcactgactctaaccaaatccatagaggactagtggaaaaggctatcgtcgggatcaatccacaactggaggggcctacaaaaaatgttcaaaaagcagtttgttgtaatgaaggactttgaatagaaagccagttcccttactagggtcaaataacagctaggggaaagactgaaaaaatacattcaatgcatgatggatgttgcagtatagacaaaggttactaatgatatgaagatgttggctttgacatcagggtttaccactggatctttgttatggggagaactccaacgtagaagagctaaaactttgactgatttcctatagagagcttaagggttcatcaaactagaagatgcctatgctcaagcgtacggaatacttcaagcaccttttactaacacaaaaactacctacactttacaaatgaccactccatcaatattcccttcataaactacctttacaactcccacagcttacagattaagagcttctgtgcagccaattgcacatgttagtttttccaaatttggagtggcacaaactgaataagtgcctcttccaaacaaacgaaacaaaaagcagaagctccagagtccaatgtaagccaatcacagagcaaaaggggtttcaagggtgtaagcaaaagtgattctacaaagaaagggaagactcaagaatcaagatactccaagtacaccaaccttgttgatactcaagagaatgtctattaagaaacatgtaacattgtacattacaagaatccttcgccattatacaagggtgtaaaacagaaaagagacctaaataagaggtgcgaataccatggagatatcaggcacaccaccaataaatgtgattatcttagagattagattgaaggattagtatgaaatggtcatttatccaattgggtaaggatacaggtcatttatcctggacaggcggtggcacatgggtagcttttcattcctgaaaaacatggagccattaatcctccttaaggagaaggccatccacaagttcttggaatacaagctcataatgcacaggcccctcaaggggtacataatgctccaacagcaagacctatcgttgcttctaatccataccctcctcttggagcagctcagccagagatagatggccacgtggcaaccatttctaagggaccacatattgccgaaagcacccgtaatgtaaaaaaggtacctgaatgaactaaatcaagatgaaacttgtaatttggtatagtcatctgctaaacaccctcaaatgatgaatcttccaatgaacttcacggaagacgatgcaaatcatgttaattttcctcatacgcttctttggtgattgaagcgtagattgcgaataaaagagtttctagaattctcgttgataatggatgattttaaagccactagtattatggaaaccaatcagtcaccttgtccagtcaactgcaaggcttcaatggagacaccctaatcccaataggaaaaatacagctgccagtgatagtaaatggagtagtctttaaaaacaacacagtgtcctcctttaagtactgtacctttatagtggttgattgtccaacaacttacaatgtcattctaggatgaccttttctagttgacttgagagtagtaacatccatctatcatttatatctaaaattctcaagtgatactggaagcaatagaacagtcaaagggaaacaaaaaagtgcaagaagctgctacaatgtttcaaccaagagcgttctcatggttcgagaaggaaacatagtagaagccagaacatcttcttagccagcactggtggtggtccgcaaagaggatgagctagatccatgggtaggaatggaataaataattgaaccaatggaagaggtagaagaagtattcatcaatgaggaagatcccactaaagtcatcaaggtgggaaataatttgcctccaattgttatagaaaggaagtctccacagccaagaagaacactgatgtattaggtcggagtgattttaacatgactggaatcgatcctcatgtaatctgtcatgcactaaacacagatcccaaggcagatccagtccgaaaaaagtgaaggcctttcgatctagtgagagcaacaacagtaaaaacaggagtagacaagctaagtaacatcacttcctctgggaagctctatatcccatatggctagtgaatctaattttggtcccaatgcataatggtacatggagaatgtgtatagatttcatagatctgaacaaagcttgtccaaaagactattttccacttccacaaattgatcagatggtcgacacaacttcagggtatgaactcttaagcttcatggatgcatactctgattacaatcagatcaagatgcacgtcgttgacaaagagcacacaagctttcaaatacaaaggcctttaatactacaaggtcatgccctttggaatgaagaacatcagagctacctaccattgactgataaataaaatgttcaaaaataaactagggaaaaacatggaagtttatgttgatgacatgctgttaaagtcaaagacttccatcagccataatgacgattagaagagggtttttgcattatcaaagaatatggaatgaaactaaacccaaagaaatgtactttcagagtttctttagggaaattcctgggtctcacagtattctcatggcgttgaagcaaaccctgagaagattaaatcccttctagatatgacttcacctaggaaacataaagatgttcaaaagctgactagaaggattgcagcactcagaaatttcatttccatattaatagataaatgcataccattctaaaatgcacttcaaaaaaacaacaaattttaatggacagccgagtgcaaagaagccttcccaaaactcaaagaacatttaacaaaagctcccatattgtccaaaccaattgagggagaaccgttgttcgtgtacctggtagtatcagatcatgctataagtgccaccctagtgaaagaagaaggagaggtacaacttcttgtatattacgtgagcaaaagactgctgagcgcggagtctagatatcccatgattgaaaagctttccttttctaactaattgcttcatagatgttaagaccatacttttaggctcacgccatcagggtactgactaaccatcatctccgtcaagtgtagcagaagccaaagtcatcaagaagactcctaaaatgggcaatgaagaaaagccaatttgatattcaatatcaaccaagaattttgattaaagaccaagccttaaaggatttagttttagaatgcatagggatgaacaatgatcttgaaacacccatcctagagctagagatctggaagatatacgtagaataagtgtcaaatgaaaaatgctttggaacctgaataattctaatctctcctcaacaaagctaactccaaagtgcactctaatttgagtttgaagcttccaacaatgaagttgaacatgaagctatggttgctgacctacaattagctaaagaggttggtgcccagaacattgagctgtataatgattcacaactggtagttagccaagtgttttgggaataccagataaaaaggtaagagatggctagttacgtagaaatgtctatggagctattgccacattttaagcactattccgtcaagtaaatccccagggataaaaatgccttcacaaacatgttagctaaattagaaatagatccaaacacagagaaatgtgcactagtcaccattgcccatctatccactttaagcatagaagcacaggggatgatggttattgatcactcaacttcttagatggctccaatcctaaaatatctagaatttaggacactctcgtaggat

SEQ ID NO: 20738 - DNA, 2506 bp, Cannabis sativa
ttttggaccttgtgttttataaaagttacagattagaccctatgttttgttaaatgacaaaacagaccctgtattttcaaaaatgataaaattaagaccctgggcttaatttttgacaactttttttaaaattatatcagatttttattaaattttattttgataaaaaatcagttcaggattctatttgtaccattttaaaaaatacagagtccaattgtaacttttacaaaacagaaagtccaattgtaacttttacaaaacagaggatccaaaatagtatttactcaattttttaccaaaagtagtttatgtaaatttagagttacctctagcagatctcctaaagtgacaatgaaagcatttgggagaggtttgatagggatccacatgccatctttcttgacttgaaagccatcaacttggttcaattgaaggagaaaggtaatgccacatgcatcagaatgaggggccacacctgtaactttctctggttgtgggcatggaggataatagttgatactcattgattgtattccatcttcaaataatttggaaatttctttgctttctattcctataaccttctccatttgggaaattatgtctttggctagttttgccaattgcaatgaataaatttctaaattttccctgcacatttgtgtgtgtgttagaagttgttctatgataataacatatacaaatattagtggatttttgctttaaaaagatatacattaaaaagtttatcggtaaatgggtgtttagaaaattatagagattttggatttgagtgtaattaaaaatcattatacataaattgatatatttgtctaattatgtaattagagataattaaagagttttagttacatgatgagaattattgctaaaaactttctattttcagtcttaatttttaaaaaaatattattttttggcaattagtaaataattatcaatttatatctgaattttaaaatatataatgttattactatcttactagcctagtaattaccagacaagacttaataattacgcactcatttgcaaatatgccttaataatacattactatacatcaaagttgaccctaaaattaagtggaccttaataaaataaaaattaataggttctttatttaaaaaatatgtagtatttttaaaaattattaaaaaattatatatttttaaagagaaaatattgttttaggtccctagaatgagtgaatcctagacgcgggccttgtccagcttgcccggtcctgctatatatttttggtgaaattagacataagttttagcatctttctaaatttgaagatgtaattgttaaggaattaaaaaagaaaaataagaataaataaaataaacctgaaaggaagagggagatttggaaataagtgagggttcctcaaggcaagtggtagagtaatgagaaataactcatctttccaatcaagtttttgttcatcagaaaaaacaacaggatctccaatgccttctaaatctcctggattccgccatagcttgttcttctcctcgatcggcagtttgcacaatttttctatcccttcttttattttctccaccaaagaatcacttataccatggtttaccaactgcaaattattattattattattattattattgagaaaaactattaattcaatataaaatattatatagggtgctttgtactagtgcactctcaaaaaatgaaccatgaatccatacattgttttttgagttttaattattataatacacttacatctctgaaaagtaggtgtattctaatctatatttattatcgtagttagaataattaatttactatatagagaaaaaagcaagttgaattttattttcagtatttataagatgtatctagacttaattaattataactatgtgagtatcaaaaacacaatattaagaaagatatataaatataaattatacctggaagaagccccattccttgcatgctgagtggagcttattgagttcagattgatacaattgtgggtgatgagattgagagataagcaataagttttggaagttgataactggggtttcatcagaagaaattacagaagaattattggtttgatcaatttgagtttgatcattgcgtatgtatcttggtggaacactcaccatattgggatcttttgccaattcttgcacacatggcacaaccacattagagcttcgaaagtccataactttcaagaggtgatcaataataatatccaatatctgatcaatctctctctctatatatagagcattgctattaggtattagtggtgcttagcacttttgcgatatgtcgcgttgtgattgactagcaatactttctaaaaattattatattaaattatatgataccaaatacttaattggaccaatagcgacattaacacataaaaaagtgctagacactattggtaccctttaacatttctcatatctttatatattaaaag

SEQ ID NO: 20739 - DNA, 2035 bp, Cannabis sativa
ttataagaataatgtctccaaaattcttcactagtattttgagagtaaataactacatgtagagacaaacaaaatttgcactgtcataatcgaccaaggaaaaaaaattacctcgattaagtatagttgacagtgtaaaattttcatagcattttcactaactcattgtgcattttattagatttaaaaaataaaaacatgatcaattttgctcgattcaattacaaatttcattgacaactctttctcgtcacttacaagctttgtaaacacacagtgtatatgtatatgtatatatgcacaatcaactaatcaaggcacgaaaaattattgaaacaataattatcctttatgtgaatctcaatcaggagaaaacacaaatcaaatccactctatcatgtacaaagatcggttatctgttgggactttatttccctagctagcaaatggcaacactctgttctttgtatttacattagaaataaagcaagaataggtatcagtttcacatacagcaattgataaaatcaacgaatttggtactcttcaaatttctcgagtatttctagtcaagttgctttcgtcgccctgcagcagtggaaagttcattttgagtaaattacaacccttcatatttttatttttaaagtccacttcttgaggttaagattttaagtaagctactttgtttatgttattgaaattaccttttcgaagagatattaactctactctttctgttgtcatcaaatttagctgatgcagcttctttctctctggctgcagcttctcttttcattctctttgactctacttccatggcttttgttaatgcatcaaccttcttcataagagtctgtaaagcaattttatcatctctcaatatatattgaataataacaagtgttgttttatacgtaaggaggaaatatgaagtttctgaatttacctttatttcttgatctttagagctcaaatcactctctttggcttcacaaaatttccttaaactgatcacctccttctgaagcctatcatacagaaaccctgagaccaaatcatcagagtttgtatgagcttgttgttggttaggtgattctccattatgctctccagaaactgctctatcacaattgttaacattgttatttgcctgcatttctgtgttttccttttcaccactgtcaacaactttacttctggatgcccataaacttttctttgtggtattttcgcctaaaccagtttttttcctcaagttcatttctcctttaagttctgcaacagccgtttccttttctgcatctgtatgtctaaaaggagagcctctaatgaaagtggatgctcttggctgagatgttgacctctttctaaggcctccagtgcttgttagaaaggctaagatgttgctagacttttcagttttgggagatccacaaaaaacattaggactgttggtgggtaatgatgaaacttgctttagcccatcttcaagtgtcttcagcctcagcttaagtttttcctatagccagagagcaccagttaatatgtattaataattggattcacgtgttatcataagaagcatttttaagtaaaatatttaccttcagttgtgcctctgctttagctgttctctctgatacagttagtttatctttcaaccgttgcatatctgcctacataataggattgaacattcacagaattaagtgaagagggaatgaaaagcagtaaaaaaagggaatgaagagtaataaaatagtgtggaaatttttggggtaatcaaactacacctgcataagccttctttcttcaagccactgcttaactggcataactttatcattttcatccttccactcattggccaccacagttgctatacggtttgctgaaacttttgctctggcaagttctcgctctaaagtcctcttttcctcctgaaaatttaactcaaacgagtttagcataccacacaattgtcaaaaataaacaagtatattcatacttgactcacattcaattcttcatt

SEQ ID NO: 20740 - DNA, 1597 bp, Cannabis sativa
aacaggtcagtatgatttgttatggttcccttttgtttatgtggaatgatttttacagtcaatgttggtgtagtattagcatttgaaacattgaaatttcatatggtttgctgcatctttgtgtgatccaatttaattggttatttgttatcaagtttcactattatttttattcccgaaattggcataatttaaattaaatattaagctccttaggtgggaaagcgggatgcatggtcttaccgttgtcctagaagttgagttgctttgtcgatgttctatggagtaaatttttaacttcagttcgtttggcgtgtatttggaagaaaaggccaagaaaatctttttgatgccactttatactttatccatacaattgacttagaacaatatgtttccaagtacttttcttctaaatttataatttattgacctattgtattgtctttatgatatttttgggttgcttgttcagctgtttgattgcaaggaaccttctgagtggtatgaagacttgttgggaggtttttcagcacgtgaatcactttgatgctaagatgtctggacaggctggtgatggtgcaaactctcttgtcgaaggctattctaaggttgacttttaaagggtttccggttagtagtttcaatgatttactatattgcacaggatcccctaattcacaattttgtgtttttccacggtgaattgtcctgtagggtaataatgaagctagaagaaggtcaaggtttttacgtaggcggggtagagttcgtcgtttaaagtatacttggaagtctgctgcttatcattcaatcagaaaacgaattactgagagaaaagatcagccatgcaggcaatataatccatgcaattgccaaacagcttgtgggaagcagtgttcttgtcttcttaacgggacttgctgtgaaaaatattgtgggtgagtgtttatccaacttttataatgtgattctttgatcatttatggagtttattgtttaaatgtacgagtaaaggttcctaaataactgcaactagcttatttttgcagatgtcctaagagctgtaaaaatcgatttagaggctgtcattgtgctaaaagtcaatgtcgaagtcgccagtgcccatgctttgctgcagacagagaatgcgatccagatgtttgtaggaattgttgggtcaggtgagtgctttatgtcgctgtttcctgctttttgtcttagggttgtacttgcgattgagtataaggtatgataccgtgcatgaaattgtcaatgtgaatcacaacacttaccttatgataggacttttgtttgacaaactttcaatttactaggtatacaaatgaggtgaacgtgatttatgagtaacactttactattaagaatggtggtcaaattatgtagttctatatatacattgtgctctagtaggaagtaaagattattttggaaagtaccagttgtgtccattaaattactaggaacatttggtaaaccatttttgtatcgaacttcttatatattccaagttactattgctgattcttttatgtaatttattggatgttttagccttgataataaaataattttg

SEQ ID NO: 20741 - DNA, 3633 bp, Cannabis sativa
gtgtaaccaaataactaccaaaaaatataactttatcccatggaatttttatagagtccctatattttcgaaaagccttctgttccactctaaccaaatcaaataacaagtaatcattcatagtagctatacattcaacaactttagttttgtgtttggtaatttgattagatgatggtttatattgctaaagcatcactacaaaagctgcaaattacttcacccaagaggggttagctcaaatggtcaaacatgtggtttactcccacaaggtctgaggtttgagttcctcctcggtacctacataacaattgctatagtttcttggtccccaaaaattgtagggttaagtgggatcctagtttctaaaaatatgctggaaattactttggaatatcttgcagatacaaactagagaatttgatatgcgtgtgaggctgtgctaagagccctagctagcaataagataggaaaccaattttaaaactctacacactagtttctaagatggcagaggagaccatccaaatgatttcttttccttgaaattttaagaagaaatagtagacatttcaagcattaataattggagctatttgtataattttcacaaggtgatgaaccgagctagaacaattttaaagttctcattaagttgtactaactcttatgtcaaaaaccaacctttagtagatttaacagacttaatatgtgttttttgtaaggaaattgcaaggacaagagaaaatacatactttcaagtaattgctgagggagacatcccattctgtggtccggtatgactaaaattcaaacaaagctatattagttaaaggaaaatgagagtgaaatcctaaatgaaatagttttaagtacaataagcaacatgtttgtgatgatcaattaccagtcttttcaagccatctccagaattaggaacatatccacaaactagataaaatgaatcgaattcagctgtcactaaccggccttcactatcatgatcttctataccgagcccatatttgacagaaagtggctttatctgcaatgtaagtgaataagaaaactagcgaaacggtataattcttgaaaacaatgttaaactacagaatgatccaaattcctctccaaattaacaagacagattggttgctcaacacttcagtcaaagaaaatatgtgaatacaagtacaatcacataataagataagtatacccgagaaataatcgcagctccagaataaccaagctttgaagtactgcacgtccagaagctattttgataaccgtctatcaaacaagcaatcttttcaacatccttatcctgttccaaagggtatacgaatttaaagaaattaaagagagtaacagttaaagattatgaattagaaagtttaatacatcagaataattgcctgaagtttagtctcttgcaagcataaaatatcgaaatcctctctttgagcaagttccaatgctgaaaacccatctagctttagcaatgctcttaatccattgacattccaagacagaagcttcacacactttgtctctctggaaagaatgggaggcctcatggttctaggattataaggaatccaatctttctgaggcttcttgtgtgcaagaatcgtccatggttcatttcgcggcgtggacaattcaactttggaatcaactttaacacaaatagtttctgaagaaatagaactcctttccttagataaaggcacaaacaaataaataaaaataataacttttacaatagatcagcacctgaaacctcaacagattcgactgaaagcttctttttcgttgtaacagctttactatcaacctggacagtgttcacctcaagccttgattgttttgaagttctcttacttttcctaacctccgaaacagtgccaacattttgaacctggtcttcctcttcttctgcctgagaactttcacctatggaaacatagagaaaatcatatgcagtacacaatatcatgtaactttatttctctactgtaacatttcataccattcatcttctccacaagcgatttcaaggccgaaacgagttccgatttaagacctttagcagggagcccattactcctgataatatttcaagacaatttacaataaaatctacaactccaaacacaaaggggttatgtcatatgttacctcaatgttgttctaagctcctgaacagtcattttctcaattgtttcagggttattcttaaaacttgctaatccaactgaaacactttccacaccattttcctgtaaaccaatcatgaataaataaattccacattaccaagccaaataaaacagaacattataaaaaacttaagaaaatatacaaaatctaaatatggatggttcaaagttccaacctttacaacaggcttaaacctcttactctcagtcttgtcttcatccattgccgaaatgggttttgaagaacttgaaatggttcgtttagaacccattgaactcgcacttaatctcaaagaaatcactaacccaggtctcaaattccaaggaacaactgtacaatactaaaatcaaaatgaagcataagcaaatgcggaaattaacagagagaagagataaaggtaaaacctttaaggaaagtcttgaacccaaattgcagagcttgaatatggttcatggcagaagagtaatagggagtttagtgtgagtatcagcatggtttggaaagagaaaaaccgccattgaagttgaggaggaagaagacaaaggttcctttcccatgcgagaatgatggacttcacagcataacgtacttctgagttctgaattgtcaagacttgggctttccaggcccattaaggcccatcaatatctttgggctggcttgtttaaagggattatttcataaatacacaaaaataaaagaaaaattacaaaaatatggttgtacataattttacatattttaatcatttttataattttatttacagaaaatacggactgttgagatatatatttatgttatactattgttaatttgtttttaattttttattatttgtatattatattttattgttattttgatattatttgaatattattttttctatgatttatatgtaatttttttttgttatttttgtgttgtttttaagggattgcacaatatacaacaattttagttatctttctatctaaaaaagtatagttaatatttcttcttcttcttaatgtgtttatcattgttgaccaacaaagtaaaaaagatataattgaaggtccaaatttgtgggtggatagaggtagaaactatcacatcaaaaatattagcatatagaagtttaatgttagttttttttttttttttggcaaaaagaaaaaaattaccataaagaagtatggaagctacaacttgaaagagaagaaggtaaataggacaaaaataaaataaaaagaaaaatgaaacattggaaagaatctatttatcttttaaagcaaaacactacatacatagatagtacatatacataggataggatagtcccctttctaaaatactccaaagtccaaaccctctttaagaatcccaactttagtctttttattgaatataaataaaaagaaa

SEQ ID NO: 20742 - DNA, 1257 bp, Cannabis sativa
  modified_base (1217)..(1217): a, c, t, g, unknown or other
acttaaaataaagtaactacgatgttacttttccatacacaacacaaaaaataattaatttctttattaattatcctactttattgaagaaaaaaaattagctgcttgagatgtcaataaaaaatgttgaaatttttttatggtgaccaataataatataattggtaaattaacatagcactaataggttacttgtttttaaaattttattttttaaattatttatatactattagaaatgtaactaatgagtatataattgaggtaagtaactaaatatttgctttgattttaaaataggtgagaaaatatatttctcaaatgatcacattgaaaagtatattgaatagtattttttttttaagccaaataatttgccgtatgattagaattttttttgaagatgatgataatttttttttttttgataggaagttgggaagaagatagagaaaagaaagatttgttttattttatactttagaggcctttgttcaaataagacaaaaaaaaattaaagaaatagctgtcagttaagctatacacaataaattatattataatttaaaaaaacggtacgttaaaattataaatgagataattaaagttattattaataacctttcaaaaaaaaaaaaaaagttattattaataataaaataaaaaaggcgcttataaatgtaaattatctaaattaaaatggatataaaattataatttaatattcatattaaaaaaaaaaaaaaagagtcagggggggtcggatcagatccgatccgaataagttgagtcggatctaatctgattcgagtatcttatcttgcggggcagatccttacacgatttggatcaggtcggatcatagccgaattagatccgactcaacccatttacactcttatttatcggtttattgtacatttgttggttttgcatataattttttttttcatagaagtatcttgttaaattacattttttaagttatattgttgggatcccacgggggcgaccttaggtataggtgggttaggcctgtacttaagatttacattttttcgaagcctaaaataaaaaataaaaagttttattatgcatttaagtaaaattaaatgtattgtaaacaataaatatttataacttaatcggttggagtatatgatatattatagggaaacttacaaaaatactggaatttgagttaatttttacaaaantactgtcacacggaaatcttttcaaaaatactgtgttttt

SEQ ID NO: 20743 - DNA, 3024 bp, Cannabis sativa
aagtacagccagttatagaagcccttgcatataatttcagttaataaaagaggacagatagattgtacaattaagaacaacacaacccacataattgactgagttggcactcatggattttgaatactaggactgtttttattgtttgcatcttacagatattatgtgatattaattctattagaattacattaacaagtacgaattatctaattattactttctgaccaacctcacagtgatagttgcggtttcaactgtaaattaacaagttcaatttaacaagtgaaaaagcaaacaaaacttctagtcaatttgggagcagttctagtctttttattttttcctacctccaaaacttctgctaaatctagctgaccatgctatttccaaggaaaatatagtaaatgaaatgaaaaaagtgtgggggatcattctaattagttgggcttgaagagttctctatccaagttcaagttatcaaaataatatatacaccaaagtggtcccctgcagtgtgtatccatacaaattccaattggaaatcatgagttggctttgcttattataacttcttctttttgaaacttttctcaatgagagtataaagataggcctgcagatataagaaagtaggcatgtgcataagttttaagaagagcatcaaaaaacaagaatgagctggtttgcactctattttcttcaaccaatggccaatggattgtggtgaccatatctttttgtcattccttaaatttattattattctaatttttgaacatttgaccgtttaattgtttgaccatttataattattattattagataaacctatttcttttggcttctgctaattgaggggcagacagcaccaattgactttgagaaccaacacgtttgtcatcgaaagatgcactataccacttgcaagttcccttaatggaatagatttaaagataagattttctatcattagccacataaaaaaaaaattaaaattattgtttttcttgaatacaattgaaaaagaaaatgtaagaaacgtaaacaaattaccttacagttaaaaggggtaatatatacgggtagtataagttggtataaacaaaaataagatcaagcaacaaatgaaagaatgaacaagcttttcctgtcaatctgccgtataagcactaataagtacactggaaaaacaaacaatttcagagatagggaggaaaaaattgtgttaaaactcctataaaacatgatattcttggaatttgaaccgaacttgaaaggatttttacagaaaataattactctgttaaagaggcattccgctaaaaccttgaccatttctcttcatctttcccatctccatttctcgagtagtttgggcttcaccgctcgaaccagatgggtagagaccatattcgctggtcggagcactgtactcactgctggcaccatattcttggcttcctagcgccatcttcctaaactttttcatgtcctcattgtattgactagtatcataatcggagcttccatgagaactgtaaatgttgctttgaccaggcctgattccttcgttgaggtcagctagagacacatctccctccaaagcacgaacaatctgtttaaataatgtaatatagcagagtaagttggttggcttcccaatagtaacaatgcataattgaagcacaaaattctaagtatatagtcttaatgctttatttaaacccaaagtatcccatcctaacttatctctctttgcagaaatcatcaagcaacaagaaattgactatctaggaacttagcctagtgcaacaatgaatggaaattttatcagaatttgattgctaaggaaaaatcacctgactcatttttggtcggcgcctagcagaatgacgtacacaagctgcagcacaagcaaccatacgaaccatctcattttcatcataattcttttgcagcctgtggtcaaccagctcatcaaaatttctgtcttccaaagctcgattgagcaacggccttgcctgcaataccaacacagagtttacttatcgaataacacatcaaggattattgtgtcagcaagaaccaacagagtaagaacatatacagattctaaaaatcatgctactcacccaatcgaccaaactatcctccacataagagtgagtcatatcaacaggtcggcgtccagtaattaactccaaaagcatgattccaaaggagaaaacatctgacttttctgtgagcttcccacttgaagcatattctggagccagatatctgcaagtaattaaatatgaaataaaagttaaatcataccataacccataaagcttatcaatgatgaaactcatcaggcaaaggacaatttatcttgaagtaagagagaaccatgcagagcataaaaacttaacagcgtagcatacagtgcaatgccttatgcaaattaacattcatgttggaaaattttaaaaaaaaacaaacaaaatctgaattccagcttacccaaaagttcccatcacacgggtcgagacatgagtattgagatcagaagtaaactttgctagtccaaaatctgcaacctgcaaaaacaaaataaaagattaggcatgttgcaaacttaatgattaaagtcattacacccaaataaaattaattgaatgctaattcttcatctcaaagaagtgtgttaaaaatcaaggaagtgtacagttaatatcatgatgaattaccttggcctcaaatttgtaatccaaaagtatattagctgatttgatatcacgatgaatgatttttggatggcctgcattcaacattttacaaagttaaaattgatcattgtctttacatcagcaatgcaaaaggccagtacccatgaagactgaaagagagagaacttacagtcctcatgaagataagcaagtcctttggcagatcctaaagcaattttaagtctggtggaccattccatggtgggacgtcctttttctgcaatttataatccaccaaaccttacagtat

SEQ ID NO: 20744 - DNA, 2660 bp, Cannabis sativa
attggaatcataacagtagtatgattctgtgctaaacccaattaggaattaggatttgaaaagatgttttggatgttctttttcattcattgatttgtatttttgtctctatctatacagtgtgatccagaagaggcagggtcatgtgactcagggtgtaatggtgggctaatgaacagtgcttttgagtacacactcaaagccggtggactaatgaaagagaaagactatccctacacaggcaccgaccgcagtacctgcaaatttgacaagaagaagattgcagcatcagttgccaacttcagtgttgtctcactagacgaggaacaaatcgctgctaacttggttaagaatggtcctcttgcaggtaaagaaagaagaaatactcaaaagggtttgtttgtttgtttgtttaatgactaattactaattgggtttgattttgatttgcagtggctatcaatgctgtgttcatgcaaacatacgtaggtggggtttcatgcccatatatatgttcaaagagacttgatcatggtgttttgttggtgggttatggtgcttctgcttatgctccttctaggttgaagaacaagccatattggattataaagaattcatggggagagaattggggtgagaaagggttctacaaaatatgcagaggcagaaatgtgtgtggtgtggattccatggtttcaactgttgctgctgttcatactaaccattaagaaaagaccttatatttatacatttaggtcagtcatggatgaggacccaattgtctgtaaatatcttgtttcatttagaaaaaaggcaaatgccatgtattgtgatttttcagctttgtttttattatgttttcttcttgtttaaaaagacccaaagaaagaagagtccttttcatgtggtttgagctttaaatgtattattaacataaaaatgatgttgcttttactctcactattgtggaagttggaacgtgtaagtaattgttgcaagctttgtagtgtaatgcaagaaaataaagacataataaaaagtaaaaacaaaaattaatcataaaagttatggaatacaacttgtttattgaactttttcagaaatgatcaaattaaagaaagtaagattaaagatgacatgaagaaatttgtatgtgtttaaggtgttaaatttatattccaagttcgggctgacttgggtaggtgagatttaattttgagtgtaaccttcgtcgtatgggacggtactatttaatagtaataatttcttaggggacaaaccaacaaatttcttaggatttggtgtcagagggaagccatgtaggatggctagccttttcgactattccttcctggatgactcatgagagtacttgtcttcgtttttttttttttttgataattgttgagagaacaaatgtcgaccttctagaattagatacccaacttagtcatggtaaagctatagttgaatatagactttttgcatatcttggctcatgagtcgagcgatcattttgtttgagcttagtgaataggctttttaagttgatcatacaaacttagatgtgcatgtatcgtctattcgaaaatacaaataacacaaataaatttaaataattataacaaataacaatacattatattaaacaataaatatttaacattcatacacaataagaaaacatcaatattaaaataaacttctaggaggttcgaaattattagttatccgatcttgatctatacaatattgaaatatagagtttgggaatgtttgcatgttatattgaatgtgccatgaatatgtcttgatgatctctgctactgtttctccataaatgggaaattgtgaattcacccaatggcttgtaccaacttagtataaaaattgggttaaaggacaatcaaaaatctcatagcatcttaacaaaatagatataataaaaatagttcataatatagataaattagtgtactgcatgcatttttactagccattaattatagtcttaattataaaattagtatcattaaaaaacatatactatttaaaaacttataaaatacatgtactattttctaataagaaattaaataaaaaatattcatagaaaacattagtattttattgagacatcttaaaataattaatttaataaactactaaaaatattcataacaaatataaactaaactcatacctcaatattcttgatgtagtgtagtgtttaacaaggaatacttttgctctaagaagtgtcaacatatatgatattgtaaagctttacaatggggaaattgagtgaaaagcagacaattggtaaaaaagaggaagaagaaaagccaaagaagcttaatcaattggttaacttcgccttacacttggttaactcataattttatagtattatttatttatactataaaaaagtaaattcttattatttttcatcgtataaattttacttttttttatggaggaaaaaaatatatagacatgcactattttgttttttcttaaaaaattctcaaaaggaataattttatgggccatctaaacaagaaaagattacaactttctatatttaatttgattctataatttggcaaatgatcaacacattatctttatatatttggttttgttttttttttttt

SEQ ID NO: 20745 - DNA, 2177 bp, Cannabis sativa
tgactaagaggttgtaattagcacctgcaatttgttagagtccatcaatgtacttatatttgttttagcatttatgagaatttgttagtccaaaatatctcacctgcaatttcagcgtgttaaattttttgaattttttaaaatttgataaagtatcttaaatgaggactataaaaaataaaataatttaaaaaattctaattataaaaataataaaaattagaaaacaaaaagataaatttcatcatcaatgacgtgtccaaacatttattcgaaataaaaaaaaaatgatgtgtggcaatattgaaaacgcgaaaaataaaccgcgttgcttaataatggcggtttaatctgttcttggcttacgccccaagtcaattacccaattctcatcttttttttctcatttattataataaaccattaaacattactacttcttcacaatatttctcatatttttcaaccgaaatctttctcacaaattcttcttttaaattaaaaaaagaaaaagcttcaaaattaatcaatgggcggaggaggaggaacagaagcattccctgatttgggaagacattgccaaaactccgattgcaaccaattagattttcttcctttcaactgcgacaattgtaacaaggttagcattaatttcaaccccaaaagttcatcattctcaattatttgattatatattaattaattactctgatcgaacaggtattttgtttagagcatcgttctcacaaatctcacaactgtcccaaacctgatcacaacagcagaaaggtcatcgtttgcgaaacctgttctacggccatagaaaccaccggccaagacgagaagcttttgatggagaagcacatgagttccggtaactgcgatccccgaaacaagaaaaaacccacttgccctgtcaagcgatgcaaggagattttgactttttcgaacaccagtacttgcaaaacttgtcagattaaggtctgtctaaagcaccgatttccggccgatcatctctgccgtgaccgtcagcccccggcggcggtgaaggctagcaatggtggtcgcagatggaatgagaagtttttgatagctttgggttcaagaaatggaaaagattgtggcaagaatgggtctggtagctctgggtctccttctaatagtaatccatctatcaaggcatgttagattagatttattcatttgaaatttaaatcatttgagtattttgtaattatataattctatagctataaaattaatttggggttgttttaatttgtgataattgtgtgattgtttagctcttaaataaaatttgaggcaatggttttggtgcttgtttgggattctatttcagtgtgtttttcatgggattagcaaaagataattaaaaaaattaagaatttggaacatacattataagcaataaaataacgaaaaataatacagggtcgaaattaagcagaccgaatgttgaaaaagtgataaaatttctttattgtttttatactttaatttcccagtaaccaaacagaaagctaaacattaaaatacaattaagaaccatttttaagggtatattaaagaaccaatttttaaaagaaaaacacaacgaaatacaaatcagattaacaaaaaacaaattcagctaagcaaaaatcataacagctaaaagaacgcagaagaaacttacccaaattaataaatggccggaaaaaattgaatcagaaaacagagaaatttagcgaaaccgaaagagagaagacagtatatggatggctgagattgagttttgaatttgatcaaacaaacctaaccacaatttacaaacaacattttcacatttctaatacatgtatggagattggagaatacacctcaatatataaatttataaaaataattatgttccaaagcaaaagagattactactacttattacttgcatttgcatgcaaattataaatccattaattagttctttaaattcgaaaacgatctagaatataatcagcaagatcgatctcattataattattataagtggaaaactatacatatattaccaaacacttatacagttagtactgttaattttatgggtaaataccattttagaccctgtattttataaaagttacagattggaccctgtgttttattaaatgacaaaa

SEQ ID NO: 20746 - DNA, 2654 bp, Cannabis sativa
ttttgccaccaaaaataaagataagggggttaagtgtataaaaatcaaaacataagggggtttcgccgcaaattgctcaaaaaaaaatgtaactattgagattattaaattttttttttttttttaattttactaatggaagtgtgatgtagatcaaagtttaagggacacgattcagtacgtatcaaatctcgagggatataatttagtagatatctaagttcgaagatataattttgtacttaaacaattgtcacattagtaaaattgaataaaattaaacagaatttcttaaatctaacaatttcaataactcaaggagaatttttaactaaggcaaaatttagtacatgtcgaaatttagagggtaaaaattctaattaaccttaaaaattgttactatttttttgtcaaaactttattaattatattgtccaattataggggacgattttaaactgtcgggaatactaaatttttctcgacggttttaaatagttacttaatttttttagcgacggtgtccgaaaaaaattgtttttaagaccgtcgcgaattttgatatttgtagtagtggtctcaatttcacacgaacatgccagcaccctaaacgaaatatcgggtctcacatattaatatttgaattatacgaaacccactactacttaattggaataataataaaacacgctctctaagaatgttgggcatcataacgtcttatagcaatgctcataacaatcaagggagttcgcaactcatattcatatacatattaattattattattcatgtatcaattgtaataaataagagtaactgaagttgtaacaagtaagttattcataggattctttaaagaaaatgaaataaataataatacaagcaatggaaacaaagagaatgaaaatatcaatggttagagcagtcattgcctgatcactaagagccatgttctttccaccaagacgatcaactacgtcagggacaggttcgtagttgctcaaatcttgttcgtaaggatcttccaacttcattctcaacttctcggcttgtcggcttgctgcttcttgagcaagcgtccagtcatagaaccggcgactctcatcgttgctcagtacatcatacacttctctcagcctcaagaacttttctgatgcggcttttagaggaagagcggttgtgtctggatggtattcttttgataaccttctgtaagctcctttgatctcttctaagtctgcttctgatgatactcctaagaatctgcataacagctaacccaaccgtcatcactacgtatagtttatagtactaaaaataagaatttacacacttatttttacacatgtataaaacaaaaacaaaaacagtgcaactgtttgaactttatttttaacgaataaatataattaataatttaaatttcagttggtcatggtaagtacgacccccgagccctggactctggccccgacccatgcccatgtcaggcaccgaacctcaaccacagaccccaaccgcaaccccaactctgactttactatattacaatctaagtttataaatatcacaatacgggcttatatcccttttcttatgtattccatgctataggttgtattaaaattaagtgtcgtaataattaatacaatacaacttatatttcaaatataataatttactaatttaatacaataccaaagacttataagatttcacacaagtactatgtgcaagccaatgttaacaatgaatattctcttaatttgtatagctctgattacgtttcctttttattctctaaacaaaatagtgaaaagatatgtttatatgtatgagaactcactggtaatgggaatcagtagagtcattgatcaaatcagaaaacttctcccctaagagattcctctgctgatcttctgaactcgttgattcccaagaagtaccggtggcgccaccaacccaaccttcctcttggttgtcccaatggattctagtgtcaactccaggcggcgctctcccccgtttgttggggccttgtgacactgcgcatacccgaaaaccaacacgcccacttgctctccttcttgatgatgttattgatctcccaagtgacaaagagtataaagcttgaaaagcactagctgttgtggaagccatggactagacacagattatcttacagacactctctgctgcagtggttcaaaatttaaacagagtaagctttcattgtattactattccaaatattttacaaggatatatatatatatatgcactacagtgatgtatggtattcaaataacaatataacatcttcatagtttagttgagtagaaaatgaattgagttgttataacttttcactcaaaacttagatataaaaacttaagttcaacaaataaacttctccatatgataaatccatacaaacttatagctgttacaaacagagcttctatcatccccttcaaaatttatatacataaacagattatatggtgttattaacaaatcaatctaattgtgttttgtgtgaacaaatgaagtattataccaaattgaaattagttttttcacacttattggagtaagctaaaaaaaaccacacaaaattcaacatttacagttgattgaggaattttatc

SEQ ID NO: 20747 - DNA, 2479 bp, Cannabis sativa
  modified_base (2215)..(2215): a, c, t, g, unknown or other
gttgttgttgttgctgaagatccaaacttgacaaaagtactgaattcccattgttgttctcatttgtattatctgatgaagattggagagagttgactaagtcattgaaattattctcagccgttgattgaggttgtctgaacagtacttgcttctgggaattattagaagaagataatgagctcatcaaaccaaaagcattgccattaaaagatgttggattacttctagtggatcccatttgagctgctttttgaagaagagcagtggctgacatgtgtgttggaccttgttgttgtaactgaatattgttgttgttgttgttttgattaagcagagaagaagatgaagaagtcatcatactattattatcattattaggaattgtagcagtagtagttgttgtactactgttgttattatttcctcttgattcttcctcttcctttagccctcgggacaaagacgacgacgatgacatgttcatccactgatgttgttggccgaaaatgttactcgcagctgcggtttgcaacaacatttgatgatcatttggaattggtgtagtcatgaaaggattaacattagtactgttcgcggtcgggtctagccaaacaggcaacctagaccggatttcacaagtggtatcagagccgaattcaggtgaaaagataggcgaaagctgatgcgtaattctgttggaagcggttataactgtttgatgaggtggattattgttgttgttgatgataaaattggggatattagttgttgggagtgttgttgtggttgttgttgtaccaaaacgagcattttcttcagctaatgcgtcacaaaaagctctgtgtgttatgaaactatctttcctgtataaatataaacacagcatttaattcagatatataaatatattgcttttattacattaatccctatgaaagcttatagcattaaataaaattctacaaattaataacatagaatgaatttattactagtaataaatgttatgtttggtgtgattaaatttatcgagaacaaaaaaaaatatttatacctggagaagagtgttccacaatcgcatttatactctctagtcccacaaatcttggtatgagctttccaatcagattgaacagcatattttttggaacacttctcacacttccacttcttttcgccgtgttttcggctgaaatgttttttaattccggtgaggtcaccgagggctcgagaagggtcgtgatgaacacaggtcttttcggggcaaacgtagacctttttccgaataacatctttgtttgatctttgacggagtttccatggaaggttgtgtcctcttcggtggagctgtagattctgatctctctgaaaacccttgttgcaaatctcacaaaggaatctgttggtcgccatcagagactttggagataaagctatcacttctgcatctggatctgaaattaatttcataaataataaaaaagagaattaaaaacagtacttagatatcaagaataaatatgatcagtatatatatatatagatatagatatacttgcctggatttcctggtaagtttcttttcttcttggttgagggatttgtattattattagggttagggttagggtttagatttggttcttgaacaaaccctctattgatggtggagctgggattattaactgaaataatatcttgatcagatatcatcttattagagtgatgagcttatatatatatatatgtatatactttatatatatagagagagaagaactcaggtgatcaattagtagtagaaacaagattggaaagacttagctagaaatggtaataagctaaagaagaaaaactaaaacatatataaacaagagattacacaattaaagaaagaaattatatatatcccaaacaatatatatatatatatagtatatggtatagtagtgaattgatgagaaaaaacaaagaaaacccagataattgaagttggacttattaagtgtgtatatagagatatatatattgactcttctcttgactagttatacttaatatactttttactctactcaattagctttaagcatagaagaaagtagcagagagaaagaaagaaagaaaaaacaaagggaaaatggaggctgaagagtgaagagaataatattattattaattggtttctcaaactttctctctctctctctcnctctctctctctctctctatccttatctgatacggctgctctcaaagtcggtcagccatagactctgctggaccacactacacagtcataccaatactctctctctctctctctctctttgataatattaattaattaataataaataatattagagcactattgttagattaaatttaaagtgtctaatactatactataagagttcgtttggaacgccgtattaggtcgtattgtattatattgaattgtattttatgcaat

SEQ ID NO: 20748 - DNA, 2970 bp, Cannabis sativa
  modified_base (39)..(62): a, c, t, g, unknown or other
  modified_base (1300)..(1301): a, c, t, g, unknown or other
  modified_base (1544)..(1551): a, c, t, g, unknown or other
tatttttgaaaaaaaattcgtgtgacagtatttttgtannnnnnnnnnnnnnnnnnnnnnnntttgtaagtttccctataaaaatacattacttaagacaactaaaatccaaaaaaaaaaaaataataacaatgataacgaaaccaattactaaactaaactaaatcagctaaaaaatacaaaattaaaaatcaaaaacacaaaaatacatgtaaatagtgattcaaaaatacaaaccaacgaagtgcacacacaaataaaaacaccactcgaacaaaaatgcatctataaacatatataaaaaattataaacaattttaacggctaaatgcttctaactatcgtttcacttacactcaattttttaaactaaaattttaacagtaaaactctccaaactactaaattgttaataaatttaaggtgttatcaagttaaccgctatcttagactgtttatgtatatattcttatacatgtgatatgtttatattggtatacctaatattattatttaaaaattatttcaaaatttattttgaaatcaaataaaattataaaaataaaatatttaaaaaataaaaaaatattataatttttaaataatattattacgtgtacacctaagcaatcttagttaacagttaactctgaaaaataaataacaaattaaatttgttaataatttgttttaatttgaaaggttttactactaaaatttaaaattagaagattaagtgtaagtaaaataataattaaaaatatttagcgttaaaaaactaaaccgtgaacaatctcacaatctaaaaaaaccttacggccatgattccataaataaccacaaaaacccacgacagaataagaccagaagaaaagaaatatatatacttaagcacaataccaacgataatagagaatgaagaaccacaacagccaaaaatggaaaaaagaaaaaaaaatgaagaacgaaaaaagaacatgaaaagacaagattatatagtagggtgtccatccaatccaatccacacttcttcggtcaaacaacatccaatccgtactaagtgcagatttcatattttggatctaatccgttccgtataacagtttaaatccaatctaaaaattatttaatatttcatagaaaaaaaattaaaaaaagactattatttcttaatctccaataataatctatttccatctccatttatatataaattaaactcatatacatatatgtcaatatatatgtattcatctttagatttatactaaaatctatatgtattcattactaaaataannaagttagtatatatatttaaatttatgtgtatgcgtctatgtgaataagaataatttttttaatgttttttattataaaacaaataaaatacattctcaatatattattacaaaaaattaagagattagaagtttgtgtcttacttttaatattactagaaaattaatatatattatatattataattttttaaaaatatatataattaagtacggattggattggatcggttactttttgannnnnnnnaacatccaatccgcacaagtgcgaattttagatatttcaatccaatctaatccgcgcaagtgcagatatccgcattttgtgaattggattggattggatcgtgcggattgaattggatcggatgcttagtgagcacccctattaatagggaagaaataaaagaacggataaaatgcatctccaatgctcaaacttaaatatagtgtcaaaacaacaccaaaagagtataattttagcactatttttttttctattccaaccacaacactaaaatttacactaaaaaatattctttattgttatattaatttattaaactatctcacattataatatttatataaatataaaaatttaatcataaacacattattttaatattaaaaattaagaaatttttttagtgtagtctatagtgtcccactatttttagtgtgacactatagactaccacatatataagatgagatttagagttccattagagtagttttgtatttaaactccactatttttggatttataatgtcccattagagaagccctaagtagagagaatgcaaattgaaacggagatgaaaaatgaaatgctaagaaaaccgtgagtgatatcaccattcacctctatactagcatactcgagtttgagtaagttcgtgtgtgttgtgttggcttggtctatatttatctgtggtttttaaaaaatggaccgtgttatgctgtgctacagaaaaatatgggtcatgctgtgtcgtgctaatatttttaaaggatagacccgacatagcccgtaggcctaatattttcgtatcggtgcttggactcatgcgtgatttactcgtgtcgtcccatatttcttaaacaggccttccgatttttatatccgaacttaagttcatatttactttttcatattttttagtgtgatgattttgagattgtgtaggtataagactacacaggttaagaaggcttaaatggattgattagtactacctatatcaataaggtgtatcttgttttttggcagctcatcacgaaagaactccacaattaggagtgtttgacttggggtaatttcaggatgggtgacctcttgggaattacactcgtgtttgtctgtagggctagtcgtcagcctaggaagtagccagagtgacgcacttgtgtataagagccataaatccatgggggaaggcctaatggaagcttaaagcgaggacgtggtatcaaagccttgacctagctggaagtgtggtcgaaaatgacgtcaactcccgtaagggggtgattgtgacagtcagttgtcccgtgattcatagagggaaataccgggtaagctatgaaatcccacatcgcctggggaatgacaagtgtgattattctgagactgtgtaagtatgggactacacagttgaa

SEQ ID NO: 20749 - DNA, 6540 bp, Cannabis sativa
  modified_base (2163)..(2168): a, c, t, g, unknown or other
  modified_base (3754)..(3756): a, c, t, g, unknown or other
taagttgtaagtgtaaatttgttagcaaaatgtaaagattagtgatgtaaaaggttggtttagagcaataaaaattcttattcatcaaaaaaataaaacatttaaaaactttaatataatataaaatataattgagtaaacatgaaataattaaacaatataacaaaaaaaagtaagaatattatatagattttaaacttcaacttcaatatccaaatacaataaaaattatttaactataaagtctagattttaagttaaacactcaaatgtccaaactttaaatacaaaatagtttcactaataaatataatttatgtaatatattatatacccttttattaaaaaatatattaatctgtttaattcagtttattcgtattaattaggcggtttagaataatttataaaccacctaatatgggttgtttggattatcattgtattattttgggttgtattttttgtcgatttattcggtttggtttgggcggtttataaattttgttgaacacttctaatcttttgtgccaaactcgatgtaacttttagcatggatcaaatttagcacatattttatactattattggagcttattcttattaaaatattttaaaaaatagtaacacaccatttttttagtagttcattggaaatgctgtaatgtgagggatcacatccaccactacttgcttccaaagaaaaaacaaaataaaaataaaaatcataataatgtggagtgcatattgattagattatagatataatcataatgtatggatttccattatgctcgccagatacaattcttttgatcgaggatccggttggctttaattgaagtcccaccaacttaattgaaatataatcacaattggcttaccattattattattattgttattatttcaccacttgttgcttcccaaatataaactaatcctagtttagggaaatcattatttattctccactaaatatataaagaaaaaaaaaagaagaagaagaagaaggagagggtctcaaatatattgattatattctcattctggtattgacttgactcgactcctataattggcttcttttacatatagtggagaatataattaaagtaacactcaaaatttaaaacagtaaaaatatctatctttttttttttttttaaatgaataacaatatatctatcacataacataaaatgaacaaattaaatataattccattgaataaattaaggaattactatttcttatttactaattaatatttcgaaaatatgcaactttatttaggactaatgattcttaaacctactagtgcattagaaactagagagtcataaataaagtgtactactcggcccgtatttgagaagcccgcaaatttacaaattgtatcgtgccaactcataaaaaaataaaagttgtatatcgtattgtgctaattttttatagaataagtacgatacaacctttaaactcaatatttttcatgtcgtgctcaaattcatatgttatactttatttggatcaatttcttggccaacccatttcttttttatgggattgaattcatgctccacacttttaatttttttttttatatatataaaaaaaactaataaattgtatgtattttttataatttcaattatttttataaattttcttaacaatactttataaacaattacataaaaaaaaaataagtataattattaaaatttaaatatttactagtacacactcaaatctttaactcacaactcttaaaacaaattaatatatagttttaatttaatattttttaaaataattttaatatatagaattataatactttgtgtcataattttgttttcattctaatttataagtaactaaatatttattattattattatactaaaaacaaattatcatatcatattttgatgctagtctatttgtacttacttaatataattataattttattgtgtcgtgcttatttacatatatttcacatggtgttatgccaatgtacaacaaagtatgtgttccaatcctatatgtaaaaaatgatgagcatatgtaaaacactaaatctaataatttatcacaaaatatgtatgtatttgtgaggaacccatcagaaaatataaataataataataatannnnnnataataataataataataattgggctggcccatcttatcttagagagttcacatcagactggcccatagccactctaagtgttggaagtcatgggacaaaaacttttgttaaattcaatgttttgtctctctgtggagtgactgagtggtatggaatccacataaaaataaataaaataaatttgcttttgaaatttaatcaatagtgtgtagtgtaatgaattaaaatttaaagtaaagtagatcgtcttcgtcttcttcgtcttcttccttttgttttttttgttttgatatatttttttttaaaaaaaataaataatcaaacgcgtgaaacacagaatgtgaaacatgtctgctttgtaaattaaatattatatattatgtatttagttttagttttactataaatttaggtccaaattggagggctacctcttattttcttagtacattagtatatgtgtatacataagtatatgtgtatacatatatatagatatatatatatatatatattagcatgcacatttgtaacgtggatatatatattaattaatggaattttggaaactttagtttgaattcctacctcatcaattttaattcaatcatatatttatatgaattgttaactacatgaaggaatataaattttagaaatgattcctctatacatatgtatttatggtagatccgctccttacaaattggtttggtaaatgctcaaaacaagctatatacttaagaattgaatggtttagtttgaaatatttttcataattatttttaacttttttttaagtaattattctttttttttttactaaaattttgtatttttcacaattcataaataataattaaaaattacagcatgaattcttaaaattttgagtttgcaaatagcataatctcaataatatttttagcaacataaatacctaatttataaaattataattttcatctaattttatcattagaaatgttgttttgaatatattaagagaatattgaaaagtaactcatattacatgtttctgtccagacttaatgatttagattatggtctttaaatgtgttatgtttaagacattaatggagtttgtactaacgaaactgaataaaaattacactttactaacattgggtactcatgccgctaaaaaattattgagcttatgtcgtttacaaattcaaaacattaagtacttatactgctatttactcttaaaaatatagttgattaagattaattattttcaaatatgaattatgtactcaaaaacatattgaatatatatttatacataaaagaaaaataagtaatgtttgaattgctagtgagatttttaaaattatgactgaacaaaaaatcataaaattgttaacactagattcattatttggttcaatctcaaatagggtttgattctaaattctaattgattagaggttggaatcaaagattctaaagtgtatgaatagccctaccgcgtagagttagggtgagtagctcctcatgttaaataaaaatatatagtactaaaaattttaagttgataagtttttttgttttttttttnnnttttaatttaagcgtttatatattacaaccatgttttacctgagactcgaacctaggacctccaagacacacacacccacctatggccacttaagctagcctcaagtggtttttaagttgataagtaaattttatggtacaaatcactacaatatatatacattatacatagttttgatctgatctgatgcaatttataagactcatgtcagtacccaactgacgcaaataatcaagtttgtattagaatctatcttatatgtaaatccttaatatcaacgttaccaatattattgatgatgcaattaaagcttaatttgcgtctattaactaccataataaattttagaccgagccatcaatacactttatctagtaaatagtaggtcccaaattgtgtctgttaacggacgcactgatgcaaaaaaatgggtggaaatagtagtagtatggtaaacgtgcgatcaacttacttaatacgagaattttcattttatggtttttaaggcaaagtttataaacatatgatttattttttcaaaaaaaaatgtgggaaaaaataaaaaatatggaaaaagatgattttaatttttggggaactaaaactacttaaaagagtacttacaatgtattcaaactgctagagctgcctttttttatgtaaaaaccccaagttccatgacagagcaaaacacataaaaattaaatatcactttatacgtgataaagtgactcatggagatatagaggttgaaaaggtgcatactgaagacaacccatcagacgcgggtactaagattgtgactcttaataagttcaaacattgtatgaacttattaagaattaactcaggagactaaagtaggacttatcaagctaagactttcagaaattaaaacacactagcttagagctatttataaaaggaatttaggtgggaattgttaagtaaattccacttataaccaactcttttgtaagtgtccacatcaacatacaacataaactaatagaacaagaattaaatctaagtggacttgcctctacaaaattagaaccagaagttagttataattgaattgtaactaacttccagcttgatcagttcatacaactactctataaataagattcaagagaagaaatttacagtacaatcaattcagaaagagaaaaaaccaatgccgaagctttaactccaagatccatagagaaagagttcaggtaaagagtataactctcatggtgaggagattgaaggaagggagagcacaagctaaagaaaaacagagttaaatctagtagataaagagagaaatctgtaaaagatagagaaatcgagccttacctgatcgattcttgtgacaggaagctccaaaagttgtaattgctattgttgatagtggaactcaaaccaaatctctgagatgagcttgacaaagatgtagccttaattcttggagtgaactttgaaatattactgctgttttctctcccttttctttacctacttctctcatttttgatctctgtgtgtgtgcttaggatcctagggtttctggttaggatcgagcaagttcttcacgagaatttgctctgctaggatttggaaaacagagtaaagtgatttgtgtgtgtgttgagttggtgtttagtgcttcgagactctttttgaaaaagtcttttagccaaagtgtttaaacaacacagttttgatggtcatattattcttgttgttgccatttgaatctaagttttacttagacaagtgaaaggtacaatgtgctttctgttggtgaagggttatgcaaataaatttgataaaaataaaaatatatagtactaaagacttggatttgatagttaagttaattttatggtacaaatcaatatatatacatatacatagttttgatctgacctgatttataaaatatacgttagtgcccaactgatgcaaataattttttatgaaaatttatcttatatgcaaatccttaatatcaacgataccagtgttattgatgatgcaattaaagcttaatttgtgtctcttaactaccgaaacaaattttagaccgagtcatcaatacattttgtctagtaaataataggtcttaaattgtgtctgttaactaacgcattgacgcaaaaagtaggtggaaatagtagtagtatggtaaatgagtgatcaacctacttaaaagagaattttcattttatggtttttaaggcaaagtttacaaacttatgatttattttttcaaaaaaaattttgtgggaaaaaataaaaaatatagaaaaagatgattttcatttttccaatatttattttttctttttccaattttgcttttgtaaactacaaaatagaatgacaattgacaaatgagattattcaaatatttatatttaaaaaataataaaaaaatacacgttaaatgattgaatgagagtgcaaagagtaaatttgtgagttaccctaacactcattaagatctattagactattacagttaattgtttccaatctaatctgtacattttagtcaaagtgtatgtaatttatattaagtgtgaatttcatattttagatcaaattcaatctacataataatttaacttcaatctaattcaatctgcaaaagtactttttaatattgaattatttaatatttattaaaaaatgctaattagaatttttgccccctaaactttgacatatatcaaatcatttcccctaaacttttaatgtcgttaaaaatgctacctgaactattgaga

SEQ ID NO: 20750 - DNA, 3422 bp, Cannabis sativa
taacacaaactattaacaaaaatgacaatcccacctacacgcatagcttctgaaaagctgggaaacaaaaaggtggacaatcccacctaatctctacaaattttaaccaatacataaaactctaacacaaaccaaatatatatgttttataaaaaaaaaaactaaatatatattatatactttaaaatttaaaaacaactaaaatatgagagagacaaaaattgaacctagcaccctcacattaatataaatcctttcttactaattgtcctaaagatattttgatgaaaattattgaactaatatgtatatatattatatttttatttttatacatacaattttaattttaatttgtagagctctttaaaattgtggggcgtaaaacccttgactgccccactctcctaaacaatcatctttgtcccataaagtcaaatcatctatataaatataaataacaggtgacaggtgtccataagaaaagggttttcctcgttttagtttatacatgcatggcaagtgtatcagtaaaaatgacccgtgaagtgataagtagactattataaaagtattgctactataaatcaataatgttcatcactataccacactataaagtggtgtgttgtgaataatcaacaatactacaaaagccgataccattggcaccaccaaaaaacaaccttatgaaacaaatatatattaaattaaaatatataaaacttaattaattataccaatattaatgtgacaagaattaataatgctaaatataaggtaggaaataggaatcatagtatcatagggtgagagcaaactattatcattgatagatatagatagatataatataaataagtgagggaccgcatgacagggatctaatctgatgaatcataaacaaatactgtacatcacaaatctacttgtcgtgtcctccactaaccactactactactacccttcggcgcctctattatttaatccattcctaccacgtcaccgtaactgcatttacttaaatgccctcactctgttcacacatggcgttccctcattggacgcagctgaaggccgatactttcgggcttacctccaatggcagcatcaccacctcctcctttccgtcttactcactcgccagcacctgatgataaatatcattgtcgagactgaatctggagcaaccctatcaaaacatataacacaaaccgactcgccgagttttccctactgagttcgagtcgccgccgatttctccttcattttaccattgaacgacatggatcgttctcgagctttcgtcaaagacgtcaaacgtctcatcatcaaggtcggtcgctcacactcattcactcactatttccagtttcttttacgtcttttgttcacttgaaccctaaatttctacctccattaatcctaaacgttgaaattgagaggcaaagatgagtgtttttctttcattgattttcggttttacttttgttaataatatttggtgctgttcgaattgaaaatggagaaatgatactttggttttcatattaatttatactgattacagctttaagtagagtacttttgggtttgaataattttgatacttgaaacttgtttgttaatttaacttatgaatagtatgatatttggttttaattaattattttttttttaaaaaaaataataaaattagagataattatttgttttgttgattggttgattttctgatattgtgctttattattaatttttattttttgaaggttggaaccgcggttgttactcgagctgatggaagattggcgcttggaagactaggtgccctttgtgaacaggtcatttctatattatgtatttactgtttcttgcagtttgaaaaatgcgattttatgttaattattttaaatttcttgcagattaaagagctgaattctcaagggtatgaagtcattttggtgacatcaggtgctgttggtcttggtcgtcaaagacttagatacaggaaattggttaacagcaggtatctcttgttttctctcaatttgatgattgctgttgttttcgcttttgaagtattcagttagttttgataagtaaaattcttgcagtttcgctgatctccaaaaaccacaaggtgaaattgatgggaaggcctgtgctgcggttggacaaaatagtcttatggctctgtatgacacattgtttcttcaggtgttttcttgttttctggattttcatgtgtgctttggaatttggatttaattacttactgccaaagtttgatgattgctgggcgaagtagttttaatttaattaaattaaattttctaccctgcagcttgatgtgacatcagcccagcttcttgtaacagatcacgattttagggataaagatttcagaaagcaactgagtgaaactgtgaattcactgattgctctaagggttgttccgattcttaatgaaaatgatgcagtcagtaccagaagagctccatatgaggtaaatttgtttttcatatccccgttgactgtttcagttgttaccgtgaagttttgttcatgagcgctctttgcaggattcctctgggattttttgggataatgatagtttgtcagctcttctggctttagaattgaaggcggatctccttgtattattgagtgatgtggagggactttatagtggccctccgagtgatccaaaatcaaagcttatcgatacatacgttaaagaaaaacatcaagatgaaattacttttggagacaaatctcgagtaggaagaggaggtatgactgcaaaagtaaaagcagctgtcaatgcagcttatgctggaattccagttattatcaccaggtttgcttttctgctatatttttatgaagtatttttcaagctgttcgagtagtatttacaattttatgacgtgcacattacacatcatggtattaacatagtttgatcatctttgaaccaatgtgtatgctgtgtcaataatatatttcttgtttcattttgaagtggatatgctcctgaaaaccttattaaagtcctccaagggcagcgaattggtaccctctttcaccaggatgcccgttcattggtcccactcaaagaagttgatgcacgtcagatggcagtcgctgccagggaaagttcaagacgccttcaggtagcattttgaagtttcttgtgctaaacataataggtttccctgttagtagaacaggaaaacataataggtttctgtttccttttattgctgtgtccttgcctccaatacattttctttacgagtataatttacttggtgacattggtttgtaggccttatcttctgaagaaaggaaaaaaattttgctcgacgtagctgatgccttggaagctaatgaagagctcattaaggctgaaaatg

SEQ ID NO: 20751 - DNA, 3187 bp, Cannabis sativa
taaaaattaactcaaatttcaatatttttttttttttgtaaacttttgattatttttatttttatgtatgtaaaattattcctaaaaattatttaaaaaatcaccataaacagtaaattaaaaaataaataaaaaaaatacccaagttattaatagaaacgatcgcacggcggctttctccaggccgccaccgtctgtatttgtatattccgaataaaacatacataatctctgatttgattatttatttttatgcttttttattaatattttatactaaaagacaaatctttttatataaatatatcattttatttttagtcctgatttaatcaaattttcaatatctttaatttgaacgacctttcccaaagctccatcaatggcggactccaacttcgcctacctctggtttctcctcatcctctcacctattgctctcctcatctttctctatttcatagttcgaccacgtccagtcaagatcgcaataaaaaaccgtcacgtcttcatcactggcggatctagtggcatcggcctcgccctggctcaccgggccgcatcggagggtgcacgagtctccatcctagcccgatcgctcgacaagctcaaggaggcgaaggaatcaatcagtctagccacaggcgtcgacgttgcgatcttcgccgttgatgtgagggagtacgatgccgttcgtatggcggtggaggaggctgggcccatcgatgtgctggttgtgaatcaaggggtttttattcctcaagaactggagaagcaagatttggatgaggtgaagttcatggtggacgtgaatctgatcggtagtttcaacatgataaaggctgctttgcctagtatgaaggatagaggaaatcgtggaccggcttcaatcgctctcatgtcatcccaggctggtcaggtaggtattagcggttaattaactccaatttccttaggcatttcatagtgtgttgaactcaaatactaaattgcatttgatttgcagaccaagttctcattgtgagtttttcacagagtattgtactagttaatctaagactcacagagtgatagtaacacatttttggcatatgatattgaaaatgtctattttcactgattattcatttaatttgaagaccatgtcctcatttggaaatatgtctcgaaattttaataaattgaaaatgacagtgacaacatttatatatttttacaaatttgtttgactgtttgagaaagctctgttattaatattattttttgaaacctatttcttttatgatttttttcaaaaaaagaaacaaaagcaaatctacactaagcaaactgtcaaaaagggttttcaagttttgtttttgaagaacaaagttatacagaacaaaagtaaatatatctgaatttctcctaaatgcttgtattaaatgttaggtgggcatatatggttatacagcttattcagcaagcaagtttgggttgaggggtctagcagaagcgttgcagcaggagcttatctcacaagacattcatgtctctcttatatttcctccagatacagatacacctggcatggcagaaggtacaagaggaaacctttaaacaatcacttttttcccctgaatttgtagtacattttgttctatgtgaatgaatgtgtgattttgggcaatggcagaggtcaagagacgtcctcagctcaccagcgtcatagctgcagcatctggtgcaatgggagctaatgaagttgccaagaaagctttggatggcattaaatgtggtagctttattatccattgcaacttagaggggctcttactgtccatagcaactgctggcttatctcctcagagatcatttctaatggctttcgttgaggtgtttgctgctggcctgatacgtgttgcagcactttgtttccagtggaattggtattcaagcattgagaagtggcatgtacaacataaacaataaggtatatttttaggccaacccatcttagcagaacaaaaattgcaaaacttgtcggtgaatctaagcgtattttattatgatgttttgtgttttttgtcaagcttaatctttgttgggatctaacaaaagaattagctctaggcttcttgcaatctgaggtgagctaatgtcctaagttgctacacgggtggaatccacacttacaataaatgttaggaataagcatcggtgttattatgtaaatgtttttggtttgttttttattccgggaatcattcacagaacgattagtgcttgattttgtgaaattttaattgcaggtgtggataatttgatggatagatgtaaggactttgacccacttaagtgttgaagtgaagttgaagagttagatttcactctatacatgagtgtgaaaacaacaaacacaagtgcttttgtaattgaaaagaaccattcttttttatcttacaaaaatcatgcttttttcttaaccattgaacctttctgatttctgtctcaaattttggtctgtgtgctacttaaattggagcacccaaaagtctagactgtaaaatgttatcacaaaataaactgtgtaaagataaaactaggggaagagatagccttttgacttttacaatgcaatttcttgtggtaaacgacagttttgttttatttttgtatatgaacctcaacacttatatataaatatatatttgatgaacaggatactgaaacaatcagatcaacacaaagcaaaatataatcaaaatagagtaagtttgcggcctacaataacaacctgtttttaacttgttacagttcaagtttatgttgtagtatatgctaattgcacagtatatctttagaaaactaatgtttggattgtaaagtggaatttaaagatgaacttgagaagaaaaatcgagttttacttgtcacaatctctttgtttattcagccaaaatcttttaggattttaatttattcttaaaaataaattgtatatttttgttttttaatgactatagtggttggttagtcatttaagatttttttaactaaaataatatacaattgtaaaccatatcatgcaaataagagattaaaagccatttaaaagaaaataaacattaaaatataactcatttaactgtgttctaaatgtgtaccaaaaacttatgcaaattatatatttttatatatttatata

SEQ ID NO: 20752 - DNA, 4064 bp, Cannabis sativa
aaaaaaaaaaaaaaaaaatctatgctcaaatgtgacctagcaaccaagatatcccctaattttgcatcatcaccaaattatactcatgtttccttaacttctcaaaatgcctctgctataacattacctaacatctaactttattcaatttctttgctctctttctctctttcttctcttccttctctctatgctatctaagttttttctcacctagaatgcaccaataaacacataaaactggctatattttgttattaacacccactctcaccctttcttgcaagatcttaaatgatatagtccaagtttattaattttgggtgcttggagggaaaatttcttatgtatgtagatttctctaacatttattgtttggtgtttatttttacatgtttacgagtatttttgaacagatttgtgtctttgtttgtctgttgtgttgaattttttgcaaaaaaaaaaaaatggatatgattttttcagctttctgctcataaaattaaactcaataagttcgatggttactcaatataagcatgttcttgaggttagtgatgaatttttgagatactcttaatgctactcaatggtgttgttaagttatattatttgatttaaaatatttgttgtactagatggtacttgatggttctagagagttatgttgtttgtttattttcaactgaaactataacatcgaatacctatcgagtaccatcgaacacttttcgaataatcatcttcaacttgtagaaaaatttctaactgagacctattgaatccctattgagtatagcagttcaaattaaaaacaaaaagatggcagagtttatgtctcaaacctagtttcatagttcaaatcacagatacaacaaatggagagatcacgacaaagaacatgggttcctctctgccacggtgaggggtaatgatggagaatgagagccgagagaatagagggaagaggagagggtcactgtggcgctagtttgagtcgacgaaggaggtggccgacaaggggctttgcttcatttaagagtagagaaagtcaagagaaggataaacaaagagagagaaatatagagaaaaagagaatgatcgaggaaaaaaaattatgaggaggcaatttggtaaattagggtaacattagcatattttggtaatgatttaatcttggggtactattttactaaggtgtctacatttaagcataggaaattatatatatataaaaagcataggaaattaaatttgccaattaaaatatgtggattccattctagcaagtataacatctattcaacactacttgtttcttttaacatttattagtattatttcattttttttttaaaactattatccatcttagttgtcattgttttgatcaattattgtagtcccaatccaaccctaagtcactctcagtcccatcaatttggtgagaccaaaaccataagacaaatttatggtgatgactccacaaaaatggttttcagctgtgaatcaaattgtggggacactttccattatctcattcaaagactatctagagtacttgtgtcaaaaatggccatatagttagtactgaatgacttgttcctatgtgcttgacactgacctcttaagagttccacaccgcaaaatcaatcttccatcaattttcaattgataaaattcaaaatgtaatcatccctccatgacctcacttttcattcttcatagttattagcaacaatttggaataaaatatgatgttactaagagctaccatatataatgaattgctatactttgacacatatataaaaacatgaagtttcaataatattatcagaaatgttacaagttgtattactattaatcccatattttaaacttctattaaattttaatttcatatctttttgcattatttatttatgctatatttaagtaaattttattaatttttttcatatttatagaaaaatttcttttatcaatttgtctctagttagtatttttttttattaatttacactttatacattagaagcataattataaaaatcgagataaatatagtattaattcattttttaagcgaagaataatacaaaatctataccatattgccatgcattaaagattgtctaagatacatagataatagttcatatataaatacaattagggatactttcataaatacccaaaaaagtcaagaaaaaaattacaaaacatggttataaagaattttaaatatttttacggtttatatatttttttttacaaaaaatacatactattgatgttttcatgtttgttattgtttgttgcgatcttgttttattttttacggtttactgtttgttattaatttgatgttgttttcttattgtttttatgttatttttatagaacatcgtaaaattgtaattaaaaaaatagtaaaattcaaaaaaatagaatttttttcaaaatgtaaaaaaaaaaattatacaagaacgggactaaaagaatgggaacttaaatcaatataataaacgaaaatacaatcaaatatttacggtgataattaatttgataatttagacatctattaataatattttataacactctaattagtggttaaagtacacttttatttattttaaatattaaaataagttgagttttaattaatatctttatcaaattattgtggtacattttataaatgaaaatatttgattttgattaaatttatgattttttttttgtaggaattaaaatgtatttttgttgaaataagaaagagaaaaaaagcaaagctgaaaagaaaagaaaaaaagatgacatttttattgaagttcaaagcaacccaatccaaaaatggtaagattagcccatgaagcctattatcaattttttctcttctaaaacatgtgattcaatgatgataagtctaggttcatcatcaattctatttctctctttcacactcaatcttcatcaaaagattagaaataaaataacaatgacaacaaaaattaataatattaattttatttttgttttcaaatgtcttctaagctgcatttagtttcatctgttgtcttaatatctgtgattgtttccatgtcagctttcttgtaattttgtcagtcagtgccatatgtccttagctgggttgttagttagtcgaactaattctctatcttcaggatatataatattctgcatttttctagctaactctcttctgttagaatcattttcttgattcttgctttactaggacaaaatattcttttgtatattttctagtttatatgcagatagaaattcaaagagtcttcaagaggttgaagaaggagtttgaatctgcttggtctgaggagagttcaaagtgaactgctgaaggttcttcagctgtgtggatgcaaggcgaccttgtgttcttggatctaaatgagtttagatctcttaactttagtgtgttcaagtgttaggtaacattgtgtaaaagtcatttcaaattacattgtttgatttgtaaaatcagaactggtgtttgtgattgatttaattttatagtggatgttactttacccggttcatggaatccaagcactactcggttggaatgcattttcaatgcaggggaagcttgtaaatatgatgttctttgattatgatttctgtttcaattcataataataaccaattagaatttttcaattagttatcgtagaaattagaactttcagttgctttaacattaaactatattaactaaaatatataaaaacaatttgcttttaggaaaaaaaaaaaaaaatgaaaattgacaacgtagtctttttcacacaattttacaaaactgcagaggatgctataattattatttttttttttaaaaaatacaaatcttagcaaacaaaagtttcaactatatcatattatgcctaaaaaaactaaagataattatataaagcatcattttttgtaaaaaaaattatttttttacgtttaatgatttttttttacatttttacggttttccgtaaaaataacacaaaaacaataagaaa

SEQ ID NO: 20753 - DNA, 3579 bp, Cannabis sativa
  modified_base (954)..(957): a, c, t, g, unknown or other
tatatatatatatttgttctttcagaatttaaatagccacaattatttattttgactgtcagaaaattgccaggagatagaagatgtaattaatcttatttgaattttctcacaacttaaaattcttgaagatataatcttatttgaattatatgaaaataacgtatttaattattaagcatgcatggtcaaactagccataatgccctttagaaaaggaaaaaaaaaatagcaataatgccactttggaaaaataaaaataaaataaaaaaattaaatcaaatcaaattaaataaaaatagctatatttaatttagaaatctattttaactatttttcatttttttgtgggtgtatgttgaattaattagaaagttgaaaatagctatcaccacctagctagagatctcaatcaaattcaacaagtgttgctaacatcctacaaaagataaaactgttgttagctgaattttgtttgatttttcaagacatttttatgctatttgtgatcgtgccaaaatatttattgtaaattctaatgctccacaatattattcctaacttagtttatcttttgataaggcttaggagtaagtgtagtgaccaagtttatccaattttatgggagtccttgtgacattagtttttggctatttgccttttaatgataaattcattctaaatactctgctcttcttataattatagtgatgccttctctattaataactctatttttttttaacagaatgaatttatcattaaggcaatagtctaaaaactcaaacaaaatacgatagcctcggccaccatactctcacaatttttaaagaaagagcaaatttagtatgagtatgagcaagtttaaaaaaccatattaaggatgtctttcttttatcattattacggggaattatctcatataccggtttttaaactttttttttttttttnnnnaatttacggtttggatttctaaagtggttgcaattccagttgcaagggtttctataaaaaaattttgttgcgatttaagttgcagcactaattgcaatagatgtttctatatagaattccgtaaaaatgaaataaaaaaattcttttgaagtgtaaaaataaaaaagctcctattattattaagtttgtactttgtaccgaaaatgaatttacatggaaatataatatatattttttgatattacttaacaattgttatcaattattatactaatcttttgtcaaaaaagaaaatatcatttgtaaataggactgacaattttgtgacataatacatcacaacttgaaaatgatataaaatataaatgaatttagatgaaaattttaattttcatgtcaaaaatggggtctacaagtttgttaaacatattatagttcaaacgtaatgtattcatgttttccaaacaaacatataataaatacatttcatagtagtagtgagcagcacagcaatagtactcgatcgtgatgaaaactattatggtttcataattaaaatataagattaatttctttctttttgctggatataaaattataactagatgtaattgattgatattattgtagggagaatagaaaatttcaactggagattactaattaaatgacaaatgttttatgaaataataataataataaaacgacttacgatatatataaataaaaataagccattatctcaattggttgggttcaattctccatagatttgacagaaaacttggatcgagacatgacgaagaactcaacttccacaattagagtatccttcagaatatagccgttggaagatttgtgaagatcttcaagtgacataaattcggaaccatatccttggaaactattaaaccatttatcaagttctgaagaatatgaaaagtaaaacagcatgagatttaaagaaaatcagcattatataataattagaagcttaataattattggtaatcatgacctgagacttcatagtgtttagaattgatttgatcaattacacgaagacagtatttagcataaattgtggagttatctggattattggaatcagctgataactttaaaaacattttcaatgttttgccatctctgctttgacaacctttgggatagataattaacttcctagaacaaagaagaaatatatatataacaattaataagtgagttgagagtaaaaatattagataacataaactaatagcataccaatttgttcctccagatttgaaaacctctgaaacgtaataagaatcgtccatcttaatcttagagagccccttaatctcccaatggaaaataggattttttatacctttgcgtccaaatacagaaagtgattcagagttgagagtgtgatttatgacaaaaacttcaacaccaaatgcacatgtgtcgttgaagagatacccattagatacatttttgaaagtattaagtgataccatttgatcgaaaccccattcttttttcatctcatgaaaacgcttcacaacttcattacacaaaaatatcacacatacattagttaatataaaaagaatattaaacaaatacagaaaatatatatgtatatattattaatatccactcatcatgtaccttggaaagtcaaataattgtcgtatgtatgattatagataaataatgtgaagttggcattaacttcccaaccaatgggaagaatatcagtattacaaattgtcaagtacaaagatatgtagttgttgttagtattagaccttttgtccccatttggataaaatgataatttcctatgcataagacacgaacaaatagtattataattaattaaaaataaaatcatttaattaaaattgaagaaaggttactaattcgttaccatttgtagcctccaacctcaaaagaagaactatcgaaattttcttttgtgtctgataataaactgtaggattcaagtttcatcaaatagtgagctggtggaagatttctagtatctgccaaacaatatagcacaagtcaaatataattaaagatgaaatatttatggaaaattgttaatcttaactatggtatagtaaagcgtaagtacgtaccagttgtaaccatgactgtgatttgaagagtgttttgttttgttttgttagttagagtagatggaatattggactgaatttatataaagagattgatcaattcttttctagaagtcgaagtgtctactttcaagtttcaacgaccaatgaatatcataattatgacatttccaagggtaacaattaatttttacttaatatttgtaatattggtattggtatctagaagtagaacgactatatttgttccttcagaatttcaatagtcacaaattaatttgcatgcatgaaccattcattaattgtccttatttataagatgatctcatcccttttccaaaataaattaataagatgatttccatgtcgtcgagaacagtagtgttgaaaattagcaggaggtcaattactttaattttctcattattattatttataaataatattttaggtctaatgtccatatatctaggatatgtataat

SEQ ID NO: 20754 - DNA, 1330 bp, Cannabis sativa
aaatttatcaaagccaactctgagaaacatcaatttattggttagttctggccaaaagatggctatatgtggagaagttggatcagggaaatcagcacttttggcagcaattctaggtgaaatcccgaatgttcggggaaatgtaaggcttctaatctgatccatctgcataccttttcttttcttttttgcactcaaactcataactattggaattacagattcaagtttatgggaagatagcctatgtttctcagacggcgtggatacagacaggcacaatacaagaaaatattttatttggctcccctatggaaggtcaaaggtacagagaaactcttgagagatgttcacttgtaaaagacttggaattgcttccttatggtgaccttactgaaattggcgagagaggagtaaatttgagtggcggtcagaaacaacgaatccaacttgctcgcgctctataccaaaatgcagatgtctattttttggatgatccattcagtgctgttgatgcacatactgctacaagcttgtttaaggtagcagtgttttcataacaattgttgcagatctccatgtctgtttggtgtcgcttaaagttgaatctttcttgcgtgtttgcaggaatatgttatggaagcacttttagacagaacagtcttgcttgtaacccatcaagttgatttcttgcctgcatttgattcagttttggttagacttcttaaaatggcaaaacatttccaagttttcaactttatgtgtttagtaatagaatcattatatagtgaacataaacattaatttaacattggttgacagttaatgtatgatggagaaatcttagagtcagctccttaccatcagttattgtccacaagccaagagtttcaagaccttgtaaacgctcacaaagagactgccggtactgaaaggctcgcgcacataaatcatgctgagaaacaaggaaaattcagtaatgagattcaaaagtcttatacagatatggaatgtaaagcatctaaaggagatcagttgattaaggtagaagaaagagaagtagggaatagaggaattaagccttacaagcaatacttgaatcagaacaaaggctacttgtacttctccatcacctttttcactcactttatgttttgccttgcactgatcttgcaaaactcatggatggctgccaatgttgataatcctcaaatcagcacattgtggttgatcttggtgtacttgttcataggaattgcctccatacttttcttagctttcagatcccattatctagctttattaagcatcaatgcctcgaaatcacttt

SEQ ID NO: 20755 - DNA, 1468 bp, Cannabis sativa
agtttccccattcggctagccatctgttgaatgcaggcctcagtcatgaaagggagaggaacccccatggctttcacccagatatccagaacattgaggtccgccgattcccacttaccatcctccggaagagctgccaccataagaaagccactacagaggttccacgggccattttccaagacaaacttcacttccttcgaacttcccagcctaaagatgaaggtcttgggcttcaccgtttggaaacgccatcccggactcagcttccaaagacccgagagagccctcctgaaagtaccattagagaccatttttttggagaaaaattttcccaccactgacttcgctaccgtctccctagcaagctcattatccggaaccacatcgattgcaaaatcgtccaagcatacattctctgtctcctgagtgatttcatcaactgtaggaatcgtcatcgccgccgccattagcaaaaaaccagattttaaaccagcaatatccccccaaacgtcagcactagaaaccagaatgttatgaagcagaggatatctcaaaaggctaggatattctctgcaataaacaaatgactcctctgccaattccaaataggaaagggtattaaaccctaagacacacaaaatcgtgtctgtaggtagtggaccactacccatgaccagtggtggtcggacgtacagggcgtcaccccttcaccgcacaaacacggcccagagagggcccagaaaggaccgttgcagatttcaggtacaagagcacgaacactgtacggagagaaaaattcaaaaaaccctattatcgtgtccttattgttactaattttcatttcttttttcttgatcagtttgaaatgatttgttcaaagatcatagtggatgaccatttgtcttgcttgtaattagaaccctacatacatatgtatatttatgtattataaatagtagtttatattattagctagctgttttttttcttcttttttttagttatataattatacatatacatttatatatatatatgtggaactaataatggtgtatgtataaaacatccaatatttgaggctagctaatatcaaaccaaaagagacccatgcgtataaaaaatatatatttgtatatgaaaagaaccttgccacttttgaaaattagaaaataataatctaagttgtgttcctatattatatattaaggtaaaatatatcgttatcatatactcgtgtatatatatgagtgtgattacacataataattatgtgttcacaaaattgtaaaattataattttcttttttcaagctgaagaataagaacattggtatatatagaataatcttatagtttatcttttatacgtactaggcaatagtatttgagtagtaaattaaaactgagctgattaatttccatcactttaactacgtaccaaaaaaaaaaagaagagagaaat

SEQ ID NO: 20756 - DNA, 2080 bp, Cannabis sativa
tattttatattattttttttaagtaatctgtggtgtaaaagcttaaatttaatatttggttgttattagatatttaagtttaattttttatggtaataatatctaagttatatttttaaaacttttgtaggtacataatcattaaatgtcaagtcattattcacgtgttacttttttttatttataataatttttaaataaaaaataaatatttattgacataaaccaatcaaaaattataatctttagaattacctacataagttctaaaattataatttaggttataatttaggtattattatcgataatttaggtattattatcgcaaaattaggtattattatcgcaaaaaattattattatcgcaaaaaattaaacttaagtatttatttgcaacgagaaattaaacttaaatatttataccacaaattattttattttttattgattaatattttagtcatttcttttcaattttttttttcttccatcacttctattaattttattttttttcatatttaattgacaaaatattttatggtatatatacatgtgcttatatttctctttccatatatatttatttgattaattcatttatgatataattgatgtctagctcttttaatttaaaagtaggacataaatagtaagtttttaatgaataaatcaaatcttttcaatgttatctaatttcctatttcatatgttggtctgatcctatattgattttaattaatttaatctgatattatttgaagaaaattgaaataaaaatttcatttttaaaaagaaacttgtacttactattcacgattatgtaagtacaagattgaaaatttttaggataagggaagatattgtttaggaaaatttcctatgagttgtggtcgtgtttaaactgtgtattggttgtctaatatgagtttaatacttataaatactcatgttaacagttagggttttttttagggacaatttcaaaaaaaaaaaaaaaaaaattgcaagaacaatataaaaaattacaaaaatacaagctggatagagtttctaaaactttttacgattttttagagtttaattacataaaatacggttttttttgtatatttttatgtcgtatttttgttattttgttgttaattttttgttatttgtatattattttttatgttgttctgatgttattttgattttattttcttgttactttcatgtggtttcttatatttttatagaataccataaaaatatataaaaaaaagcctttgaaagtaaaaatataatttttcttacaaaaatttgtgttttatgtaattatctatttttttttatctcttttacaccctttgaatttcattcatactttgaggaaagagtgcatttaatttgtagatgatagtgtgttagactctacctcaatttatatgtctttgtaattgttttgagtctgtaaaaaagtctacaaaaaagaacaaaagtggcaaccttcgagagaaggttcttcaagctttcgggagaaagtgtttcaagtcttatcttaggaggaagcaaacactcttcaaactgatcgaagggagttcaaacacttggagtttcaacaagattcatttatgaatgtggaatacatcaaatttgcggcatataataaaaggagatctatttatatataagttaattactatgtattttgagatatttctaataaatcttatctctgaatgtgatctcataaactagtaacaatctataaggattgttgatatcacttctaaaaatcctgtgtgtttttatttttgctgattgtctattattatgcaattatagaatcgtgttctgtaattacaatataactgtattaaagagttgatttctaaatcatgttcaacaattacaagataacaacggtatttggcagaattggaatactgggcttgagtctcttataaagcaatattttgaggagttgtatcagtccacagatttattttctcctttgattattgataatgtgaaagttgttgttacggctatgcacaatgaagctctattgcagccaatacaagatgaagag

SEQ ID NO: 20757 - DNA, 2249 bp, Cannabis sativa
  modified_base (2179)..(2187): a, c, t, g, unknown or other
aaaaataccgttaaccaatcataaagtaatacttttaaaaaattctaaatactacttattcctaataaaatacacatttttttatacaatgatccttatgtttgatattagtttgattagtatatagagggaatcatttgattttgatttttttctaaaacaaaactataatatttttggcaaaacactatagaaatatataaaatttaaagattaagcctatcttaaattttttattgggtaaaataattttacttaaaacatttctataaactaagttgatctgcgataaaccgtgtttaaaaaatagttttatatataaattgttcattttcctaggagctaattctatttcatataataaggttttttaaagaaaaaatcatatttttaagagggcacaggatccaaaccttgaagatcaacgaccataaggaagatcgtccaatacacaatagcatttcgaattcttgaatagacacaatattttttttttttttttggaaaagagaaataattgcaaaggctaatagctagttgtttaatattttatattaattttgttgatttatcaactgtgctacctaaagtttgttagcttagctcccaaaaaatggacctgtaacgttttcttttcaaagttaaagctggccaccaaatttttatgcccaaaacctttctgtgttgttgatcataattataaatataacaacaataattgttgttgaatttatttttttaataaaaatgatcaaataattgtattgttgaaacatcatctatctcctataaaatcaacttctcatattattttgtgtatataattaagggaataataataacaataatacatgacactgataatccaaatctggagtggtagccgacctggatcccaaggttttctgtgtctttctctaaaaggcccaataataaatgatgttgatccaataaggccctaggcgtgcaaagggtcaaagagttgctcttgctcgtacgagataaagattattatttattaaaaaaaataccaagttaattaatagatgtgggcccccataacggctcgcatgcatgggtttaattaatagatgaagcccacataattttgcggagccaagggtcgtagttggtcaacggtcacatcagtgagtgagtagactgtgtgtctgtgagtgtgacaaatattggacgtgattaccttgattaagtttgatcatcattcatcatcaacaacaacaacaacctggaaatatgaaggaatccctaaaacgtgcttacctatttcctatattggagaaacacttctatgccctttaggacctttgctcatatttatgggtatttatctaatttaatttgtattattttatttatagtgtatctaatccgcacgaaggtggagtttggttaaaggtaatgaaattgaatagaaatgaaataattttcattctatttctatattttcattcctcccaattaaataccacctaagtgcatatttatatttcaaattcaaatcaatctgcaaaagtacggattagatagattattttagattggttactttccaatattaaattatttattatttatgaaaaaaatatttttttaacataagtagcaacaaaataaaacaaattattattattttatatctccaacaataaattaaactaaataaaataataaataacaaatttaaaataaaaaaaaaaattgtatatataaaaaatatttaattttatttcaaattgtatgtagaaaaaaaattatatataataatagaatatatatttgatctagttttaaaataaatatgtattatatgtattagatttttaaattactattcttttacattactggatcggttacttttacatgtcaatcaacattcaattcgtaaaagtgtagattttgaattttcaatccaattcaatccgcacaagtacatatatccacactttgtgaattgaattagattagatcgtacgaattgaattagatcgaatattttatgaccacccctactcacatccataaagccaccagttgcttagttaatggggcccaaactcatgagtaactgagctaaatgggcctttctactatagatttagttcactagctccatatcataagattaagatgtattatatatctattctatataaannnnnnnnntataacagaattcttggtttatgaaaaattattgggtgattttttttttttaaataaaaaaa

SEQ ID NO: 20758 - DNA, 3967 bp, Cannabis sativa
ctattgtattccctccaaaacactaccctcaatacaaagactcaattacccttttatttaatatatgttagcacaccccactaatcctaggtcctaacaatttgatatcaatccagtagtttagaaagttttaccgctaaatttcaacttaaagaattaaatgtaaatgaaacaataattaaaaaaaatttaaccgccaaacactcttaataatatccaaattattaagtatacctattgcacaaaaaaaatcattttcttatgccatttgagtttgttggttatgaattgattatatcatgaattgaatcaattgtgaaaaaactctgtttctattactaatcataacaagtaatttttactactcagtattcacaacttctaagagtatttacattcatacacatatttatatagatatataattcaggagaaaccaaatacatcctccatgatcatcatcatcaccaccacctaaacaacctaacatttcaacaattcaggcaaaaacacccataaaaaggttttcagatactgtggcggcgtgtgtgacgcctgttttttcttgagttaattctacccacggaattagacagaggcacaaccaccaccaccaccaccactatcacttccaccaccgttgcgattctacataacttggttgcattcccacttcatatcacctccgacgccgttttgtgtcgacctgataatatagaatgctttagattttgagtcatagttgtaaaatggcaaaaacaactgggatttttgagtaaaaaaataagtacctttgtatctgaaattcttgaagcattatgggaattctgcaacttcttttggctctctgaggaacagctttcgcagaagaagtgatcgagtcgttttgcttcctctggagtcatttctatacaagcaggatgaaacctgaatcaaaagtagaatgctaaagactttgatttctaaaacattatagacacgcatcaagatgctaatagcataaaatcacaagcaattaagaacaggaaggaagaaaagaatataaatggattaacaatttcgtaaaacataagactaaatatgttaatttttatcaatctagctgatcgacaccattgtaagctaaatcagccttgaacagtcttaagccaaaataattgatattttcatcgaagtaccatcgcatgtccaaatttttgtgttctacatcagcgcgagcctgcgactgtgtctcaccaccataaccattttttacagaaaaaaacaaatgtacaggagaaaatactttttcagaatgaattattatatacaatctctcaaagactcaaacagatgggtctttcttcgaaaacactttcccaatatgtatataatcctcaggtactgattgtgtacaagggaaaaaaaacagaaaaatgtattggaaaaagtgttttaaaatcataccatcttaagtcaagtttgattctgatcaaattatttaaacaaacctttctatcatgaaattagttttaacatgctgccccattccctttaacaagtaaatatatctattagaagacaataaacaaagaccaaaactcagcaattcaaccatgttgacaagtttcatggtccaaaattcacacaccaactcaagaaaataatgagaaattctaaagagttatctaaaggtttcctcctacaaattcgtgtatgttttaccaactttatctacaaccgaaaacacatatgaatcaaacgaaaaccgagcaatctaacttaccagtcactgcagccttcacactgaaccattaagtcatctggattgtaaggcatctcacacttgcaatacctgtcatattatatcaaatatcaaaccttctgaccaaattgaataagaaaacacactcaacaaaccagaaatcagaaaaaataaggcatttcacaatcataaaactcagaaatttatcttctataaattgaatatccaattcagatcaccacaaaaaatgaggttcaaaccaccaaaatttcacatataactaagaaatttatggcaaatgagcctaaatcatcaacaaaaaaaaagctttagtttttcaattcctaaacactaaaagaacacaaaatcaaaaacatatagtttgagaaattgaggaacatacactgcaactcggtctggattaaaagcaccagtggcagaattatactcaaaacgacagaagaaatcgtcgtttcccactgcgtccagcttagtataactcttaaaactatgaacagtacactttccttcaatagtatccgcactctgaacatcatgatgatcagaaagaaaaacctctttagaaccatgaaattgacggcggccaccaattgattcctccggtcggtaataccaccgaacatgaaccttcacgttggctccacggctgtccgcttcgatccgctcaattctagccacgtacgaaggctttccagtatcagaaggacgcataagaacacaatccccagctaaacacaaagcttcacaaattaggttttttttttcaaaggaaaaaaaaaaacaacaaagtctgcaactttctcgagaaaatgaaggaaagttcactaatttttacttacgtttaacagttcgattgatatgcttgactgagtacgagtctagggttcgtcttggagctttggttttcgccattgaagacaagtactgaagatttttagaatgacagtttaaaatattgataaaaaaaaaaatcagtttgaaaaaaaaaacacaaattaaaaaattaaaaaaaaaaacagaggagaaaaggattgagtacgggcgggtgtagggttaggtttaattagtagtgttgggattggtgagggtatttttgtaatttaatattggtttggagggtattttgggattgtgaaaagtagagatggatgggattccacgtcattgcttatttggatttggttttatccgattcacccaattatttttaattattaaaaacgtgcttaaatatagcaaaatggtaagtaaccccttgaattattagttttaaataattaagtcattaaattaaatgtaattagcaattaatcctatttttcaagttttctttttgaaagggtgttcctactagtttatgtgaagtataaggactatattgaaaatttataaagaattcaagtcaaaattttataaagatttctataatcagggtcgggcctgagcccatacaatctaagggcgaaaaaaattatctttatttaaaattatacatattttttagtagtttaatagtatactacatacgttttaaataaaggacttaatacttttttttctctaagtccacttaatctcatagcactacaattaatgaattttgtattatggaattgtgcatgtttaatggttaaatctaaaaatttataaaatttggtataaagattattttgctcattttgataaatttaagaggtagttgggcttccaatataaaaaaaattcttattttgataaatttaagaggtgttgttgcttggttttaattttttttttttttttgacgtagttattaaaattactcatgaatttatgatgcagacatccacaaataacgtaagaacttcattgaacatggatagctcatcgtctaaacgaagagcatgctttgtcaaactataaactgctaaagtcaacgagcaacatgggacaaaactgcccctaaatatttagacaataaaactataacgtcctgaaacaacacaccccaaagaactagagttatagcttatatcatttcatactacacgccaactcattaacatatcaagaatgattccaaaacatccacaaaacaaaataacaatatatcactactctactaatatgaaatgaaactattccctcgtaaatatatatatatatgagtcatttgtggtataaatatttaaaattgactcccaattgtaaataaatacttaa

SEQ ID NO: 20759 - DNA, 2408 bp, Cannabis sativa
aaaaaatcatcaaatttgtaatttcttctctcttttataggccagcttgtttattcaaatgggcctctctcctaaaaaaaacctatttttttacattttttgggcctttataggtgtggcatgtggatacacaactccactcgaaggaatagaaaaatacacaaaagcaatacaccagcagggttgttcagacgtggcttgcactggagacaagtcattcaatgcagccatcgacgcagcccgtcaggccgatgcaactgttttgataatgggccttgaccagtccatcgaagctgagttcaaagaccgggccggcctacttctacctgggctccaacaagagctagtaacaaaagttgcagctgcttccaaaggcccaattatattggttatcatgtctggaggcccaattgatgtgtcgttcgccaaaaacgaccgtcggatcggtgccattttatgggtcggttatccaggtcaagcaggtggagcagccattgctgatatcttgtttggaaagagcaacccaggtcagcttacttctctattcaatttcttattgttgagatgtctctatagaaatataattgaaatgtggcttgaacaattgttaaaatcattaatcgaccatattttaaaatgatgttaaaatatatatatatatatttatatataggtggaaagcttccaatgacatggtatccagaagagtacttagcaaacttgccaatgacgacgatggacatgagatcaaccccatcaaagaactacccaggaagaacatacagattctacaacggcccagtcgtatacccatttggctacggcctcagctacaccaaattccaacacaccatagccagtgcaccggctgtcttctcagtcccagtccacggccaccgcaaagcccaaaacgtcaccgtttttgacaaggccattcgggtcacccacactcgatgcaacaagctctctctgagagttcatgtcgatgttaagaacgttggctccagagatggctcccacacactcttggtcttctcctccccacccggtgggcgtggcaattgggctccacacaaacagttggtcgcctttcagaaggttcgggtcggaaccgggtcgactcaacgggtacggttcaatatccatgtttgtaagtacttgagtgtggtcgataggtctgggattcgaagaatcccaatgggagagcatagtctccgtattggtaatcttagacactctttttcattgcaagcagctacgttgggagtgattaagtcttaattcatttttatttttttggataaaattatggatagtagaaattaagcaaataaaaatttagatggcataaaaagttaggttccgtatttcaagtggtactgattgaatgattaaacgaagttcatcaactcaagatgaaactgcaaccaagattattggaggaggttttgatttgattcaatgaagagatggaggaatgaagattatgatcaatatgctaaatcttaagttcctcttcttttttgtaattctaattcttttattcttaatttgttggcgaattgcaattattatatacagtataattttgtaagcttgtgttccaaaggagctagctttggatttcttatatggatgaaaagtgtatggacatgtattaaataattcatttgatttgactttctgaaatagaatttattttatattaaagtcaaagcgtgatgagtaacactaaatttatcttttttcaaaagatagtccaactaatattataccactcttcaaagatggtccatgtaaaatcaaaaataataataatgaaaaatagtggaaaagatggccaactcttacttgatcttgatgataataataataatacatatattccatttttgaaatgccttttttttttttttgaaacagcatttttgaagtgccttgcattataataataattaagttctccaataggttcatcaaatgctcccatgctgagtggttataaatttagacaattacgggttttatataggagcactataatgcagtgttattttttttttatgctgaattctgatacggtgttgtcatatatatattccaatcaatacatatggaatatttggggttttaatacttgcaattattacatatataaacctcataaaaaattgtggccgcaaaagtattttattttataatattgtagtcgcacttttttttagttgttaaatgttaattaggagtgaggatcggtcggtttggtcggttttttttatataaaaatccaaaattcggttctcggtttggattggtgcaattcgaaaaccgaccgaccaattcaaaacctatattaaaaccgaccgttttgaaccttgggttggtcggtttaaactgctcaaaccgaa

SEQ ID NO: 20760 - DNA, 3754 bp, Cannabis sativa
agaagtatataatccatcccaatatataattcgaataagagcgtggtcacttaattattaaattttgataggtgaccatccagtttgtgcagtatagacagggctggaaccttttgtataatatatataaatatatatatattcaccattgtttatatttgagtaatcacctttggttcgccatttcttgattttcttcagttatgaaatttgggcagctgacatttatagtcaatgtatattttgttggaatttagaaatctacatatagagtaactatattaacctcttgcttagcttactaaagaaaatgcatattatatttctttggtggttggacttgggagttttaatgtatgaaagaagatatcattgatacaatattgtactaaaatggatccatgcgttctcataattcaatatgtgagataatccttttcaggttcttattatattaatttaaatgtatgaccctataattagttagtagcatatatatggaattatttgaaaagtaaaatacgtagaaaaaaaatattaatattaattttctcttataaaaaaattatatatcaaaagaaaagttcatgaaaactgtcgttcatgctataagttgggaaaggccgagtgctgctctgctactgagttatatatatatatggtggtttagaattatttatgatttcgtttgaaataaatcaaatatgcatggacaatgtaatcaattggctaccatctgtaagaattgcaaataaaatgctacacctgtttctacaatatgcacccatgaaaaagatgtgttgatcatgcaccttttacttaagaattttctagttcattttttttttatttgtgtgttgaaattatttaaaatattttataaaattataaaattttgaaaaatttaaaataatttacaatatagaaagtattattcaaacaatctattttacacggatataaaataataaaaaaaaaattacgcatgcacactgtttgaaccttattttcagtgtgttaattttttatttttgaatttcttaaaattttgtaggaaatcttaaataattataatgtatactaccatgagaaaaaaaattgactaaaaaattgatgcacctctatctatttctgcatccaagagacttttttagtcaattttttttttatggtagtgtatattataattatttaagtcattctctaaaattttgagaaattcaaaaaaatttagcatgccaacagagtataaattttcggttgcacgcatgatttttatattgtaaattattctaatttttttaaaattttatatgatgtcttaattaaataaccataactaaaaaaaattagacaaaatacttttctagatactgaaatagatagaggtgcatctgtgtatctagtttaaggaggtgtattgtagaatattattgaaaaattctataatgcacatctccttaaaagggatgtacagacatacccctatgtggtttagtatccgaaataatttttcaattaaattttttctcatggatatatatattatagttatttaaaacatcgagctaaattctaaaaaatttaatacattgatttaaacagtgtattgtacacgtaattattttattttataagtgtgtaaaatagactgtttaaatagtgttttttatattataaattattctgaatttcttaatttttttaaaattatcttaaataattataaaaaataactaaaaattagatgctgtaaagaattgcattataaaagcacatttatcaaaaagatattatgtataaagaatgtcagtttccgaatggggtgtaactatttaccaaaaaaaaaaaaaatggggtgtaacttgtaagggatataaagttttcaaataaacgtgttgtttatcatgaaagttgtcaaatttgtaatattattgtcgtttatgtagaaattgtcgttttacaggaaagtggtccacactgaaaaggttctcttcaatgcattgttttcatcacgaaatcattaacagtttcaaagaggtttacataaaattagtttgtagagcttcttcaatcagatgcaaaaataataatcggccaaggaccaatctcattttacttcccaattaaggggcatcttaaagtgccaagatattgttacaagtacaatttaatattagattgtacatattttttttaataaataatataaaaaatcactaactaacacaaaaacacttaaggtaccaatgacatattttcccaccccaagtaacttgcatattaatgccccatttagaaatcgataagagatcttggtatgtagtataattttatccaccacatttgtttattagtaataaaaaataatattttacatgggcgttcagagttgtatgaatatcctttcaatttcaaagggcgtatatataataattgagtattgctattaggtatcagtagtgcctagtaccttctcgacatgttgcgttgtgattggttaacgatactccttaaaagctattataatatgggatggatacttagttaaaccaataacaatattaacacgtaggaggttgctaccgtttagtttctcataataattaatatatgttcttttgcattgcttacgtgtccaatagaataacggaccacgggaataaagcctgggaaggatgtacaggggattccattccaataggaagctatagcatatgagagtgagtcactacgagtagtagtactcggaaacaaaatgttctacatttatggaagcgctatagtactgtgatgactctttctaagggatatactaccttatatatatcaaatcaaacagaaatactaataatttcatcacattattcctatatatccactcctctcttcgatcgctctcatctcaccatatatatataaaccctactcaacctgccaaaacgaaaagaccgaaagaaaattttagaaagactttgttgttaattatttggagtgagtggccatgggtgaattcaaatgcaccagcttgattttactctaccctactattttacttatcatcctcttctctgccataaatcacaattattccaattcgatcttggattttccatatgttttacagtacgatcggccgccgaagtccggtactggaaccgccgacattacattcgatctttttccagatgtgagcaccagtaacatcactgtaagtactctcatacatatatatatatatcgatcttgtttcgatcttgagaaaattcaagaaaataatttacgcgggaataattatagagaatagctatcaaaatgaaagaaaatcttcgtctaatatttataggtataacatctatatttaataggaaaagaattctcaaatgatatgaaaataataaaatctttcggtattcatttttttttctatcctaaaatccaagatttaaaaattatgtgcttttcacaaatatatctatttatagaaaaaacaaaaagtatattatgaatgtttattaagtagataattatgattttgttattttaaattaggttactgatgagttaacaaggaaaagtagtagtgatcatacatttgggaaaatggaagagggtttggcaagagctagagctgcaataagaaaagcgtcccgaacaagaacctatacatcgtacaaggaagagagttttgttccaagaggatccgtttaccttaatccttacgccttccatcagttaagatttttttttctca

SEQ ID NO: 20761 - DNA, 3750 bp, Cannabis sativa
tttgatgtcataatgatggcgctccactgaatgtcaaagcttgatgtgtcgtacgaaaggggttttctccttattttcaacccttaaatggcacttttttaaggctcattctgattgctctttcattgtatgtgtttctcttcttttcccttattttaggggtttggttttctctttgtgcctttcagaggtgtttctttatttagtgatcttgctctttgtgtgagcttctccttagcgagacttgttaatttattgttggtatgtgttcttggtaatttgatgtatgtgttcttggtaatttaatagaattattgaggtgaacgaatatcacctatttgaattgccactctcgagatgtggtgtttcatgagaacatttttccattaaaatctagttccccaatccataatctatttgttgaatcactacttcccataataggtctatctacacactgcacagacacatcttctattcccactgatcactctacccccacaccagacattgcatctaccccaacaaccccacaaaatgagccatcacctcccatacatgctgcatcatagccattattagatgcatttctcgctctcaaagcattaccgaccatgaccaaagtgtccaaatctgacagggtcatcaccccaccatccacatctcgatgactatgattactccactggtcatttagttcaatcattcttatcttatgataggttatctgctcagtttcgtgctactatacttgcagctcacctcactgaacctaccacctataagcaagcatgcaaatacaaacaatgactcgatgccatggacattgagataacaacactggagcaacagaaaacttgggatgttgtccccttgcccccttacgaacacacattaataaatgggtgtacaaacataaatacggctctaatggtgttgctatacaatttaaagctcggctagtagccaaaaggtactcacaaaaacaaggcatcgactacctagatacctttgctccagtggctaagtttaatacattgaaagtactcctagctctagctgcaataaaaaattggtcactccaccaattagacatcaataatgtgaaactgcctacatgactttacatcaagggtagaaaccaaaagggtctcccccctaatgttgtttgcaaacttaataaaagcttgtatggcttgaaacaagcctctcgctaatgatttgtcaaacttagctcaactctcttgtggatttcacctattgcacgctgaccacttcttattcatcaagaacaaagacaatttctttatggctatccttgtctaagttgatggcatagtcattgccaccaataggcaacagtgatcaagccattccaaactttgaaaacacttgaactctgtatttaaactaaaagaccttggccccctaaaattcttcttaggcctcgaaagatttaggtgttccagtggcatttcagtctcacaaagaccatttgccttaaaattgttaatggacaccgagttctagggtgccaaaccagtttccaccccatggaatctaacacaaaactcaaaaaggactcaagagatctcctccctgaccctacaacatatagaagcatcataggaaaattgatctacctcactatcacgaggcctgatctatcctatgtcgtaaacaaacttagttagttcatgacatttggaaaagggcttcttttactccaacacaccgtcacaactcacttcctatgccacttccatccttctcgacaataatatttccctcaggtggggtggcgtttggatggtttggatggaggtaatgaaatggaatagaatggaagtgaagcaatttttattccattcatttgttggttttattttaaagattaaaatgtcattcctattctagatatattttcattccatctaagaaaatgccacctaatggggtgtttgttatgtgattttgagttggagagagtagacttgaagaatatgaaatcccatgtgttggaagggattaacaatatcatcattttcatttaaaaagtgggaactacttgaaaatacaaactccttcgtccttaaaatttaatttaatttttatattgtcattcccatcaagtttaagcctcataacaaatgccccatcaaagttttctctaatgctgattgggttacatgtgtggacactcgcagatcagtcacaagctattgcatcttcctcgatgactccttcatctcctaaaaatcaaagaaacaacccattgtatcctgttcatctgtagaagttggatatcgggccatggctaatgcaacttgtgaagttacatggctcattgctctcttgaaggactttcccatctctcactagctctctgctgcactctattgcgacaatgttgcatcaattcactctctgagaaccctgtgttccacgaatgcacaaaaaatgtggagatagactgccacattgtttgagaaaaacttcaagatgggcacatcaagcttcttcacgtttcttccaagctcaacctggctaacctactaaccaaaccactctccccttctcagttcaaagatctattgtccaaaatgaatgtaaaaaaatatttacatatcaccttgagggggtgtattagtattgtattagttaattaggttggtatatagatttgttaagttagttatataactaactctagtagctcaagtgaggatagagtgtgaatataaagctaccctcttcctttataattgtaacaatacaatttcaccaatgagttaattgcagcataactcctaatacttttactatgctagcaattaacccccaaaattcaaattttgacggtaaaaacccccaaaactcaaattttgacggtaaaacctcccaaactcattctgttagcatttagccatttccatcaatttttagtaattaactgccaagttggctgtacatgtgtacttagggtattgtccacatggacagaatgtacacatggcattatatttttggctcacgttaaaaaatatttaaaataaaataaaaaataattttaaaaaataaaaaaataaaaaaataaaagaacaatttttttcttttatctttcttttctggttctttttttcacgatttctctatttcctttctctctctctctctctctctctctctatagatatatatatatttatatgtttcttcatttatagaccaaaccaccaccacaacccatcgtaactcaccaccaccgcaacccagtaccaccagtacagcctagcaccaccactgcatgaacccgacaaagacccaaaaaccctaacccgctctctccgcacccctctcctaagatctatctccttttccctcgctgctctcgactcaacaccgatgagccacctccagtgatgctcaaccgaaatagagaccactacgagcctctcgtgaagaacttccagatctaaaacttgctatgggtcgtgggtatatataaatcactaatatttttttcttttgggttttgtttaattttgtgggatttggatatgatattgtgacaggtgtggtgtgtatagaattagtttttaattttttagatctagtttgagatttttttgggttttatttattttacattttaacagtgttgatttagatttgaaaaattgtaatggtggtactggttgttgcagtagctgcggcggggggggggggggtgcaggggggggggggggg

SEQ ID NO: 20762 - DNA, 5547 bp, Cannabis sativa
tataacctaatatgagtgattgtcattgatgttggtgagcaaaaaatttaaacaaccgctcaaggagcgcgtgatgatttttcggttacatagatagattaggctagtaatttccaattgtaccaagttttggaaaccttttaaaaatctcacattaaaaaaataaatattaaaactaccttataaataatgttgagaaaacacataatttggaataaaataaataatatgacaagagagaaagaattgagaaagaatttcactcggttttattaggatatgaaagtctttataatacatcgagatatacatttcaattattgagaacctaagaacaagaacacaaagttaatcttggaacaatatcatcttttcaattagtgtgataagaccaccatgatttatttgagggcataaatggcacaggcacacttaaagccgcaagaagatcttttctgctgcgtctttattgtgtttgatgttaatcaataaaaaaaatattatactggaaaaacaataatatattcaagtgattaagattgtgattgagttggccaaattattcttcatgaggtttattaaacaccttcttgagcatgtaatatatcataactgcagagccaaccacaaagcaccaccaacggcttaaaatgctgccaacaccactcaattgttggtaatggtcaccaggctgccgcataggtgagctgaaaaagtaccaattaacacaacacaacccttgtttttgttagttgaatataatgtaagattgtaagaaagaaaaaagggttagtgtttcatgccttggcgccactggagttgattcgggtccaggagtcacagcaggtgttgttgttgcatgttcaggctctgcaaggcttggctgtaaaggctcttcaactgggatttgaatagtcttaacctataacacaatagtgtagattatgttacttacaaactttcatttgtgcttgcttatgtacaagtacttttaacatgtttatgatcaatccacttactaagttcctgaattgaaggctgtaaagcatgtgaatgtatctttgcttagctagcttctggtctttgctcattttcctccaaaatccataggttgctcccatgttcaacactttgtttgcataaattttccatgtatagctagaaacagaaattaaaaaaaaaaaaagttaatacttgtaactacacaatcaaattagcatggaatcaaagtttttgttttgtttaccattcatttatcctctggagaccagctgctgacatcttgttccaataatcagattcagtcttgcacttttcaaaaaattcagcaatcttgttgcttgattcaattccattgttgggatcaatatgaaatcctgagacaccatcaacaataatctcagcagggccgccttgattggttgcgaaagttggcaatccacagttcatggcctcaatgacagttagaccaaatgcttcatagagagcaggctgcacaaaagctcccttactatctgcaatatagcggtacagctccgagtttcggtacctatctgtttgtgcagcaatccatctaatctggcctttgagttgatactgctcaatcaaagaatgcatcttttttatctcagcaatttcttctctgtcttttgattttgatggatcaaagaaccctgccacaaccaccaaattcactaaatctctaagcctcttgttcttcccataccactcagtcagtccacttatgttcttgacagtgtcaagtcttgccatggaaaagattattggtttcttcttgtcagccaagtatcctctgtttaaggaaaaaagaaaaggatcacatcaaacacttttggtgtcatatttgaaagaggttagatatgaattatgaagaatgaataaaagtagcaatagacttacaaatgctcattgttgtcctccttgttgaaaagtaaatcttcaatggcaggtttgaaggtagtaaaacgcctttgtttctctgtgtggggaaagtagacagtttgatcagctccaggagcagcaatgttgaatttgggctcgaacacattgattccggaaactactcggcaaagtccaggcatggtaaacactgtgtggctttcatactgtccaggtcggctcttgctgtacaaaaacaacagtgttaggtactactgttaagttaactacagcagttcatttatttagactttcacctaaaaatctgttgctcttcaagttagtcaaacatttaacattactgaatttctattgttttctgtgctgtgtaaaatgcagcttcttaggttttgtaattgtaagctttaattctaaatctatgacctttctgattcatttctctattgtttttctctgtttttggaggacattaataatatgtctagtttggcttcctaaaagggactaatttcttaaacataactaaccttcctgcaatttcttggtaagtacttgttatgatgaaatcagttgagttcattgagatcatatcagctgtgaactgacatgaaaaatggtacttgggatccaattccttccatttagcatctgaatcttcatactttgttttctctagagcatgagcaatagttccctaaaaggaaattacaatgaatgagaagaactgatattacaatctagcattgccaaattaagctaggcaagcataagtagttgtaaagaacctgagttattcctagtttgttggccatcaaagatgcaaccagatttccatcagtgtagtttcctattatgaggtctggttttccatccatgagctgaagaacctttgcagttgcatcctatggtagaatagaatcatcacaagtcaaaacaaaagtatacaaagtagaacttctcatacaaaacttgacagagcttaaattacctgagtaaacctctcaaggtaagggtaaatatcgaatcgcgaaacccattggcgaagaattccttgctctgtcctgaatgggactctaactatatggctgtgcttggtgttgatgataggctccatctcttggttgcactttgtcccttttgcatctggtatcagccttgtcacctgttttgttgtaaaacattatatagtaacacaaaatcttatatataatgatttagaaagatttgcaactccattttatcattactcaccacaataattcttggcttaaatgcaaggccttgttgcttgattcttagtaacatctcttcttccaaggctctcacttgatcaagaatgtagaccacctagtaaaatattgccaagataatgatgattatgatgaagatgataatgtatggataataattaatggttgtgctgtgttgtgtttgtatgaacctggccaccagtatctggcaatccaagcacatcagactggccaaagtagccatgaggtgaaaagatgacaatgttgaaaatggctggtagcctggtgaagatcaactccaagttctttggatctggtgcttggagtacctcagaaaccatcttcattgtctccctaactctctctgctgtatctccccatcccttctcaaatcccaactctttcaacctgaccacgcatgtaccacaaactcaaatcataaactcaagaaaacaaagccatataaatatatgtatgtatatatatactatatatatatctcgaaaagagttttcagagtttattttgcactttgttcttgttttcatagttctttaggtcattttgtttacatcatcaaaactagcccaacatgcaaagcaactttaaagattaaaaaaaatgagagttcagtttgccaagttctctattggaaaaataataagtatgtaagctgtgaaaatgctgacctcagctcaaaattatgatatggggtgttctttgggagtgtggagacgaaactttcacctacaatcaaggcaccttgaagacattcaactgtgtctagtgtctcatcaatcatcagcttctgctttgtttttaagccaaagaaattagattaagttcagtagtaatattatatatgtataaatatatatatatatatatatgtttatacatacctctcctcgatgattgagagattgtaagtaatcaaccaagtgcttagcattgccagtgaagccgctgaggcctgtggacatgtgttttgtgatgaagctgagtccatcaccaatggaagaaggaagagttgcacgaggacttagaaaatctattgctccaaaatctatctctacagcattttcatcatttgccctgcattcatatagcattataaactttcactaagatcaattcaaattaatgacaaagaaagaaaaaaaaaatacaagtgaattattattattaccagtcttggtcgaaaatcaactctttgtactttaagaagtcggatgctgaaattccatcaacagtgagatcatcagcattgatcttcacatattcccagtaaccaggatttggtcttatggccatagcaacacatggtggcacaacagctgcctcctgcgaaaaattttaagaacaaaaaaaaaagatgaacgaaaaaaatatttggcaatatggctaaagtcatttatgcacaataataatttatatgaaaattatttttaaggggtggtgtggtgactaattgcaatgttcaaatatttatattaaaaatatataagtaaaacttgaatacttgggtggaagtgagaatgtagccaagcaagccttctaaaactttgctcctttcttgaacgtctggtatagattggtccacctctttcataatattttgtgctttcattaaccttttcccttgtgcaacaaaccttttatcaaaaaagaaaaagttaaagcatttttgcatgaacttttacaaattgtatcaagtttatactattatgtagacattttgctgttatataaaaatgacaaaaataagtattttgttattatatataggcattatatattacggatgaaaagctatatataagtaaaaataaagatgaacctggcaaaacatttcttcatataataacggctctgcttcaaagcatcaggcatgctatcagcgatggtatcagacctctttaatgaaggagtggaagccattatatattatgtaaataaacagaatgaaagaagccaaagaaaaaaaatggttgaataaaaatccacaaaaaagctatatggcctagctttgtggagtttggttttggtttttgtttttgttttatttggctgtgttgtaattaaaatggaaggtgttatttataagagagaaagaagttgaatgagggtaagcttaggacatattatgaaagaaaggtaaaaagaaagaacattctttaatgtgatttgtgggaaaagaaagattgtaagaaaaataaggaatgatatgattggtgtgttttaagtaaccaaatcagctgtcttttcttttcttttttcttaaaaaagacaataataaaaataaaaaccagcataatttgatattaaaagtgtagggaaagaatttgaattaggtatataattattattattatta

SEQ ID NO: 20763 - DNA, 3251 bp, Cannabis sativa
  modified_base (2676)..(2710): a, c, t, g, unknown or other
taaagaaatgaaataaaaataatttccattccattaattactttctgtttcattacccaagcaaatacccttctataaaaatcctactgtggtatactatttttagtagtactgttgtagggactgcatttatatatatataattaattgacattacatgaacaatatgcatgtttacagacatatttgttggctacaatagtgtggattacaaaaaaggtggtgggacacataatatcacatcaacagaggtgaaagtgatgatagagcttttagaggcctcacatgtagcttttgagtgtgaggacactctaactgaggctaaagctttgatggaagaaaacctcaaaattgcctttcctgacaactgcaacaaatatattcccaaacatgaggtggttcatgctttggaacttccatctcattggagggttcagtggtttgatgtaaaatggcaaatagaagcttatcgtcaacatggtgacccggataccaacactacaactactactagtctcttggttgatttagccaaattaaactttaacataattcaagccacacttcaaaaagatcttagggagttgtccaggtaataataattaattacacaaatttatatatatacttctataaaatgatgattaatttgtacaatttaaaaagttacatctaatatactttgactcacatgagtaaaaataatgtatattttttacttaaaaatacgaatattatattgttgggcattacaatgggttgccctaatagttatttttaaatatttgggaatgagacaataccttgtttgattcattaataaacgtcaatatataaaagtttatttgtgataaacttatataactttatcacaaggaaaagttttatttcatttaatttatttatttatttttttgcaatggacaaagaaatttttgaagaaattacattatatacctactttattttatttgtttttaacttttacttttatttttatattctttaaaatatatccacttttataaatgatgtacattaaattttttagattaatgtaaattatatgttagacttaactagagtgcggatacattagacaattcactcataaaagttgatatattttaataaaatataatatgagaatttttttaattaataaatacaaaaaaaaaaaaaaaaaaagcatttttcaacatatcccaaaaatttttgtaaaaaaaagagtaagaaaaatgttgagaagcaatttagggtccattctaaagctattcggcctaattaggctcttgcgctctcttataaatttcttgggcactgaaatgttttgtgcttttttctctatttcgtttagttggtggaagaatgtgggcctttcagagaagttggaatttgcgagagataggttggtcgagagcttcatgtgtactgtgggactggcttttcagcctgaatacaaaagtctgagaaaatgtcttaccaaagtggtcaatttcatactcattgttgatgatgtttatgatgtttatggctcattggaagagctgagacacttcaccaatgccgttaataggtaatgacctctacttaattaattcactttgtatatatgaatgtgtaattaatatatataaaaaatgacaggtgggatgtccgggaaactgaggaacttccagattgcatgaagatttgtttccaagcactctaccatactacatgtgaaattgctagtgaaattgagactaagaatggttgcaaattagttttacctaatctaaagggagcggtacgtatgtagctaggctcatagaccttttgatttcgatcatcatgacgtgaagatcgatctaattaatgatctaaccaagtatctttacttttttggtttactatgaataatatatgtctatatatatatagtggacagacttttgtaaatcactattaatggaggcagaatggtaccacaaggggtacatcccatcccttgaggagtatttgagcaatgcatggatttcatcttcggggcctcttcttcttcttcattcatatcttgccatgccaaatcagactaatacggcctcttctcttgacataagcaaagatcttgtctacaacatttctctcatcattcgactatgcaacgatttaggaacttcagcggtaaatatctagacattattttcaccaatttatatatgcatatgaaattctatattataataatatactatgcaggctgaacaggaaagaggagatgctgcatcttctatcgtatgttatatgcaagaaacgaagagtagtgaagaggaggcccgaaagcatatccgagaaatgattagaaaaacatggaagaagatcaacaagaaatgctttagtacttgcggcagtagttcactatcattatcatttatagatattgcccttaacactgctcgagtggcacatagcctctaccaatctggagatgccttcagtgctcaacatacagactataagactcatattctctccttactcgttcaccctctcattcccaataagtaaactagctaggatgatgagtccttaatgggtcaccatgtgttttcttttttataattaatagaaaaatttaggtggttaagcagtttattacaggttatgttatgattaattattattattattatnnnnnnnnnnnnnnnnnnnnnnnnnnnnnnnnnnnttattattattattatttgttttctttttcatagtaattaagtttaagttttttatgtacaactcttcaaagcacgtgaacgatgtctcctgtactttgaggaattgcgaatgtgtgtttgtcgttggtggttgatcactatagctagttgttatgtatcgtggtgattttagtgtaatttatattcagataaataaagactacaagtaatgttttatttctacctttttgaagtcattgaatgatcttgacatgagcaaagaatagtgatattggaaagaaagagagagagaaaggaaagaaagagagagagaaagatgaaaagacaaaagaattgtattgctattgtactacgaaatcaagtacaaagaatttatagtgaattagaattaacaagaagtaattctaacttggcttttagactttcttttactggttttttatctgcagaggagctggtccctcttgtgaccttctaaactgtgttgttctgcttttgttgtttaatagagttttctccaggaaaaaaaaaaaaaaaaaa

SEQ ID NO: 20764 - DNA, 2052 bp, Cannabis sativa
tgggagtattatttcggattgtaagatgttgttaaatgacttgcgagatgtttatgtcaattttattagacgttctgcaaatagtgttgcttatttttttagctcgaatatcctatttaattgttgatcgtgtcaggagtagtgatgttactccagattttaatcatgtaattactatgtatgataattgataaagatgatgaatttttttaaaaaaatatatgttataaattatatatatttttttgtaagggtttttaaaatatttaagagggctctgcaattactaaacaagtcattagtgagttgagttgggacttgcgcctcactagttaatttccacaactttcattaaattcccagccaccaattttttatttgtaaaaaaataaatatcaaaagcaagatataaaatttacaaaacttgagttgagggagagggcaatattaattgatagataaactctagaaaggtggaaagccatgataaggacaaccgcatcatagaattgaatattttcatattagatttcgtggagggcttaactagcacgtggcaaagggccatccgagacgatcgctatattgtcatcaaatgcagccgccacgtgtctctcggctgaatctttgttgcggcacgctctcaccttccaaatgtcgcactctaagcgcgtgttaattttggtgccgacttgacatttggattggtctcactctcacctcccccgactcaggaattaatcccatctttttgtcttctcatcccacggtttaggtttcacaaagtcaaaatattaccacactttgaccttcttatttatttttattagaaaaagaaaatatgtacccattaaataagtacagttttacatttcaaaatctaacatcttaggttaattaaagttgctatagggcggccattgacaaaccttatatttttccatttgtcctttttttcttcatgaaattatttaatctagaaagaaagtacagatttgcatggttcaattattattagatttcttttctcaaaagaaaaaaaaaattattattataagtactctcacacatccatgcaaattaattatatgggtttcagagataaataaagaagattttattttgtttgcatgcactaaaatgatacaaaatttgagagaaaggaaaaagaagtacgtaatgtaaacttgtaatgatgaactttccaacacattataataaacttttagtaattaattacatcccaatttatatgggttttttttttttgtgtgtgtgggtgtggaaagagcatgtagacgtgtagtgtgttttgtttagttaaaaaatattctttacaagaataaatatttacttataaagaaattgaatgggactgataaaaagaaaaataaaaataaataaacaaattgtatgttgaaatggggaaacataaaaggataatttgtgacgtaaatatttaaatttaatttttgattgtagataaatatttaagtttaattttttacggtaataataattaagctataatatttgtaaaattattattcacgtgttatttttttattgatatgtttaaattaatttttaaataaaaaatacaaatttaatgatttggacaaatcaagaacacgtgctcattgacttgacttttaatggccaactatttatagaaattttgaaaatataacttaagtattattaccgtcaaaaataaaatttaagtatttgtttgaaataaaaaattaaatttaaatatttatgtttataaattatttgagataaaaaaattaattaactatttagcaaaggatatatatatattattttttttaaaaaaaataaaaatatattaaatggtacgtacgaacttcatctttgtaaattattaaaattatctggtatattaaatgagaatgattttggaagtggggaagtttggttcacgcaagcgaaatttgtgtgatgagtgagttggaaggcaagcaagttaattattgattggatcatcccatacgctatactatactcatcatctcatcctccctttat

SEQ ID NO: 20765 - DNA, 4600 bp, Cannabis sativa
ttaaggcataaaacccaacaggttgggtactggcactatgatcgagatggaatttataatgttaagagtggctacttgctggtgtggtcgcttcaggttgatgatagaatagcaaactcatcttaattgattcattggtagaatgaagtatgaaatcttgcaatgccaccaaaagtaaaagtttttgttttgcgtacgcttcatttagtgttaccaatagctacacagcttatctcccgaatagttaagttacctctttgttgctcacgatgcggagaagaaactggaactctagaacatgctttattttcttgctttgttttgattctattgtgacattgattgagggtatggtcgttgttccatcgttgtgtacatggaccaatgctagaaattttgctctctttttaaaaatttatcctgtgagtcttttgaattgataataattattttatggtggctttagtatgatcaaaactcaatagtgtttggtaataagcagttaagattagatgttgttttagagtaagctcataatcacttgtttgaattcaaagagcatatttggcgggaccttcatttgggattgtactattcaaacctattaaaaacgacctactcggtgatgcctcctccttctcactctttttctcttgcgattgatgcttcagtgattcttgggagggactttgttagattgggtggagtgatacaggacaccgagggtgtagtatggatggcttggtcatctggcgtgttaggtgaattttctgttaatgtaacagagctgcttgccattagactggacctaattcttgcgcaccaatttagttttagtatctctattattattagtgattctactgtgtcaattagttagattaacttcactcaaattttaattctttgttagcttctattagttgtgatttttgtagtaccatgatttgtgaataatattgcccacaacctctattactagttagaagagtatatgaacaaatacttgtctataatttttaagttcttatgtaacaacaaatttatcttaataattttgtatttccttttaaaaaatactactcttgttaactcttttggaatgctttaacattttcgttttcataattgtaatatttttttttttttttagaaaggcataatgtaattgttctcctttcttttaaaaaagaaaataaaaattgtatggttttgttagcacaaaagttacacaatttatccacttcaaatgtaatttgaaaacactaattattaatttatttttctaataaagagggcggcacgtacctattaactagaatatatatacataaaagtaggcattttctttctcttttttactctactcacaagtaaaaagcagtttcttccctcataaactaggttctgcctctgcatctttatccctataacaattaatcacagtagtctctcagcatgtataccactaccactaatagccattaattgacttgaaaaacttcatcatatatacacatttgatcacaaaggaaaaaatccaaagacatatatgctaaccaagtataaattagactaagattgtgtacaaaaactattcaaggcgagcagaaattaagtcccaaacataattataatcctaaaatcaaccaaacatgctactagtagtccttgcaatcaaatttcaacaccttttgtaacattttctctttgatcagccttttagtctcatattttttcttttttactggttacatgagttgtcccctgtttcttaaaatgctgcaccaaaaaaaaaagtagtagcctcaataataaatcacattaaaatttcataaaagtaggaaaaccaattttatgccatgtataataaataaagtacctttttttttgtcatttaatcacaaagggcagctcaaatgccttctgaataatttcaatttgtccttggctatagagactcttgtttgagctttcatcttcatttcctcaaagtactgaaacatttacacatgaaaaacaggatccattgataaagtaaaaaaaaaaaagttaatcaatttactaaaataattaaattaataaatgcagtacctgttgcttttgctttctctcgagttcttcctgtttgtttttttttaaaaaaaaaaatcaaaatggtgtacaaacatgttttgtcagtatcagaaaaaaataactaattgagttgctaatgttattattgttaccagtgcttgcttaaggtgagcattttcctcccttagttggttcaattctgcttccagttcaactgtgtacgcctgcaatattatataattacaatgaatcaatccttaataattaggatataaccaataataataaaatgagtttcctcgatttgttaaccaaaaagttccaacataactctgtcatcatcaaaatataaccttaaaaacttcgaaattagttgaaagtacatgtcatcatcactgtcgagcagaataaaaaaaatatattaaaataagtacacccttatcaatgtcactccttaattatttttacttcgttacttaaatctcactctccaataatgctttgttttttttttaaacacttttatacagagtactttaattattttatatttatttgtttatctttggtttaagcattaataccctagtctagagaaaactgtaatgggaaaaaatgtggacaatttaagttcatacacagcttaattgacagtaaaattctctctaatgatatgagaaaaccattacaattgctctgttctaaagaaactgtaatgaaaaatagtgaacaatttaagtcaatacacaacttaatgaagcataacatattgtaattaacatcaattgctctaagttacttaaacagttgattaaagattaaaactaacctgttttctggctctagacctggcagccgactctcgattcttgatcatcctcctctgccgtctctccaccactttctccacaggaccatcatgactcctcttccttcccctcaccccaccaatatctaaaccaaattgattaccagaattctcaacctgactcccacaaattccgtccgaagacaccggactcatcggaacagccaaccccataggcgcttgcgcagctaccgcccccacaccgtacccgcctcctccgccattcactcctctcccgccataacaaacacccggaggaggaggcggtggcgcgggcggctgctgctgctgcgtgtaagccccgtttctcgaagaactccctccgtaaaccgccgagtccccgaaagccaccgcgctcggataacccaaaccgccactagaatttccggtgactctgttcacaaaactaggccctgctccagcagaattgttgttattgttgctgctgctgttgttgttgttgtggtacattccgtactgttgcgtcttcagtgactgcgtcgtcggcgtaggtgacaccgtcgttaaaggagcaggttcccgaactacccctgctttgacgagaaaatcctccagtgtcatttccccaaaagtgggctgacgaggggtagaatcggaatttctcacaatatccccaacactatcaagatgattaatagtattattcctagtggcggcgctggcgctagtgctctgccgctgcctctgttgatcgtcatcgtgccgacctttgctatgaatctccgaccaaacctcctccacggtcttccggaacagaggcggagggagagtgagagagccttggcgcgtcaggctcggctgagaggctaccccaattttttcggcgccgactttactgagtgatagtaagtcggctgcagctgccgcgccgcctccgccgccgccgccgccaccattgctgtaactgccatgattattattattattgttatcatcatcatcaacatcattattagtattgttatcattgttattggcttgattttcctcggctgtccagatacttgtgaggaactcgtccatgttcatggaaccaaaattcttaccactttcattaagagtgtgctgaaactcatcgagggtaagagagtaaattgagcactgtcttcccagagatgaaaatgggtactgagtcgtagtagtattgttgttcttttggttattctgctcagtattagcttggatgagcagtagtgatgagggctctacctctccttgttcatgtgacatcgtctcctccgtctctcctactcccaccattgttttttctcttttgttttgagattactaatctatgacttcgaggggactttgtagctatcttcctgttaaaaggtcgaaaaatcgaagtgccctttttgttaggattcataaattcgaacatatataataatgtttcgaacactacaagctttatgtgtaacacttaatgtggttttctaacataaataagtaacagctaaaaagtgacacttattgctagctagttataggcatatacttgttaattttgagtctatttaatttgatggggtcacacaattctaacttcctctactaataatcttcaaaactaggaattatgggtttgttaataattaaattacatgcacagattggacgcaccaatgagta

SEQ ID NO: 20766 - DNA, 3660 bp, Cannabis sativa
ttgttccacaaaaaggaagtgagtgactgttgtgatctgagtagctttaggatttgaaatttgtttcagcaattcagtttctggtctcaatttaaggacatcacttgtttgccgaactgaactagtctctccttgattttttcttagctttagatgatgatcaaattcaacagggtattcttaatcttataattcgtataataatcaccgaagactgttgaagtgactaatttctgaaaattaagaagcccgttggctagagatttcttgtaaaaacactagcctcactcagtttataatgagaatatttcaaatagacatctacaggaattagcttatcaaccccccgaacagtactatacgaatcggtactgaacatccctcctgttattgtacaagcttccatagcaataacatagtttggttctggcatttattcgtataatctcactaaaggagccatgaagctgaacaatcttttgcaaattcagcagagaattttcctggtatattcatttattcttttgctttgtagggctatggatcactacagaatgtggcaggttgcaagtttctcctggcgaaattgcagttttaccacaagggtttcgtttttctgttgatcttcccgacggtccatctcgtggttatgtagctgagatctttggtacccattttcaacttcctgatcttggaccaataggtacctaagtttcattgttcttattccaaatttgtagaccaatggactatcatctgtaataagttaataagtgaaggaaactaataactttgatattgcaggagctaatggtcttgctgccccaagggatttccttgctcccactgcatggtttgacgaaagtcaccgtccaggctacacaattgtacaaaaatttggcggtgagcttttcacggcgaaacaagatttttctccctttaatgtagttgcctggcatgggaattacgttccatataaggtatgtttcgaaactctatcttatcgcttgtttcacatgcattttcggtttaagttgattacgatactgaatgttatcttgtttgcttgtatttgcagtatgatctaagtaagttctgcccttacaataccgttttatttgatcacagcgatccgtctataaacacaggtatgcagaatgctttacaataacatattttcgtagtttgtaatacaaattcagttcagctttcactgattgtgtaattttatggttcagtattgacagcaccaaccgacaaaccgggtgttgctttgcttgattttgtcattttccctcctcgatggttggttgcagaacacacatttcgacctccatattatcatcgcaactgcatgagtgaatttatgggccttattcatggtggatatgaggtaaactttttccaaaatcagatatgaacttctacacgtttcttatgattttgagccgaaatggggttagtagaaggaaaagttagacccttttcgagaaagtgaaataaatcaaagcgttatggattcccggtgctgtgtttgtgcggttttggcaaacaaatcaaagagttttctcatgcacaagcgagaaaataaagtgaaatgaagaactattatttgatcgaaataaagactttctttttaggaaggaaatcgaatgaaattgagttcttgtttttctttcaggcaaaagctgatggatttctcccgggtggttcaagcctccatagctgtatgacacctcatggtccggataccaaaacttacgaggtaacattcccatcccaatgctatctttcttttaatttgacttggtatgcaaggtttttctccaatgctatatgacactaaaaacaatgcatgaaactgcttcttttgtttactttttgttctttcataataatgaatgattgagttaatcatttggaaataattatgaagaaaggtgttatagcgctagtttcccgaaaaggggtgttttgttataatccataaccctaaaccgaaagagtaagagtaaaagcaaaagcatgttgttggggttgtcccaagttcgattccccataccctcaaaatttgaggccactcgggcaggactcctgcatcgatataccactggtccatgggattaagtcaaggggtatgcaagctgacccgaacacccatggacatggataccgaaatataacaagttagaaacacattagaaatgatcaactcagattaagtgctcaactgggaatctgctgtcatgaacaggctaccattgctcagggaaacgaggcaggcccgttcagaatcaaggacaccatggcattcatgtttgaatcgtgtttaatcccgcgagtgtgctcgtgggcgctagagtctccgttcatggatcatgattattaccagtgttggattggattgagatcacattttaagagagaaggaaaagatggtgatgagagaaatgacatccattgattgtaaggctgaacaatgagactttgtgataagttagttaattagttacatggcattgtcaatattgtcttatatgtacatatataatacaataaaaatctatgtaaaaatgtgaacaaagttctgaaaagataaataaattgttcatgtatatatgtttgaattatgttgtttgacatcatagcaaacaaaattttgtaaaaaaacaaatattgttttctattcaaaaacaattgtttctcacattattttttctcattggtttttttatcatcatttttactttctgcctcgcagagtttcatatcgtttttttttattcgaagttaggggttcaagtttgaggccgaggctgaggggtttgagttgggtttggggttcgtgcctaggtctagggtttgagcccgaattgggttcgaggttgggtttaggtttgtgtcaaggtgttttattgaagtattttgtttatgtaaagaaaaaagaaatctaaaaatcacttttaaaaaatattaaccaatcccatcttgtgctttttgaaaactaaaaataaatttgtataatgtaaatgttttccaaaaaaaaaaaatatatgaattggaccaatgatagagcgacaaaataatttaagtgatctagtgagaaccataataaatgtctctagagctcttataaatttgtaaaaattcctaaaaaataatgatcatttatttttcattgtctctccacctaagaactgtccaataattattaggtgttgggtctaaacatagtaaataaaagttacataggagtagtacaataatataatgggtttggtggacaattactgagtttggtggacaattactaagtttggtagataaatatttacacataatatgtaactatatagctatacataaaagttgttatatttttacttaaaaaatattcatgaagttatatgaatcataacaaaagagagaattctttaggtgtgtacttgtaatttagattttttttcattttttttatagagaagtaccctgatattattactaggttattcttttataaacatgttaactcaatacaatccaagaaaagagtattggaaagccataaataggttattagatacttaaagggctcaattaaagtgggattaatgtatcatgctctctagacatatcaaaacattgagggatttgcagata

SEQ ID NO: 20767 - DNA, 3324 bp, Cannabis sativa
tatatatatatagtgtaacactctcttgtttagcagctgcagtgaatgtgaatagtgaatccaaacaagtaccagaaaacggacacaaacatactccttcctgaagattccttctcagtcacccaagtttcctttttgttcttgtccttttctgccccaaactcttctttagggctttcaataagtgcgtattctctaattggattcacaccaactttacttcaagaatgggattgtgggattcgcttctcaattggctccggaggtaacccctttcatctttttcctttttttttttctttttctaatctatcattttaggttaaaattgtgccttttatttcaactttttggttttcctaatcagatgtattcaatttttcccctttttgtggggaagacaatactaggatttgggcacaactccatttgtagctttataatggcctaaagtatagtatttgagagcacaatttgcgagaactgttgggtatttcagttcttgtgttccaaagttattaagaagccattgaaaggcatatgcatagtcctccaggatgggttagagagattttggaaaatttgatctctttagattgcagtaaatttaacaaccaatgagattctacaaaggaacccagtcctgatagtattcaattggattagcttagatgaagaatcaagatatcttataatcaagtaatttacatttctactattttcaataataaagccaaatttcattgtagtcaccaaaagccaaaagtgaagttgatattccctgaatattctgcaattgagacactattttggataatcaattatctttatttataggatttttaggcccttaaaatgagtatatacgtataaatatgatacaagaatgacaacatgtattatgatacaaaaattcaagagattgaataaaaaagcttgattaatcatgcttttctccataatttatgttgtgaagtatttatagcataattctgttcaacttttaagatgtaagctttgcaaattatatgttctgtgtgagtctgcataaagtataaagtttataaacatagttccttattatttttctaagacaatacaattctgaataaaataatgtcgttttttagaaattgaggttcatgttagcgttgggttcagtttgtcttcttcgttatttcaggttacagttgatcttgcaattagttctatcataatatttgcttgtttagaatgcttaattggttgagctgctttacatttgcaaggagctttagatagaaaagtattttatgtctgtaaatccgtttggtaacttctcttatttttatctctgtatgtgtcagtttattttttaaacaggaaatggaactttcattggtagggctgcaaaatgctggaaagacatctcttgtaaattccattgctgtaagtaaccaaaaagggctgctcaactattttgtatttggtaatggtgttttcttcacattaattctttcatgttttggcagactgggggctacagtgaggacatgattccaactgtaagtatgcttcaataatggttttatttcttgatcataagaatctctttctctctccttttttattacttaataaatttctctctgaaaaagttgtaactatttgttcgttaataagactttttatcttgaaggaatatacaaagatcttattctatcaatgcataaattaccaggttggattcaacatgcgaaaagtaacaaagggaaatgtgacaattaaactttgggaccttggagggcaaaggaggtttcgtacaatgtgggagcgatactgtcgtggtgtctccgcaattgtgtaattatttctcttttctaatcttttatttgtatgctcaaactttctttgcctttcaaataatttaggttgatgctacatgcttttaaagaaacaagtgaaggcttgcatgtcttcaaacatgagattatgaatcatgtgagctaatacaatgtttcctttctcatgtataagtagcaccctgattttagtatgtcaacttgggcaacagaaaagctaataacttttcctatcatcctctattaagggttttaggtaatgcaaattataattacgaccctgtgttacataaagtattgatgctctgtctgccccattctataatatccctcagcatatacacttttgcttggttatattattgtcatgtttttgtttgtgctatgtattaccaaatacattcaggttctttcttacacggatttcattgcaggtatgttgttgatgctgctgacagagacagtgttccaatatctcgaagcgagctgcatgaacttttgacgaaaccttcactaattgggattcctttacttgttctgggaaacaaaattgacaaatcggaggctcttgccaagcaagcgttggttgaacagttgtgagtaccggaaatcatatcataattgcttcttcgtcggtcaatctgacttctttataacttgcctttattaggcatgtcaaactcctttttgtcctgatttatcttttggatgaaccagaggacttgaatctttgaaggacagagaggtttgctgctatatgatttcatgcaaggattcggttaatatcgattcggtcatagactggcttatcaaacactctaaaactgctgggtaagattagatactggttaaaactcaagcaggtatcgaaggttgagctggtgaccggagcagaagttgccgaaagagaatccttagtgctagattctgagatgttttagcacatagttatgtgttgatgctgtacagtgtccaaaggcaagaatttcatattttctttattaatgtccttttttcttttcgtttttcatcatttggttactatgtaatatgtatgattttgttcctggaatactatttttttgctttttactttgtttggttcttttcttattaatttcgtggttttattggatgtactttttaattatgcattgctgcagtatcatctcagatgttatttatttatttgaataaaatgaatttctcatatcacagatgttgtttgatgatttgatttaggctgattacaaatataatgaatgttaagatttggaggaaatgcggcataaataaatgcaattatatttcaattttatttcgtttttttttttaaattgataaaactactcaacgttaaccacttaagtctagctcaactcaagtggctataggtgggtgtgtgagtgttggaagtcctggcttcgagttccagtaaaacataattgtaatatataaatgcttaaatcaaaaaaaaaaaaaa

SEQ ID NO: 20768 - DNA, 3665 bp, Cannabis sativa
  modified_base (737)..(741): a, c, t, g, unknown or other
tttagtcacaagtaacattttattatgactaaaagtcacacttagtcacaaaaaaattatgttgtgactaaaaagttatcactaaaagtaacaattttttgtagtgaaggctggttgacagtattcatgttattttgtggagcatttggagcagtcttttttgcaagctctgtcatgacacattttcctttgtcccttgtgggatcagaagttccaaggttttttgggtttgttttatttgtagcatgtgctcctaaggagcagggtcatcgagaatattttcatcatgagccacctcccctgattcaattctggcctccaatcgttctacattttctcacatttgatgggtaaattcctcttcatccacaaatttcttcttcgttttggcgagctcttcagccatttgagtgactgtaggatctggctcataatattcctcttctttatcttttccatcatcttcagcatcacaatcctcaagatcatcctttcggtctttggggtcatcttcattgatgggcttttcatcatgtggagtcttcttggcaggacgacttctcgcttctgacggttctccattgactcctactttcgcgtgagtagtaggattcacatcatccatgggagtatctccatcacgaatactagatttgttgacggtggtttgggtggctaccatggttgcagtatgcaactttgttgatatcacttctttcttcagctctcaatgaaannnnnaaaatatttaccgagatttttagaaaccaataaagtataacaaagctaaagaaatataataaacgaagaataaaaccagagttattacataattcaaggattaatgatctctagtccacaagtcaatattattatgataagattggaaaagccttattaatttacacaagtgtctttccaagtatttgaatcttaagatttacctgagcactcaaggaatgggattctaaccctttgcatgaatgggttttcttatatttatactgctaggattctcgtatgtaaaccttacccactaatagggtaaatacaaataatacattgacttcgggcttgtctgatgaagcccaacccataaggcattattcttctgctgacgtggataccacatcatattgataattatcaaaatgtgtcctacctttatggataataaagacacattaatgcttgattgatagttactttgtttccatattcagaagatatgcttcttggacatgatcctgggaatcaagtattgatattgtgagatttaataattaatgaatatgatatgtagctagatatctagatgcctattaatcactcatccttaagatcagttcgatgtcatctaaagataccctgtgccagaggtgtatcttgtctagacgagccatctgtccagcatctagaaggcttgacttcgctaatggattcagtccattatcttggttgggctagcgattgggcctagaacagttgagttgaatagaattacaagtgtctaccattcggaatacacataacaaactcttcttgtgactttttatgactagttttatatctatttttgtgttgtatgaacttggatggaaacaaagtaagatattgattatcacgtcatatggtaaatctactgctgcaaatcaatcaacatttatgtccaagtataatttcttttaggaaagtttttagacttctgtaaaacgtgtacaagttgtctctagggtttctataatgtataaatagaacctagagagcagcttgttcttttatctcttctattgtttcatttttcatattttagattgtgagaagagtgtttttttttaaaaaaaacctagagtgttgctaggtttttgtgtctttgttattgttctttgaacaggtttaagagaagctttgaacaagtgcgggtcttcgagagaatacttttctaagtctcattacgggagaaagtgagcacatatctttgggagaagacttttctatgactcattttgggaggaagtgagcactgtcaagggttgaagggatttcactacttggtgtatttctgaaatcagattagcaatgtagattacaaaaagttgcggcaaaggttttgagggattcaaactttgtaaagtcaattgcatttataatatttaatactttactaattaattttattctttgggtatggccctatgaattagtagtatttgaaagaatactaataccacgtataatttgcttatgtgatttttaatttattacttattctacaatcgtttgttggtattacttttgattgaacaagtaaccaacttgttacattaagttattacaataacatttttaacatttgttacgatagaaacaaattactttttgcaaaataccgaattttaaagttaattcaaaatgtaagaaatcatttttcttatcaacaatagtaaaaaaatcttaaattagcttatttttatttgttgataattaataagatattttaaattttaaatcgtaaacattatatcaatgacacacatcagccacttaacattttgttagtcaaatagaataaaattaggggtgctcatgaaatcgaaaaattgcagatcaaaaccccaaccaatctgtggatctatttgtctgtgtacatataaggaatgtttttgaatgtataatatgctataataataaacaaaaattattagaaagttgacgtttcgaaccaaataaccaattcgttctcaaatattggattggtttgattttgtttggtttgaaaattttattagtttggtttagtttagttttgagttttcaaaaaaaaaaaaaaaaaacgttatatttgtttggttttagaaaaatgataatttggaccaaaccaatttgtaaacatacccggccctagattaactatgggtgtgttcaaagattagtttggtctgaattttcaaaatttttaaaccaaaccaattaaatgatcaaatcaaaccaatctattcaaaaacggattgatttggttcaacactatagtttgtatttcgtaattgttctaattttttttttttcacaataatggtatatttttttgataattttttttttttacttttaataagtataatacataaataacaataaaaagttattatcataacaatataaaatcaatatcaatattatatctaaagttgttctaaattaaatattaatatttcgtcaaaaaaatatatattaagtatatatataaataattacaagggttggtttggtttgaaccgtgatcgagatttctaaaatcatgactgaaccaaaaaaaatttaaacgatctgaattaatcaaatcattcacatcaaattcatttggtccagtctcaaatagtttggtacgaattaattgaggtttaaaataaaccactaattacaaattatatgaacaccctcccactaaatgaaacttaaacaaaaagtcctatatttcagtatgaatatagtttgaatttttcacgggcacaaaaatttatgaaacacaatttggtagttattataatttgtgggtaaaaatacaataaaccatgggataagaatagtttcaagaatatagaaaatgagggacagttctcattattctcattctccaaacttattattattaatttaaactaatg

SEQ ID NO: 20769 - DNA, 3577 bp, Cannabis sativa
tataagaaaatgagctacttcacttatcaccaattaattttaagatacaacctcttacatattaccatatactcatttattcttactttctcaactttacatttccttatcttaacacaagtatattgacaagtcagagtatttgcacgaattcctcattgatagcacttgtgggaaattttcttttttttacgtgttctgcacgtgagcttgtgtaaaatctgttcagacgagtataatttttaatacattgaagctcctaaacataatacatcttattattataagatatgtactattaacactattcacgagcttaccttccaaagtctatttagatttttagtgatgagcttcaaagagtgttctaaaaataatgtaaaacattactgagaatcacaaataatcataagaatacttacacataaaaaaaaaaatttagatggaaatattatgtttgctcatttcctacacagggcattttctctttttggtatatcgaaaaattataacttaatttcttttatataacaatttacatgcattattgttgtcgtacacatgatggggcatttttaatttttggtgtatcaaaaaattataacttaatttttttttatataacaataatgtacattgttataattgatttttatataataatgtacattattatattgtattttttgaatttttttttaaatatttttataattgcacgcataattatattttttatatgtgtgtaagttactattttgaacttcattttttatattgtaaattaaatagacaaatagaaaaattaagctgtgagctagatattataaaaaatttaaaatatattttcctttagctggttgttaaaaatataaaaggctattaggatgaggaaaatgtaaaaaaaaaaaaaaattcactccaaatatattttttcgtttagaaagtagtggacattctctccaacattttaaagagaaatgctaaagggcaccaatagtatatatgtgttagtatcgctattagtcaaactaagtatcgagtcccatataatttaatataatagtttttaaggaatatcgctaaccaatcacaacgggacatgtcgagaaaatgctagacaccactgatgccttacagcaatgctctttaattaattatatttctaaatattggcaagttggcacttggcaaccattcggaaatctgaaaggactatcggcaatttattccctttaaattattttgacctttgagaagaaaagtcataataataattggttattaaatattagtttgttgcctttcaagtttagaaagaaagacaaagaaaaaaacataattcttattaatatatgagtggtacacaaaattaaataattatttatattagctataatcaatatgtaaatataaacatattacttataaatatagctagagtgagagaagtcatgaacatgagaatctgaattaagttattggagttcacaaataatatatgcatgattcttattatatatccattttgaagaaaaagacaaaatggtgtcaaaagggaacacaatgtagtcggtataagtaactataatattattgtgtagtataattaatatttaataatgtttcgtcggctttcctcttgtaaatgttcttttcaaaacaactagctagagtctagggaaatttctaaaatcacccaagatatataatttctcataaagaaataagaacaaacccagaaaattaaaaataaaaagtacaaaatacatattataacaattaatattaattaagctacataataaaaggagagagtattgcagaatatgagccaaaagtatataaagtcaggagccaatataaaacaacttatgtataaatttcaacctaatttaaacatcattaaaagctagtgaaattataaacccatatattacaacctaatctgatcatatgcatcattgcatccaacggatcagcctacaactttaccaaatttggtctaagagagaagcaaaattaagctaataaatttcttctttctcattgtacatttgtggtgcatatataaattgtgaaagatattgactgtataacaaatttttcttgttgagttatagagattagttataataattatcaaatgtgggcaattcaaactagaattatacatatgtaataagtccattaattaataagtgtgatgactttcgagactttccagccggccaataatattaaaaatgaataggaatcaattattaatatcatgatcatatatatatatatatcaatatattttcccaaaagtaattaaaaaatataaattagcaaacataattaattgattttccacaatatttttccacaatttttgttactctcttttagtactcaatctaaatttcccaatgagcagcacagtactagagctagctattgcttgttactatttattagtatatatactaacattacaaacatgacataatacaaaatacagttagaacctacctaggtctaccagtggaggttccactaccaccatcagatgatgatccaaacatatgatggtattgttgttggtgatgatgatgatggtgttgacccatcatcatcatcatccccgttgactgaactccactactaatattactactgtgaccgtacataccaccaccaccagagttggctgcgaagctaccgtgatcatcagagccgccactatcgccgccctgaccgcggcctagggtggctccagcagtcttttctccctccatctcccgaaacttttggaggtaaatcttgagaggatcaacgtagtcttcgaatcccaaagtggtcatggcccagagcagatcgtcaccgttgatcgtctttctcttctcgcgttgacacttgtctgaagcttctccagttatgaagcttatgaactcagaaacacactcctgaactgtctctttcgcgtctttagagatcttcgcgttcgccggtaaagccttcttcattatccggctcacgttagcaatcggaagaaacctgtcctgttctcgtggagatgccgagtttggaccacccgagtcgttgtccgagtcagccatgctctctttcaacttaattgttatagtttaagatcagttttggatagtatgatgatgagattctggatttttttaatgtaaatattattatgttaatttggattttgagagaaagagaggagagagagtcagtgtgtgtgtgttgagattggaatggttgaagtagtgaatctgaacatatggggagtttaattagttatagttatagcttttttttttcttatattgagttggggtctgacacgtggcgttattatgagccgttcgtttaacgataagttttttgtttctcacgttgacatgtgatcgggtttatttatatacagtcacaaattgataaagacctgatcatcaaattcaagccggtttattaaagtaagtctccactttagccgcatataaaactaataatctactaacaaattttgttccctttagattcgatttataagagtgtattatatattccccta

SEQ ID NO: 20770 - DNA, 2538 bp, Cannabis sativa
atccattggatgtttgattggatcggttctatccaatggatgtatctcatatatatttattggtttaatttaggtttatctaatattttagacttagtgaaaacatatagacatgcatgggcatttaaagtgttttatgtaaaagaggcgaatactcgaagttcatgatgaagaagatgcaagtcttcgactttttggtgaattttttctaaaaagtctctttttagtctattttttccctagaaattcattacctagaaccaagcctagtgttttcatgcattttctaccttaaaacctaaaaattatgcggctattcaaaaatatgcatcaaattagctgaaatattctcagaaaagagccaacctttgaattcaaatgcttggaaagatttctgaaacaagatcccttgaacaaatctcagtgaaaatcctttggaaaagctccttgatcagtgaaggttttcaaaattttttgagaggataaagtttgagggagcttgagttttgagagagaaagtgagattttcatttcatattaggaaaacttatataggggtcggacccatccgttgggattacgacacatgcattcagagaccaaagatcattcaatccaacaattatcccaagtcatgcctgcacgaaccccgagggatctagtggtgtggtaccttggaaaagtaaagagcaataaatgtaaccatccttttcgaaactctcaaacggacaaccaaaggtcattacgacgtgatggtgtaacttgtctatctctttgaggtagttttgttgattgacaaggtgtcatcgcaaaactaggggcatgtgttattgcgcatattttttgcctaaaaatacgagtccaatctcatgaaaagaaaacatgtgtacttatcccttaaaggaaaatgatgacgtatttttatatagtcaacctcgcatgattcaacttgtaagaagatgagaccgaaacgatggtctaaacgcatgattgacatgctcaaagaataaacaggaccgagagaagttagtactagtctcacatatctgttatatgcgatgagcaagttaaactcccccgtgtcaagtaaagatcgtttcttttacataggttgtagtccgtctgacaagtgttttgacgatttctcaaagagctcgcttgctctaaattgtcaacaaaatgtccaaagtatgtgatcaaaggtggtcattgacgttcaactaaataaggcccaaggcctattctgcgagtacaacaccacatagccctcgtgagctcgcgtgttgggatacaaacggacaagctacgaactcacaattcgcatatgttgctacaattaaagaaaagataaacaggaaaaactatttgtatattcattattcaaatgttttttctcattaaatataattaatgtaatagcagtcataactgaccggttgtgtaatcttaacagacacatactttgtatgtaaaggaatgatctaaatttcaatggactaggaccaaagcaattaccaaaagtggactaagctgactgaggtcccactgaaccactataattctcatatctcttttattttctatttttgtctttgtttatttcgtagtccaaactttgagtactcgtaattttaagtaagtagtcgcataactattagtgaccgttcttttttaacttgaacacttacataatattgtttacattcttccgacaataatagtcaatttgatatttttagtcattctaattatgtgtaagtaaacgaatcgtatgtgttatcctaaatgttttccttaatatctttttttttagatgtcttgtgagtgttaatggtatttgtactcctaaaaccagtaaaagggtacctctcttcatgttgctttttgggcggcctcgatgaattatatgttagctcgataattcgtcaaggaaagtggaacctttgattccactagtttttgtttagcaaaatagacaatagtaatgtatttatttaatacaaaataaattcatattattgttgctcgagtgatgagatgaagcatttaagtcaagtaagtcacataaacaaattattataagtcaagcatatgtaatttttaaagagctttattttttatgttaatggagctttccactactatatgatattttacaccagccttgcaaaactgaacaagaaaatctaaccattctatttattaattcaatttagtcaatgtatatattattggaaagagattagaaaataataagctataaatttaatagtcatatattataattaaatcttttattttaacttctatttatattagaattttttttttctaaacttttatacgattagagacaacattattcttgtaataatttttttaaaaaaatcaaataatttacaatatcaaaaataaatttaattttgtttgaacatgcataatcaattgaactatcaatatatcaacttaatatgtctttcattaaaaaaaaaaaaaaacccttatggcacgtttactatacagtaatcagaatcggaa

SEQ ID NO: 20771 - DNA, 4581 bp, Cannabis sativa
ggctgaaacgagcggctgccaccctagccgccgcataaccgaagaatgaagccgcaaggatttgtaccacttttccttttccatctaaagaaaaaagagatcgagtataaatttattatatatatatatattatataacgaaaatatagattgaaagggtagttttgggggtttacctagctgagacataagaacacactggaggagaaagcactaatagccaatagggtattgaatgatagaagttgtgagaaattttaaagatatatatataaatatatatatatatatatataaagatgagagagattgatgacctttctcttttgaatgactacatatatatcttctgcatatgaaagagataagaattaaggcatcccataatgtcattttcaaattaaaaaccaatatatatatatatatataaagatttttattttattttattgagatataaagctagcaaaagttgaaggggtcaactgtatcaataactttattttaatagagaaatcgattccggtaagatttttaatcattgccatttgcttgaacataattatgtcgtgtatcgtgtgctgcatgatagattatataaatttatgatgtgatcaatacatgatcactcacctcgcatacaacacaagctaaagaaattaatcaagagcaatacaaattaaatacaattgaataatgcagctatgaactaaggcctataaaccagtaataaaccagtagcaagaaccataattgaacaagaataaataagcaattaagagcaatagaagtaggaggaagaaatcaaacacaatcgagtttacgaggttcgaacaagtgatgatgaatcacttgcctactcctcggccagaacagccccaatggcttcagtctttattgatgctagaagagaggattacaagttgtttacaaggtgttctttgacacattcactcatgaagcaaagcttcaattacataacaactcatctcaccaagaatctctctctgttaaacactaaactagctctcaaaatctccccaagcattgatacccgaatgctgcggcaattggctatttatagcttttgttttaggacccgaatcctaactatcataactgacagttaggtaaaaccgttagggacagttgaaaaaatgtcttagccaatgttgattattcctctattagtggccaatcacaacaatttatatgaatattggttgttaaaccattttaatttataccagttaattccaaaaattaaaattttaacgtcataactcactcaacgatgattctattttgctttagcacttttttgtcttttaggctctgttataatagcaagtttgcatacgtggtacgatccacgtcagcgaataataccaccgtgtcatcaattctaaataaatccctccccccaaaaaatctaaatttaattttaaaaataaatcaaaatccctcaattaaatgaaaaaaaaaaaaaggaaagataaaatctatacaaaattcccactcctttaataaaaagaaacctaaaattaaaataaaaactagattaatacccctaatataaaaacacctactgctcgattcatcccctcccccattcttcctttctgtcattgtcgactcatccctccccctattcttcccttctgccattgttgcacagtcgaagaagaaaatgaagagggctccacatcccaagtgctcttgtcaacacccagcagtgatcaaaactttgtggacagatgcaaactcaagaaggtgatttgcgatgtgtcgtcgtcatagggcgagttgtaaattttttctttattcttcttttttttccttgttggtctgctcgactcctcttcttggtctccaatagtggttttttttttccactactggttggtgggtgttattttttagagtgggttgacccaccaatgtgtgaaagggcttcaaaggtggtttctaggctacgtaaaattagaaggtttgaaggagaaatttcaatcatttcaagatcaaatattgatgagcattattacttgaacagtgtggaaaatatagatgagcaatctttgcttaacaatatgggaaaaattaattacatggagagttttaatgggaatagcaaaggatctaaaagaaaagatttgcactagtagaattttgatcataagtgttgtttttgtcattgttctcttttgtttcatgtcatgagtgttgtttggatcccaatgaaatattaggaatatatatcagaatgtttgaaaatatattgttccatgtaatttaaggatatgtttatttcttgaaaatataatagttttttatttagtcctgttgtatgagaacgtaatgaaaaacttgaaaattttaaatgaaatgattaatatatgaacattgaagcattagcaaaatataatatttattcatttggttgctagtgcattgatcaaagatcacgaaaaggcacctatacaatattgtagcattagcaaaatataagttgaaaccctatttgtgattttggtacattgatcaaaagattaccaaaaggaacctatacaattgatcagtttgagcaaaatataaataaaggctctatttgtgtttggtgcattgataagaagatcaccaaaaggaacctatacaacaaatatctaaaagtaatctaaaacaagtttctgttacaataggttaatgtaaaaacaaatgtcaaacttcttgatgacaatcaatcccgaggctagcaacttgaaccttcgcccctctgcctagcctctttagcaagctatttctcccttctcttcctcctctttagtgattacacatatagattttttacttggtggcatacctcctttattcttttgatcctatacagacatataatctatgtcaaaacacaatacaaatgcaaaactcaaagaaattggcaaatcaaattttatattatacttcctttagcttctctggtatatggaggtgtatgtaaatgacatgctagtcaaatccaaaaaggttgagggcatgtggaggatctagatgaatgcttcaagatcctccaaaagtacaacatgaagcttaaccccttcaaatattctttcagagtaggctcatgtaaattccttggcttcaaccataacctctaccgagggatcatcctcaaattctaccagatcttcaaacttgtcttggagacgagccatcattttcttcattttttcattaagtttttcttgctcagcaaactttttctaagtaattctaactctttagtcactcgaagcaggtttgggtcatggtcataataataaccatccttataatatccatcttttacataaccatcgtcgtcatcctcctcttccatgtcttcagggttttggtcatcgtcgatgccatcacacaagttttcagctttttctccttagttttcaatattagtagtatctccttctcttgcacgacctagttagagatcgggggcgaggcactacaacaaataagttcaatagcggcggacttattagcagcggacacaatccgctgcttattagcagcgaacacaatccgccgctaattaataaaaaaaattaattactattagcggcggactatccgccgctaatacccctatatatatcctatcataccctcattccccatttccccctcttttctcttcaaaactcaaaccctgatttatcatccccattccgactttttgttcttgttgttcttcctcaaaaatcctcccaaggtatgcgtattttattactccgcccatttttcttgttgttttagttgatttttgttgaagattgatatgttttatttaattttattactcccattccgtttttctctttgttgcttcaattgatatttttttgctttctttatttttgaacctagcactggccagagatggaggagggttgttttcgtgcaaaaattcaaaataaacggccccaaagtcctagacaactcactgtaagtcatctccaatcttcattgtttttaacattttttttttaaaatgtctttgtttgtttcaagatcactgtaaattatttagggttagtgttcttaaattttggatttttttttttgttgatctgctctgtctatgtatatatatatttttttgttctgtgtatatatattatatcagtatatatatttttttttgaaagataattaatatatttttttgtgtattatatatatagattatttaaatgtatatgtaaaatatatatgtgttttttatttatgtgtatatatataaggtatatataattatgatagatttatttatattctaaatatattttataaagtttatatatatatatattattgtatgttatttgtattttttaaatttatttgtctttaaaattgttattttttcaaattcatcaaaaagatctttaggagtttcaaggaactggacacaattttgttttggtgaaatgtatatttttattaacgtgtatctttttttgtattattttttatttttagtttagttaattatttttattaggtttgttaaagatgtaatatctt

SEQ ID NO: 20772 - DNA, 3581 bp, Cannabis sativa
gtttaaccaagtagagatattacagaaggtcatataaatatatatagatactcaacatgtatcatacatcagagaatgtaacaaccttccttttcttttggttttgtttctgccacttttgctttgttatccggtgccttaataggttcagaaaccaatgaagttgtacaagctttagaaatcggcgactcaacctcgtcagagtagctaatttttgcagacaaggctttaccatgttcttcatcatcgcactggttcccggttttgacagcaccctgaaaggttgtattgccagaatctgtggtatgtttgtgaaaaatctgattcaagacgccttccattcttggttttcttgattgtatcctcttagaaaattctttcactagaaattccaacctgaagtagaaataacccgacaaaggaaataatacattacagaaaatgaaagcttaactaattagtgatcacaaccacaaatgtatgaaccaaaactaaccttgcgtccaatgcagcagaaagttgcttcagttcatacaacatgtcaaccatttcgctagataagatcttttcgtcccggccaagaggtctcttaagacttccattagctgctgcagttaataggggaatgtatttgtccaaatccacctgaaaatgatggaagaaaataagaaagaaatattggcatgatcatttaatttttctacatgttcatgtgaaaactaatgaaggttttaccttaattgtttgagcttttgatgtaagcttcccttgctctcctccatttccttcagagttaatggcttcaaatatttcccaaaagcgtaaattctttggtgggctcagctcatctttgttctggatgctgttgttctgcaacttctgctctctcaccatgttaagctcagaactcgtccctgctgtggaaccgcttgttgaaactatttctgtcttagaattacaagcttccgtcgcagaagcttgactccaaccttttgaagcttctaagcttttcggaaacaatgctcttattatgtcattcttgcaaggattatctctgagatccacaagtatagcatccggaaacaaaggctttgagacaatggtaccaaaactgacaatgaccaaagaattgtcaatctgcttaaatgctttagcgagcacattgggatttaaactaagaaaatgtgactggagagtatcacaaaaatttgatggtaagtgagaagtgattacaggccttgccagcaaatcaaagagtaaatctgaacacatcccaaaattcgcatgaagcaaacaaattatcaaaaccatcctagacacaagtaatgaataggccttcttctctcttgagggagatctgttgatccaatcaatcatgtactgttcgttgtaaaggcattccttaataacatcgatcacaaatcgaagtagttctagaagagagagttgaaaaccaactgagttatcagaacttgacttggtggccttgggatgaatctcttcatagctgagccactcaacaaatgctgactttgttgtatagaaatagcccctatacgaagatgaccaaatcacaaggcgctcaacaagatacaagaaaaaaccaggagatatggggtcacattcttttctgatatttgagtatgcatctaccaaaactttatgaaaccgaccgataagagatgagtttgaaaagtatgatcctctagacctatgcagaagctcaaagaatgccttccatgggaggttctgctccatccttttgataatcttctcaaatagttcatcactaagcttactagacccgagtataaatacagctacagctccaatttgcttgtaagacagattattcctcgagttgcaatgctcagtaatcactattttcagaaaattctcacaaatgtctgttcctctgaatgaaacaaggtcctctaccaatgatatcttccaatctaaagggaaaatgttttccgaaaaatcagttgatagtcttatcaatttgttcagatcatctgaattttcacatgttctcttactctttagatttttggactccaaaagaaattgtgcaacatcatagataagggtaagagtcctgcatttcctcgaaagagaatcgggtttatcagtcacaaaggtacaaatggcttcaagtttgttcagaaccttaaaaccaacagagagtacttctgaagaccaataaatctcagcagcagatacaaactgcccaacatcaacagaaagtactaactttccattactctttacatatatttgctccacatttttagcccattcagcatcagagtggagcaatacatagtttgtgaccaaattgttagacagcctcaaaacacctaaatagtccaaacagaactctccgtaactcgtgaattcatcgacgtcctgtgtctgcagacgtccaagatattcaaaaattctaagaattctatccttccaaaaattccagaaataaactagtgactcaactgaaacctgagtctcagaaatcatgtcttctgaatgcatcagatgatcatgcactatatgtccttcccagaaatagtttgtgacctttgaatcaagatgagcatcaagaactctccgagcagataggatttcgcccctaacactcttatgtctctgagaagcaatcatttgattttttctcattgtcaagtcactcttcatatttgtcataatatcagcttctgtgcaaacaaaatcatagaagtcttgagtctcattcttggcaaatgatttggctttcgataaaagacaatccttttgtttaaacaacagtaaaggccagccttttttaccagaagaccagagtgagttggaaagaacataggaaagaataagtgttgcagcttctttaaatttcccagccttttcaagaagatctattacaattagtatatctcctcttagctttgcaatttctgaagcctccacaaaatttcctgatttttcttccaacgacataagctcgtcaaaacaaccccattggcacaaaaacttacgaattgaactcatggaattaaaagcttcaacaaatctcatcatagagtttttgttttcaagcttataataatgttgagcacaactctccaagaattcctggccaaatttttctatttctttgcttctactagtcaaatcagaatcttgtttagcttgctgtttccaggattgtatgtatgccaaacccttgtcaaataagagtcctttggcacatacattcagacactctgagaacaaattccctctggcataggcatcagcagcttgcttgtaatgacatcccagggagaagcattccccagctctcttcaaccttgactcaccaaatttttccaaataaatcatacctgcagcaatgataggtgatttagataaattgttggagatgaaacatgttgaacaatgttttgatatagtggaaaagctatactcttacattttcatgtagaataagcatggaaaggagatcacaatttcgtacctgcttgttcgtagtctcccgagtttataaaacaacttgctgcagattcaaacttccccatagttttgaa

SEQ ID NO: 20773 - DNA, 3195 bp, Cannabis sativa
atgtgagatgtgggttaattttgagtacttggggtaatgttttgacaggttgatttagacttgggaaactatgaacgtttcctagatgtgacattaacaagagataacaacattaccactgggaaaatatacaaggtatgctatactttatcaatgaagatgtatgctcttgacttgacctcactttgaatttgcttcaagtaaccatcacatatctctgtttttgagcagtctgtcttggagaaggaacgtaggggcgattatcttgggaagactgttcaggttaggatactcattcactggattcatgtttccttgtttgcttgcttagaaaaagtaaaatgtatgggatcctcttatgtttggctgaattctaggttgttccacacatcactgatgccattaaggattggatagaatccgttgctgttattccagtagatgggaaagagggaccagcagatgtttgtgttatagagttgggagggaccgtgggtaagtactaggtaacacttacacgtttgatattttatctttgttttctaatttatgcatttcttaatgttttcttttactagtaaaaaaatttctctatattattccatttcttaggtgacattgagtcaatgcccttcattgaggctctgcgtcagctgtccttttctgttggtaagaccacaaaaatatgtctttttcttttttttttttcaggaaagttgcttctagttgtttgagttttttcttttttttttttttttgcatattgtgggataactagtatttgccattctactacttgtttaaaacttgttcattttactgatgctatgatttgtgcattcgatttgcatatggaaattgagagtaatgaattattattcttgtcattttttctccatatccttacatttgtttttccttcgcttgaatatttttgtaattgctgttctggtgggaataattgtcttatcaggccaggataacttctgtctcattcatgtgagcctcataccagtattgggtgttgttggagagcaagtaagcacgctaaattttatattagatttgagttctactattgaattttagtatatacttttatttattgatcaaagtgagtagatttacaatgcttgtgttctagattgtatttcttgggtttttttttttttagtgttccttatgtttattttattttttctggtgaaaataatctgtttttgtgcagaaaacgaagcctacgcaacacagtgttcgggaactcagagcattaggattgactcctcatttgttagcatcccgctcttctcaggtatgtcttcacctacttcggacccactgaccattaaatgtgaaaacaaattagggcaactttagtcatgtagattgtgtaaatcctcatataccttgctaagaaatttgagctatttacataaacatgtggcaaagtatcctctatgtcaatatagtattactgactgtgccatactaccaggttgtatgttcttactatatagagcttgaagtactgtttgaaatttatatgtttgggtgtcttcatgcattttatgttttttatgcaactttcttatgctgagaataaaaatttcttcctggggaccaaaatgcagcctctactggaaactaccaaggataaactctctcaattttgccatgttccagtaagttactaatgaagatcatctttatattgttactgctaataatattgttatactattgcaaattagcttactttgttttcttcagtacttgataaatacatgttcatgcggtctttttcaggctggtaatattctcaatatccatgatgttccaaatatttggcatgttcctctcttgcttagggtgggtttagttaagcctctttcgttcttcttatacttaaatgtgtttattttagttaaaattattgtgtttgatgttttctatggtttttgttcagaatcaaaacgcacataactcaattcttagacaactaaacttactcaggtaaatttctttgatcttctccagatagaacattagattattactttagaatctgttccaaattggtcaagcatagccagtaagctgtataatactcttgttttttgattttatttctttctacctttggctgttaccattgattatgttttcttctttcttttcaatgtctggagtggtgactggagtatgatttaatatacaaatcatacaattaaatagtaatttagtaatgctactaatagaatcagacgcatcatcaatcaatactacacatgtcatgcattaactttattacaaaatcatatttcagtattgctacaccacctgatttaagagaatggactaagatggcagagacttatgataatctcaccgattcggttggtgtttaataattaccaatttgtagtgaatttttgatacagttcttttttcggttcacaacgtgataatattctcttaacattcaggtgaggattgcattggtcgggaagtatgttggtctaacagactcatatctgtctgttgtgaaggtattatatatgcacttgtctgttcttatgtacattttattatagcctattgataaatacataattttttctttttccgagtgattttgataagctaggtctctaattccaaagaagctaagtcacagggtgtactaacaatgctgaattgtgcctgcaggcccttcttcatgcttgcattgcctgttctctaaagccatcaattgactggattgcagcttctgatctggaagatgattgtgctgaaatggtattgcatagaaactgcaatgtctgagtactagtggatatctctgttaaatttatcttacctaaaactaacttctcttttttcatcagacaccagaagtacatgcccgtgcatgggagacccttaaagtaaagcctttttactattctgttgaataatttaccattttgcatggctttttcctgtaaatactgaatctggagtggcagtatcagtgcgattgaattcattatcaaggtgtagaacttttatccttgtacagaatgcagcatgcgtcttggtgcctgggggttttggtgatcgtggtgtgaaaggcatgatattggcagcaaagtatgctaggcagaacaaggttccttatcttgggatttgcttgggcatgcagatatctgtgat

SEQ ID NO: 20774 - DNA, 7697 bp, Cannabis sativa
  modified_base (2760)..(2760): a, c, t, g, unknown or other
gaggaattacataagaccccttaatagaaagatataaaaatgttaataaaaatattaaatttttattgaaaatatataaaaattatattaaatatgtaaataaaatataaaattattatttttttttttgaataataatgagatttcattaaatcaaatcttccaaaacaaaggaagcaattacagtaggtaactcaacactactaaaagtacggtcagcctcaataagagaagatcgcgccaaagaatgtgcaaccttattagcaaaccgcttaacaaagttaaaagaaacatcagcaacagaggctaacaaagccttacaatctagaattatatgaccataaggagaggccatatttttatttccttgaagatccaagacaactctaagacaatccgactccactatcacactagcacattcgttatctttaatccaactcagagcctcttttattcaaatggcttcgatttcatgaggttgtaaatcaccaaccttcttcaatgatcttgcttgaataatcataccattactatccctagctacaaagccaataccatagcttttctcatttgaaaaaagtgcaccgtcgacattaactttgattttaggaaaattgggggggtccaatgctcagttcgaacttgattgggttcattaggagatcttaactcttggttttgagcattataccaatcaacaaagtttagttttgccaaaagtaacacttcctcagatgtaggctgtttatcattccaaactacctcatttctaatcttccaaatcgaccataaaatcatacatgcctctaagcgttctgcctcattccattctcttaacccttcttcccaccagctgcaaaaagtcattgcatcagttccaacagcaggaacccgaacctgcctccagcagctttgagtaaagtggcagcaaacaaggacgtgtagagatgtttccggggcagccgaacacataggacagtcagaatttatagggacatgtttagtagtaagttgaaatcgagtaggaagactatttgtacacacccgccataaaaaatctttgacttttggaggtagtttaagctgccataactttgtccatgcaccagaaaaattcggctgctccatgctggttttttgctgctgcagaattgcatatgcacttctcacagtaaacagctccgatgactcctttctccaaaaccaaccatcactttcaacatcagttgacaaaggtatcttccacactagttcttggtcccttgtcgtgagcacatcacttaaaacatcctcatcccattcacgcacatcgactttcattagggagttcaccattctatccacaaggcacatttgttgagactcaacaaaaggattaacatcatccattagccacgggtctttgaggatgctaacatttgcgctattaccccactaatcttctagctccatcctaaaccaacccttgagcctccaagacacttctccaaatataacttggattatttcctaatgttgctgtaaggaaattaccattggcaaaataccttactttgaagatttccccaaccaagctatgctcacaagtaagaaacctccatccttgcttagcaagtaaagcaatattaaaaatataaaaattattgattatattaatcatagaaagagagttaatgaaaaaaaaatatttattgtgatgtaaaatttgacttattttatattttattttaaatttagtacaacttttaaggtgtgcttaagttaaaccactttatacatcactattgaaattcaattttataattataaactaaaaaatacatgtacaccacatttatagtactctattggtaatgcttttacattacattgtatccatctatctctatacattatcaatcaactttaagtttttttttccatttttgtatacctctaaaattgtggcctaaatcagcactatacaaggtcaagatcaatgtagatggagtacttttttcaatggcaaattgatatgggattagatgtgtggctcatgatcaagatgggaaattgactaatgctatttctattagcagagatgggtgtattcaacctgaaattgcataaggctttggtgtttaagaggcgttgagctggataacacaaaaaggttggatgaatgtggtggtagagtcgaactcactggttgttgttcaggcagtgaacagttctgtcgacatgtcttatagctttagaatattggtgcaggattgtcgttcattgctctcacctttaagtaatattttattcttttttgttaaacgatctgcaaatagaaccgctcaatgtgttgctcgatagtcttattttatgtcagtgtttggtgagcttaatgctcctcttgatttaagtagaaattacacaatatatgggaaaattataagagtttacttttttatggcataaataaataataccatggggttatggatttttttttacatattccatatttttgtaaaaaaaagatagaaatcccatatatgtaaaacaataataagtttttccaaaaatgtcactggcattgaaaaagtcatcactgttggaaaagtcgttagacaagttagtgtcaccgggaaagtcacagtcgctggaaaagtcactgtcgccggaaaaaatcattgaaaaagtcaccagaagtagatgtctcaaatataaataaaaatagaaccggttctataacataatgcataaaacaaataacacaaaataacncaaaccggttataattgaaatatgttagtttgtatgcctactaatacctgcactctttctcggacactaactgtcataactgtttttaacagttatgttagttagtgtcatcccttttgcctaagtgtataaatagcctattggcttacttgtattttacttcacttaaaatacagacatactaactgtgttgtgcaaatatttttgaattatcatgttaacatattagtgggtatatgccttctgagtgatcgaagaagtgccttcactggtcaattgccataccaaattccgttgggctttcttaatcacgagcctcagaggactgtcacatgttgagcatttaaccaatcatcaagagattcacgacttggtagtgattacttaataaataaataattaaagttacctcaagaccaatcccgacaagctttactcaatgcttgggagcgtcgtcaggtatgtgagctgcaattgatcaataataataaagtaccaacaagctttactcaacacttttattcattagatattaaataaaattacataggttgaggggggctgcacacctctaactattttgaatcaaaaagaaatagcactcgtaaatttacaattttatcaaaaaagctaagtgggactccactacacaggtgctctatttgactaacagtgtagggccataacttggtgatggaccccttaacttacaaatgacttcgcaacatatttttggctcaagaggcaatcgattcacttgcacaaggtaaagtgaatctcactgtgaataaaactttttgagaaacaaatgttttattggtaatatcgtctcagatgctctttgttctagtaccttggtacagacactacatccaagtgggagtcatagaaggccaactgataactctatggtataaagttatttgttatgcttctaaactgaaattattgtgagaagagtagtgaaagtgtatttgtttgcttaattttaattagttttatttttattttccatttagtaagctagcttttaagtcttgtaaaaatattattttagttgtgtttttttaattaaatgtgcttgtttgctgtgggaaagaaaaattaacttgctagaaaaaatgaatgatgcaaagacaaagtggaaagaaaagctgaaatctgggaggaaatgctgccagaatgctataggcagtgacgtggaagaagtataaaaaacgaatttcacttatccacatcaacaattatgtatcagttactcaaagtacgccagctggttgctgtggaaggaagaagactaaacctagtgggccaagattagaaaggattgtgcttctatttttagggtgtcattttgtaccctatttacctaacaacaaaaaagaagactaagtacacagtcccttcttgaagatgatgacagctgccatttttgaagggaattaattgcaaaaagtacagagaggaaggaaagagaagggggacccaagtgcaagaaaaagagaaggacacaagcttttgtgtttgcatttctttgcccttttcttctatattctttttcttttctttcttgtctttaaatactagaaacttgatagttgtaaaaaaaaaaaaggtagcagctagggatgaacaatttcgagtttagattatatttttcgatttgaacatgagctaattttcttaaggcttgaatggctatgaactcctatgttgtgtatgattaatttttaagcatattttaacatttttgcctttgtttattcaagtaagcttgtcattttcttagattgttatttcttggtcatgaataacaatttgttaagctagatcttattttggaagggctagatctagtaattaaacttggatggagcaagagaaatcctaggtttaggtttttctttgtaagtggaatattaatattttatttaccttgcataactcaagtgttgatgcttaattagtgttttgcaatctggtttgatataggaatatatgaatctagatggtaggacttaaattgtgagttttagaaaattctcataaacacataaaaaattatgttatcactgtgcagaaatgctgaggtaatgctatagcaactgggaaaaacctaactaggggggattagttattcaagccactttttaccatattacatttcttgcaagtaattttctagcaacagtaacattaactttagcaagtttaattatagtcattttaattttgaatcattgctcaaccattctcatattttcctttttgctttaagttataatgagttagttttacatcgtattttgtttgtaatccctgtggagacgatcttacttatcactttattacttgtgtgactgcgtatacttgcatacataattttcacaacaagttattggctccgttgccggggattgaaattaaaaattgtgtattatcaactattttacaattattttctagtttgaggttctaatcccattttagtgcgctgaatttttcttttcaggtataattaagtgcatgaatgagcaagaagaagactttgaacttgctcctattgacaccgaaattgaacgcactttcagacaaggaacaaaaggctaaaaaatgttgtaatatggtcgataggtttgaagttggggggtgctcataatggtgccaatcctattgctttggccgatgataaagaccgagcaataagagagtatgcagcccctatgttcaacgagcttaatccgggtattgtgagacccgaaatccaagcacctcactttgagttcaagcccgtcatgtatcaaatgctccaaacggttggtcaatttagtggatttccaacgaaagttcctcacctccatagttgctcttttttggaggtgagtgactctttcaagctacaaggagtaagcgaagaggctttaaggttgaagttgttcccattttccttaagggaacgagctagagcatggctcaatacccttcccccttattcagtgactacttggaatgacttggctgaaaaattcttgagaaagtattttcctccaagaagaaatgcaaagttttgaagtgagatcatgtcctttcaacaattggaagatgaaaccactagtgaagcatgagaaagattcaaggagttgttgaggaagtgcccacaccatggtattcctcattgtatccaactagagacattttacaatggtctcaatgcagcctctaggatggtgttggacgcttcagctaatggagccattctttccaagtcttacaatgaagctgttgatatcttggaaaggatagctagcaacaactatcaatggtcaactaatggagtcatttcatacaagaggttgtggagaaagaagctgtgaagattgccaaggttccaactaaagacaatacttctgatatgataaccaaggtagtgccaagtagtaagtttgagcattgcctgaagatgattggagtcagctgagctcgaaggtgctaaggagacatcagcatttaaaacaattatttatcaagcgacttcaacttgaaactaaggtggagatttgttagttatggttacaagttttgtcatccataatagaagttgttaatccagaaaatagataccggaagcttagtgtggatccgaaaagccctgtgcggaaggtcttgtagaatttggaaggtacttccatataagcttgtaccgcgtatagaatgtctctcccgaatagcttgttattaatctggaggtacactcccgaatagcttattgtttgtattgaaggtccatccgagaaggaagtcttgtacgtatctagaaggcttgtgtatttacaaagcttctgaattgtccgtattgaaagcgtgttttcaagatgatgtggattattgttgttggagatgagatggattatttaaggaagtgtaaatgtaccatgatgatttaggagataattttggcaataatgcaaatctataaataactataaatctttgtaacctgtgagaattagactagattttcttgagtgaaaatcgtgatagtgtaaggttgagagagagagagagtctaaactagaaagataaaaattttctcgtaatctatgagaagtttgtaaagattcttgtaaccttgtaaacattgatatcaataaagatatggttgttgtagtttcgattaagatatagagcattacatatggctcaaactcgttaaacctggtgttattcctttttgttttactacttaattaattacttgaagaaagagatctcttggtatattgtttcttgattgtgttgcgtatttgttgctactgtaaactaaatcgtaagccattgattgttttcgttttgcagaacaaaatcctaaatagccaagtttttaaataccattttttatagtacaaaataattaagtgggggctcgaccatcatggttttaaggtccgtgttgatcatcgatggcagggacggagctttgtcgggttggacatcgacgccgtactagggaatcagaagggtagagacagtgcgagaaaagagagatattagggatctttttattttatattttttagttattttaatgataaaaattgatttttatttgttattttttttttataatttttaatttcaattttagttttatattgaattttttaaataataaataaaaattaaatgatgtggaccaattagtaactgtcacgtatatatctatgtgatagttaacgtcaaagtacctacgactggcaacaaattgtaaagttatgtattttagctggaaaaaaaaaactttagtatttaagtgttacaaaatgtaaaatttcagggtgcgtttggaaagccacaatgtaattagatttgtgtgtaattagaggtaattacataatttggcatgtttgtctgaacatgtaattacaatgtaactatgt

SEQ ID NO: 20775 - DNA, 1558 bp, Cannabis sativa
  modified_base (63)..(64): a, c, t, g, unknown or other
aaaatgcagggttcattttgtcatttaacaaaatacagagtccaatcagtaacttttacaaannacagggtccaaaatagtatttatttttttttttaagaaatgaaatttgagaaacctctatataatttgattgttgaatagtaagattgattctatataatctcttttagttataaaatattatataaaatgatcttttaaataaatttgttttcctctccatcgtatgtggttgtgtaataatatttatcaagttctgaatatttaagggtcaaaaacttacaataaaactccactcgacactttattttaaatgtcatcattttacaaaagtttattaaaataaaatcattatatttttataaattaaatttaatcaaacactaaaatatagcatttattcaattactaaaactaaaaagaatccattatcactaattactcttataaatacacataattagttttcaattttttagtgtttgatacactttcatttttttaattagttacttttgcacaataacatttttatctttttccaaaataacaatccaaccttccaaattttctttggcaccatatatggaataataagccatttaattagacataaaaaaaaaaatcaagagaatcagtatccaaattgacattaatattaaaaatctattttcaccaattaaactctctaaaattacatattatgtgtaactcaataagtagtagtatcttgtagtagggatttatatattggatttccttttcatacttaaatactactatacacaataatattccaatatatccatatgtctgccctataaatatacatatataactatgtcccccctcttaaagtatatatatcaactcaagagctagctatataataattatatattatatatggaaatgatgatgaggatggtgatgaatgaaggtggagatgatgatcatggtgagaaaagatttggtcttttgttagctgcaagagactctgagtatgtgaaaaaaatgtatggaggttacttgaatgtgtttgtggaagcttttggagaagaaggagagagatgggacttgtttagggttgttgaaggagaatttcctgagttggaagatttgcctaaatatgatggctttgtggtcagtggtagtccctatgatgcttatggtaatcagccttggattcttaagctttgctttctcttgcagattttggactccatggccaagaaagttcttggtatttgctttggtcatcaggtatgtatatagatatgtatttatataattcattgttttgccaaaaagtaaaatgaaaagaaatatggatggttattattttaattagactaattaggatatttgtctactggaattttaatatatgtattaaatgatgtatcttgaacttttactaacgagtatctaacatggatggaaatttgatttgatacatgtcaaagttcggaaaacacaatttagtacatgaattttttttacgctaggcaccattagtagaattgaatggagttagatgaaaaaattgagagca

SEQ ID NO: 20776 - DNA, 6356 bp, Cannabis sativa
atatacttaattattagtttcaaagtcatatatattgtgttgtgctttggtggaattttatatttttaatttatcattttaatttttattgactttgactttgaaattaaaaaaaagtttggtcgggttaacctgaccaaatcgcccaaaccgttggtcggtttacagattttttttaaaaaaattaggcaggttgtacttaaattttagcaacccaaactttagatttggttagaaaatatataggataaaccgctcaaaccgaccgatgtacagcctcaataggtaagagaccaaattgctcaagaaaagggaggaaaagtgtagtatcactatattatgtttatggaccttttctcagttgagtggtgtttagaaggtatttttggacttattaaagctttaaaaataattttaaaacttgagtggatttacacctactttttacttttcacctaaaagacactaagaaaacataatctttatagcttttcgacaaatatttttttaagggggaaaagtattagtttaactaggggcaaatccatataaaagtaaaatgggtagttgttattgaaataatttaattagttaagacgtatatatttgtaataaaagatatttataaatatattattagttttggtataataattaagttagattacatatatgatagatattaagcgttcaaatcccactaataatatctttttgaagtttatttttactccttaccttacaaaaaattatattgttactcactttaaattctgagtccgctattgagtttaaccaatcaaaagaatgttacttatctcaaaagaatgatatttccttctattatccatgacatgattagttttattaactctaatattaattagaagcatttcaagctcaatacactaaggaaaaaagagcatactccattatggttaggaataataatcgtttggaactaaggttgcaattagttgcaaaataaaaatgaaatgagaatggtgatgattatggtgatggtaataataatataaatgaaatgaaatttttagtaaaaattacgaaattaataattgaataagaattgttatgtttagtatagtactacggaaagaaatagagtttctattattttaatcgaattgtccattatttttttaaaataattttattttatcgaattatcattattatataaattaacaaaaataataattaaattgtattttattagatctaattatttaaaaacaaaacaataaaattatatataagtagctaattatttattttacatttaatatttattataacataaatattattcatatatatatgtttcaaaataaaatagttacacatattattataactctaatcaatatatataggaccggtccaagtaatttgggggtctcggacaaaaagtaaaattggacattttattttaaaaaaaattatcaaccaatactttatagattcaattttgaagaaaaaaatacttcataaattctaaaataagcaaaaaatttaaaatcatatgtattggaatcatcatgttttattatttttttggaagtacatatttgctcttatgaatatttattatgtatactatatatcatcaaaaaaaatatttattatattatacataaatggatgataaaaaaataagatcttttaatgtaggaggtcttgcacaatgatccaatctgccatatgtttggatcggccctgcatatatatatttccataaaaaatcaatacatatatctgtgttttccataaaaatcaatacatatttttctttagatacaggaaaggtcatatcatctcaacaccattttggagaccttacttagagacttgtgcgtcactgtctcagcctaaatggagctcctcacctcctcatggcgtctcacaccaaggaggcatctctttggtacctccttaccttggaccaaaaaggaaagtctcctcaccactctccttggtacattctcaccctgaaccaaaaaggaaagtctcctcactactttccttggtacctcctcacctcggatgaaggaggcggatcctcacgccttcatcatctcaaaccaaaggggggtcctcacctcctcatgtcatcttggcccaaagggggcctcacacttccatcatcttagcccaaaggaggtctcacgcctccatcatctcggaccaaaaggggcatcacgctcccgtcaccttggcttaatagaggggcctcgcctcggtacgtgtctctcacgactcaccaacatgacttggaagacacttcaactttatattttttaaatacttattttgaaatatgattttgtattttaaacataacccgaccatggttacgagaaggtgctcccgtggttaagagattttgaatcttaaatgaaaacctatataagggaagtgacgtcacttgtaaagggaccttgaatttgatattcataaaatcatactcataagctcccattctctcattttaaaatatcacttgaggattgaactcttagagaacataactctggtgaactctcatcaagcattgagatcaataacactctaagtaggctagcctattatcgccgaaagaagacaaaccattataaaattatcgtgttcatctttgtcgaatttatttttgacaaaccgatttattttgattaattaaagcttgtgttcatcttgttcatttacgatcttcttagatctattgatgaaaaattatgtcaacaatatatatacatatatgaaagaaaggaaaataaggtacaataatttttaatttgtatgaatgagttttctaacttattttatttaggaaaagcaattctttagtttacataaattacaatttctattggaatgaattttccaatcacaataaagaaatcaaacacttgaattactctcctttaggaataataattacattcctactcacattcatgtgaaccaaacactacctaaaagatgggcaaaggcatgcatacatatagctatgtctaatttaaacttgctgataatcggacacactaatagtggtgtgggggctacaaccccgttaaaaaagttacattttaaaaaattaaatatcttatttttagttaaataattatgaataaataatattttagatcttgtattttgtaaaaattattgattgaacattctattttgtaaaatacaaattagatcttgtattttttcaaaataatactaaatagtatcctaaattaattttttgtcaaaataaaacttattaatattacaaaactagttgtgttttctacatttgttcgtgctagaaattatcatcaagttggttatattaaaaaatttatctaaaattgagctcatactcttatttgtaacattttagaaaatatatggtcaattttttatttaacaaaacagatagtccagtcgataacttttacaaaacatacgatccaaaatggtattaaccaaataattatacaataaaatagtgaaaaggtccgtacaaaattattacaatttttatctaaagtaaatataaacatttttataacaattgagtccccacatataaaaaatgttgggttcgtcactcctggtaatggacaggttttaccataaggtattaagaccatctccaatacaaaattaaaatttgtgttaaatttagcacaaaaaatgagtttgtgctatatttgacctactatttataattatgttccaatacacaaaatgtaaaataggtaaaaaaaaagttcattattggtaatgatggtcattgatattttattgagaatataaagaaaatgtataatttttatattttgaataatggtaatatggtaaataaaaaatgtaaaatgttgtaaaaattaataaatcataataattagtgatattatagtaaataaaaaagttatatttattgtgtaccaattttagtataatagtatatcttgtgctaaattttatactacttttaacatataccacatttaacacatttttttagaatgaaatagtgtttttcttaaatttgctaaaatataacaatataatattttttttaacacttcattgctctaagatctttctaaaccatgtaaattattaataaaaatgaatatatcatttttttctctaagattactagctgtagcttgcagtaactattggttcttttattgtaagttttaattgactcatttattttcaagatgagaaattgatagctatattaatagaagtatttaatatttatattttaaaatgtttattgaaatgtataattttactaaaatttctcgattatataattttgcgatttataatatagctaaatgtgtatttgttaaacctatctggtatgattaaaggtgtcatcaatataaaaaaaaaaaattatgtaatgaccataaaatttaattatctttatttatgaaacacttattttcaaaaaaaaaaaaaaactgacctatttatttaagaatttttacaaaaatactagattttgggcaaaaatttataatttattgtcatacggaattttttacaaaaatactgtttttttattaaacaacaaaacagaacaattataacaacaatggaacaactaaaaaaaactgtggaataacattaaaaacttaacacaatacacagtataaaacttacacaacatttttgaaaaaaaatttgtcccatagtaaaaagtaaaaaatttaaaactttcaggtgtaaaaatctatttatttattctaaatgagagagtccattccattctacattccaaattgatataatcccaacccaaaccagattactatcatactatgcataccaaatctaagttagaaatatatataacattttctctatacaaactagagtcttcaaacatggagtagcaagagaaaagtcattccccatacttaccacagcctatactatctacattattagcatctatattttagttagaaatgtctctcaaacatagcctatactttataatttctttcatctatatccattagaaggccccctctatagtataaagcattttattctctttaatactacacatgaaatgttatatcatagtattgagctatcatcacctctcatattagtattagatacatattttaatttaataattattgttaattattttttaaatatcactttgtgataaatgtaaattggggtattaccaatattcaataataatgctatttggcttgatgcttatccttgattttatgttctcatgtaaaaattgattttttactttaatgaaatctttctttcaaataaataaacaaagttcttgctcaagtaatgctagttaggatggggagtgacatttggacttggagacaagaagtggtttctactctactcttcaaactacataattaaaattttatattttttattttatttcaaaattttagactagaccatacattaattttttttttaaatacatcacaaaaattctacatttctttttcctaaattttaatatattttatttattttaaataaataatattaatatttacacacatcattttttttttattttgattaaccatataaaaaaaattaaaatctcaaacaattaagaaaatacgtttagagtaataaatagtattttataaatatagagcatgaataatgaatttttttaaaaaaaaattaaaatatagaagaattatctttaagaaaaatagaaagagaatttagagcatttgatatagtatatttatagtttaataattctttcaatattttaaaaaatctctaatttaaaagatgtgatgtgagtgttcttagataggtagtagtgaaaaatgtgtcctaacaaattgtgtatggagggtgatgggtgtcttcttatgagagttcaattgaagactaaacatgtgaatgtttctttgttgtgtccagtttgttatggggcgggtgaattgttagcgaatagcgggtttgtctataattcaagttgatgcaggatcatttggggaccggtttcttcacctgttctcacaattggaatttgggcgaggaacaaagtgttcatgtgaaggggcgaacctacatagaagcgaggggggcagtcgtctccttgaaaaaaattggaaaaaaatgtatatacattttagttagttatgacatatatttataataaaagatgatgtttataaacataatattagttttggtgtaatggttaagttagattgcaactatgataaagatcaatggttctaataatctcattaagagcatttttgtttctttttaattttacttttgccctt

SEQ ID NO: 20777 - DNA, 1698 bp, Cannabis sativa
tgattccttctccctcaaatagtcgtcaaattaatcgtcttcttccttccctaattatttaattattcaattaattattaatctccttacactctcgatcagtccgtacaattaataatatatatatattactaattaataaatcgtaaatatatatttacctaagcttttcattatttttgtattatcttttatctttatataattatttaacacgtatgacgtatatatatctctttgccacgcctaatataaaaaaatatatattaaattaattttactttgatctccaattaatacttttatttatctaacaataattaatgatatataataatgatacatatatatatgcaccattcatgtagctagcaattgtccaaaggataagctcccaaaattttactttcaacattatatatataagctatttattccattaattaattaattgcatatgtagttagcaaataacaattttgatcataatacacattgataggaaaaattgaagattttagtactttaatactacccatatttattacacattattttgtgtaattgtaagtatatatgtgcaatttgaatgtgtatctagtgttacacttattttaattacatatagtttgtcacttattcaccatatttagtactgctgtctcacaccttatagaccattttcaagtgtaaaaaatgttaaatttggtattaaaaagagtgaatgttatatttagcacaccttttgaatgtactaattccattacacatgcaatagtaaattaaacataaaaaataattattaatgataattaataaataaaatgtatttttaaaaaaatgacgatattgtaattaaaaaatatatgttaattaaagtcacttattaatgctaaaagttaatattgtaaataaaaatgttcattattaattgatgttgttatattttctattaaatttggtctagtatgtgttaaattttttgtacaagttttaacataatattgatgaagtattttttacagaaacatcaaactatagtatatattattacaccattcatattttggcactccacgtgaggtctcttgtaatgtgtttcaaatataccatataagtagttcatgatttttattttaatattatttgtaattaataaaaattaaaatgtatagaatttgaatattaaattaaaaaattacatattagtaacaaagtatatataactagataaatgttttttttttttttttacaaggataactagataaatgttggagacctatcattataactatgattaattatgttttatttataatatttgggttgaatgaatgatagaagaagaaggttgttaattaatttgactgccgtagagtactgagtcagagtcaaggcaaccatgcgcccccgcttgcagccaataatgacaccttcttattttgtttgtttcacaatataatttatttttattatatatagctgcccatgtgattctatatttacaaatacaacaacaattaataaacaaatgatttactcctccattgtactctttggaaataatattaacattttcatatttcaatgtatttatttatttatttttatgaatagttaagatatatagtattgccacaaattaaactactttacatcctaatagcaccgccccatcgttctgagatctaattc

SEQ ID NO: 20778 - DNA, 1334 bp, Cannabis sativa
gtattgttgtctcactatgttcagtccatatttataatgttcagtggaaaagggttaaaagatttgagagtgatgaaataaccaaaatagacaaaatgttgttcaaatagttagttagtgagtgaccttttccaaattttggacaaataattgatcaactttaaattgctaacccatatgtgcacctaggaaaacatacaaaaatgagagcaaaacaaggaaaaaggaaaagaaaaagacacttatgttacatgccaatggtaaaactaaaacatatataaaaatatatttatataataagtatatgcaatagtattgtttaaagcattaatgggtcatggggtgaccattgctgaaaatgatataacaaaacattacaacatttgaaatgtgttacatcatgtcctcccttatatgtcttttgctttcaatttgatatgatgtgactgagagtaacatattgccaaccatcatttatttattcaatatctttatttaacatcataattagcaaacctaaacctaattataagagttagctatgctatcatatagttgaaaagaaaaaaaaaaaaaccacaaatataaataatggatggctaggaaaagattatgttgtttctttgttttgtgtcgtgtactacagaaaacaaaataatctattggttattcttaatcttcatagttgacgcattaattattctttgctttctttccaattaacaattaataaagaaacaccatatatgttataatgaacaaatacttttttaatgtttgttaatactactctatgatttattttttttcttaaaagaaaaaatgatactaaaaattacaaccaagatgaagaaagatttttcaatttcttattaataatgcttttttgaaatcaaagaaaatatatagttattatgaatttatataaatgttaatttaggctcataaaataattataaaattggtaaaattgaggtggaagactgaagaacatatgatttggaacatggtcaactgtgaaataaagaaatggaaaaaaatgttgtgatatttgtatagtgctttgaaatttaaaataaaacattcagacttgttgaattattggtttctccaatcaaattcagtgcactctcattgttttttgtcctgccttcacttcattaatgcaacttttatatttatgtttcagatttattatctcttttctttttcatgataaatttcatgcaagtacacaacgatttagtagataaatacttattatgtcgtttacgaagagcatttaaaaacgacagtttttcaaattcgagtaaggagctatcgtttttcatgtg

SEQ ID NO: 20779 - DNA, 2804 bp, Cannabis sativa
aaaattacagcaaatgcagagaaagtagatgaaggacttccagggactcgttgacaatcagtcttgatgagaaaatagtcttctcctttcctagattgagcagcattcccacatctcacagttggtttttccatcttctcagtcttcatttctctgctaatcagtgcagcaagaggtacaagagtatgatggttccttctcccttcaccagatgccatcactctctttttttttaaaaccttcaaactatacactgctttgtctcaaaagcatactaaaatttaccccaaataccaaaaatatgaaaagatcaaaactttatgtgtacataacacaaaatttgatctgcatttcaccattgaaaacaacatcaagcttagatcccaaaattctcagacaaaataaagtagaattaattaaaattaaacaactgcatgttctgttcttgcttggaaaaatgtgaaatatttcaaagatttcttttttttttttttaagcccaaaacccaaaaacaaaatcaaacaaaagatccaacataccataaatattccaacatttcccaagtacccagaaaccaagcaaaccttttcattaatgttttcaaggagaaagaacacaaaaataaagaatagttccaaaggacaaggagagcaataatgagatgtttaccagggaagaatgaatgtctgaatgtactccaagcaaagccaaattgagatctggtatgaaaatggaagcaagcccaacacaaaatgaagaaaaggaaaatcaacacggaaatgtaaagcgtgtttatgacaagatatgaactgtaaaacccattaatctaagaaaacccaaatcttcaaaaacataaaaatatattcttttttatgtataaaagggaaattcattgaatagttttatgggagttagtcagcttcagaacattttcctttccaccaaacacccacaaaatgttaataataataataaaataattataataataaagcaagaaagtttgaatttttaatagaaaaaaaatatgaaggtcgggaaattcggtgccaaaaggaaatagagttatgaattttgaagaggaacgcaaaggaaatctgccacagaagaagaaaaaacaatgggttttgccgactataaaggaatgcctctataaaaccattttgcttcagttaaaaagtcagtttctttctcataacaatttcttttttaaaaataaaacaaaaaacaaaacctttttttttcttttcttctttcttttttggctgggaaaaattgaaaattgaaagagaataaaagaactagttgcttttttttattactattattattcaagggctattttttagagataaatttttgacttttgagtgttttatatttgaatgggtgtttccatatccaatagttaatggataaaattatgttaaatttttagaaattttatagtatattttaaataattacaatttacattattatataataaatacaagattaaaattattttttttacattatcattatcatttttttagggttgtaatttattgacataatgccgaaaaattttcttgtttattcatagatttatcgattcctttttaaaagagatgattaaattaattatgttaatttttcggagagcttgatttcgtcgtaacaaaaaagtctttaataatgttgagttgactcttgagctcattgttaattaggctcgtgactaccttgggacttttcacaacaaacaacaagtgatgactggtttcccttcctaggcaagagtggatgtgcctcacggaagcttggtggtgatgccgagttcacttctgccaatctccgaaggggctcctctccttcctgattttttcaaagtgaatacagacgctgcaattaattcgacgagcaagtgttgtggtttgggtatggtgattcgtaattatttgagagtggctaatgtttcgacaagttggcacttagaaggttgttttgttcttgaagtcgttgaagttttggttatctgaaatgccttatttcaatgcctcttctttagatatgacaacattatttttgagtctttttttttgagtgtagcgtaatggtatcttacaatcatttaatagcttaatagcttcaaggtcctaggttcgaacctttgacctctccctttttctcatccctccctcaccactaagctaaccttagtggcttacattatttttgagtctaattatttgaatgttgtgcttaaaattaaaaaaaaaaattcaattattacttcgagtcttattttagatgatatcattgatttttgtaataggttttaagttgctagttttatctatgataatagatcttataataatattgctcatatattggtcaaacttattttatcggcacgtagtagtattatttagtggttaaataattctaattatattccgaatttattgatagctagtgtattttttgataaattaaaaaattaacaataataataataattaatctttttgataaaataataataataatgaaacactagattgtagattccattgtttggattgctttttctctttgtggtttattctctttatatgtgccagctggatgattgcttacgtggcaaatattgagtagctgagattgcatgcatttgacgcttaaaactgtagtttaatttaatttagaagcagtaataaaaataatattaagatttaattaattacattagtcaaagactttgacacatccaataatttttgttctgatttctctctcatcaactacttccaaaa

SEQ ID NO: 20780 - DNA, 1696 bp, Cannabis sativa
tgtcttgtccctaaagtggaacatcctgccttgatcgaacaatttcgacctaagtctttgcaactttcactacaaggtagtggcaaagattaactccaataagttgcggccttttatggatgacctgatatcccctatccaatatgctttcattccaggaagatagatagaaaaatcctccattcttacacaagaagttgtacacaaaattaaacaggagaaaggggtagggggccttatggcgatcaagttagatatgcacaaagcttatgataagatggagtggggctttattgctagtgtactggtgcaaaatggttttgatgaaaaggcttgtaagctcattatgaactgtgtgaagaatgtctcttattcagtcttgttcaatggaagtcctcttaaaaaattcatgcctaatcgaggtcttcgtcagggggattccctatctccgttcttattccttctttgccaagaagttctatcaaagttgattttcaaagctgaaaggtagggtgagattcatggtataaagatctcaagagatgcctcgaccatttctcatctcatgtttgcagatgatactattttgtttgcttgagcaaatgtgggaaatgcaaaagaaattctgaattgtttgactctatgcaaatcctagtcaggtcaagtttgtagcaaagctaaatcaagtattcttttctccaataacctgaatttgcctaagaagaaagaattgctagttgctttggaaatttctcaggtttgtggaaatgaaaggcatttggggaacccttttattttcaaacgcaggaagaaggaagagtaccatgccctaaaattgagtatgcaaaaacatcttgaaggttggaggatgaaattattgtcgtatgcaggaagcctaactctgattagctctgttgctgcatccatgcatgtgtacaatatgtctaccaacaaagtcccagtatcaacttgtcgagagctagatgcaatcattagaagattctggtggatatgcagtgttgaaaaggataagtatatggctctcaaggcttaggacaaaatctgtcaaccaaaattgcttggtgggctcggtctaagacgatttgaggatatgaatagagtattggtgtcgaaattggcttggagtttggctcaaaaagtggacaagtcatgggttacttgtcttttaagcaaaaactgtggcaaagagagtttttggtcagtcaactcaaagaatagggactctttcctatggaggagtattctggaagtttgaaacattgctgtaaagggttcggtcactttggctgctgagaggaaatacattgatttttgggcacaactgttgtgaaaattatgtacgcaagtatacgcagtcaaacaagtaataaaatgataagtaagattgtctccacagggattgcaaacaaaattggatgtaaaaccaactaattacaactaaaagtaagaggaaataacatgaaaatggttgagcaatgattcaaaattaaaaataacagtaattaaacttgctaaaattaatactactattgctggaaaaattgcttgcgagaaataaaaatgtaatatggtaaaaggagcttgaattgctaattccttctagtcaggttttttcccaggtgttacagcattggttcagcattactccagtattttgcacagagataacataaat

SEQ ID NO: 20781 - DNA, 2238 bp, Cannabis sativa
tctgcaagatcaaaaaataagaatagcatttacgaaacctaaacaaacaaaaatttagcgactgagaaagatataataaattgatcaaaaatcttacatttaaaacacgagagattccttgagtcttgagaagctcggaacgagaagcgttatcatagctacccagataaagaaagtccggcaagatctcggatggaaaagcgctaacttggatcgaggttttctcggaagagaccggaatccgatggccacagatcccacaaacctctccttcctcatatttgtgatagtgcccacaaaccccacaagggttctccctctccctcttcctcatagtagtttattttgttgaacaagtagggatttgaactcagacccagataaggaaaaggattcaaattcaaaaaccgagcaatacccagatcatgaaacaccaaaagaagcgtgtagatgtattttatatgtatatacagtaagagatacagcttcgataagagagagacaaaattaaaagttgggtttttttcgaagattgtgcttgaccaagtgcaataaaggaaagagaaagcgaaagagtgaaagaagcaccagagcgtgacgacgaagcttctgtctttcttctttgatgagattgagtgagctggaagaagagttaaattggatttagcttttgggtctcaaaacgttaacgaacgaagccaccagatcaaatcaaacacagagacagagagtacaaagagagagagagtcctctcttctatttttttttcctatttatgaataatatatgcatatatatatatatatataacgtggtggcgtggagcgagactcatgtcgatgggcatgtgtgatgtgtatacatgtgtataataatataataaatatggaattaataataggatattattatagtgaaaatgaagggaacaggcagatttcgttttctttttgatcgtcatgagtgaagtaaagagtggctcgagtctgtttggtgtttgggttctgcaaaacccattagtatctaatcgtgatgctctctctccctctccacaacccaaccacctggtcccatctgatctcatttctagcctccatttttactgccctacattcttttaccaatgttaaaaaaaaaacataaatttactgttttgctcgcatttataaatacatacaaagtcaatcattcacagtcatatcaaaaagaataaatagagtttttagttataaaagtatattttcttccattctattttgattgttttttaaaaaaaaaaaacaaaataataataataataataatttacttagggttattcatggattgttttagttgggatttttactttttttttaccaaattagtattaaggtttttaaaaaattcaaaatcaaattaactcacttaataagaatggatttgtttggttatttgtatttcgtaattattaaaaaaattatataattgttattatttttctttatacttttcaaaatttataatacataaataataaaaaaaaaatattatacataaagattgtttctaaatttcaataaaaaatctttgtttgacaatggtagagcaattcaaataagggttgctcattggagtggtattaacacatttacaatgcagtacaatttttaagaacaaatcaacaaatttatcaaaatatttgttacagtgtagcctaaatgaaactacagtcacatggctttttttagaggaaagttacctttttaaaagaaatattaatttaatgtttatataattactttcatgggttttcatttttaacatgaaatatcaacttcattaaaataaaacattcaaattacaaattggcattataatctgtcaggacattaacatcatgaatgatatgatcggaatagaaacaagagcgtctagccacaaagtgagcaactttgtttgctgatcgtttaacaaaacgaagactaacattaggtagagaggataaaagagttttacagtcatgagtaatcataccaaaaacagaagtcatttgttgatgactgaaaactgcttggacagtgagtaagctatcagtttcgacctctaccgcattccaacccttgtctttgagccagctaagtgcttccttaactcccacagcctcaacaacctctgcagagaaggacccatgggagtatttggccacaaaatcaatgacactaccttccgaatcacatgcaacaataccgtaccca

SEQ ID NO: 20782 - DNA, 3373 bp, Cannabis sativa
atcctttttgactgatgtgattccccacagagtagccgtcactagactttattgatcatagcctagtaggtgcagagtgggggttgtgccgtcaaactttaataaatatggtagttccaatatgcctcctcccatgcggcattaaatgcaagatgactgttcagatagaatctgacacctcccgaagaggctttattatagccttgctctccgggagcatgtgaggcttacatgccttctccgggaggcatgtctaagtgtaatcctgcgcttaaggagacttagctgatttattcaaacgctaaaccctttccatctacgtgtcatcctccggttggtccacgtattttgggcaaaatcaggggcaaaagtaacaaatggagttgtatcacttcctagctttagctggaatccatcaatagcaacatatctatccaatattttgatatttgaagaagcttctagatcacttacttctagttcagtgttctacctcgtcgtaagccggcaagcagccacatgtacatcatctctcccaacatcctatttgtaggttattagctggtttctttcactattcaaagttaagtctccatcattgattgtatggtctaatgggaaaggaaggggctacaggattccccttataaacctccttgaattcttcaggagcagtaatcttgatcgagtcctcacaacggatgttcctctccttcaccttctactctcactttgcctttagtctagccaccaaagcttccactttggccttattcccatacttatcctactcagccgcagacctttggtcaatggtaattgtgtagcgtcatccttgctaagaccaataatatatcagttcccatgattgcaataggaattggaaggtcaggaagtgaaacctattgaatgggcacatctaaaaccataacattttgattgacaagggaatccattaaatttgttagagacaatgtctccatgttcctcaacctggagcttgaaggtctttccctttgtctcttggaaccgtccttcacaatctatgactgggaaatcacattgttcttgaatgcttccaaggtatccatgatgtaagtaagaggacgaatcacacaaaaaaacgatacagatcagtgatgtaaaaacaataaaacatgaatataaattagcaataatgaaaacggtcatagatccagagccaaccctcaaagttgaagctgaatccctctaagttttccaagttaaactataaaatatcctcacgacctatgaagctatcatactcaaagaatctggggtagtacattaaggtgaacagggctatcctaacattatgagatggcataatgaaatgggttgagctcgccactatctcatttacgctaagtaaatcctcctacaaggataccatgaatttttaaattcatgaaataggaattagacccatcttgtttgatatctgcaaatccatccagatagggagcatgaattaaattataaggtgtgttacctatcccagaagtattggcatctggggctccgtaatcaggaaagcttgtgtcaaactgcattttgagtttagtagccttgtcaagaatctctccattctcttgcagctctgccatctgacgtttatctttctcaacaacctttttctctttgtttgcaattatttaagaaatggcttcccgcacctcatcaggtttggaacttctttgctgtcactagttccccgacttttaattcctccatgggtatgtcccaatgcaccttttggcattcttctaagaatggagttggaccgaggcgagaaataaaacccattacacagagataaaagaggcaattttaagcgagaaactttcaaaactagaagatacaatcacgaaaagtagaaggccgacacttacctgttcgattgaaatcgagcaaaagagtagggtgcctcttcaaaagaaaactagaggtagtaaactagtattcccagatgtctggaggatgactccaggaacttgtgggacacctcacttttgactacttgagaatgtaaaagtcgtctttggagggctctttattacttgggtttaattcaaactcgtaaaagaagacaatctcctccaaatcaggctccaccatggcccactccttacaaaaaatataccatcctaccataagcctacaactctgcaggatcagctggaatggagcaagcctaataaccgtaaaaaaactgggtaaaatagtctttgagcgggagatacatgagctagccttttcaccttcaagaagagcctggtccagaacagacaagaggtactttgaagttcgcattccttttccagatcctgcagcattcagtaattctgaaacttattagtaatacggtccatctcctaaggagaatttatgcattcctctagtgttgggctgcctttctcttgctggttttgcttcgcatctccatcgttatgaaggtgctccaagtccttattttcttcggccatggtgagagatgaaaaagaaagaagccaaacagccagtacccaaacagatcaaacggtaagggtacacgagaactctccccgaaaactgcttagagaggttccactagaccttggatcttgaagtcagttccccaatgaacataactcccagataaaagatcgggaccacaagaaaaggaaaaggaaatacaagaatattgaagtttgtaaccataagggtcctagaccgagtgagcgggaagcaacagagccctcaggaacactgttagcatccacgagctcgagagtcggaaaaaaacaacaacaacaaaaggaatatccttttcctaaagcatgacaaggtctctattttcaaatttttcttaccatttccttagttctcaggcgagtgtaaaacttaagatcgccccacacgaaaaaaattacttagcgattcccagaaaacaatccacatcatggcagtaccctatatgatatactacctagagcataaatacacaagaaatgcagtattaaagtgaaatggaaaagcacttacgtgttacaatcgaggctgtcggtgtaagattatgggtcgaaactgagttcctcacctaaaaattgcacagcttcctaaaaattttgtcggcatcctcttggatgatcgaggaagctagtgttgttactgggggcaaatgggggtgtgcatatgaaaaatcttgatcagagatggagaagacgatcataaagcacagtggcaaaattgaacatttattgggaaatgtttcctgggtaagtttatctttgaaagtttgagtgaaaaatggcaaagaagataaagtgaatagtcgatttcctttgtatttataagggaatttgcgatcaac

SEQ ID NO: 20783 - DNA, 5255 bp, Cannabis sativa
agttggaatgtactatcctcccgagtggccagcgagatacttatgaagaataatattaaacactaataatacattttaacatttctataaattctaacataataaaaaaaatgagagagagaaagttaaatttggtgtgttaaaagtgaaaggtataaacaataagtgagcataagataggcataaataataggtgttattgttgttgtgtgtcattgttaatgatgaagaataatattttacaagttagttcaatccaggtaagcacgccctgacaccccattccatctaatatatcgtctctcgcctctctaactccaccattttctcccgataaatcacgtttcaaaccccatttttcacattcatctcgtctcaatttcttttttattttttaattaattaattaccagaacagacaccgattccttctccttcatcattctcattctctctctctgctctgctctgatatgctttattcttcttcttcttcttcttcttcaattgttatgtaatgattttgattttgtttgtctcaccattattgaatttttgaggaatttaaattatatatatatagaaaaaagtgaagaatttgggggcgaccagaagcagaagtagggttagggtttggtttgtgaaatacagtagaccaatccaattcaatcgagaaagctgatgctgtagaacaacatcaaatcaatggcaagcgagttggtgatgagcccccagttggagcagatccacggtgaaattcgcgataattttcgagccctttcgtatgtctttttcatccccttttttgttttattatgttgtttttatcatcattattattataattgttgatgttgttataaatttgaattcttttgctccaccacaactactattggtattacattagagaatggaatgggattgtagaagcattagctaaatacatatatagtaatacaatacaatgtaatgtaattggggagaaatgaagcacattacagttgtgcgtcttactagtcgtctctactacttttattgataattttgcgttgaaaagttgatctcagaagcggttttatgattgttgttagaaatttgaattcttttgcaccatcacaaattcacaaccacaactaactatataagtattacgttacagaatggaatgagattatactaacaaatattataccattaggcattaccattagctaaatacattattagtatatacactgctatgcaattcggggggaatggaacacattacagtagtgcgtcctactagttgtcaattctacttttattgacaatttttgtgttgtattttgatctcagaaatggatttcaaaagctggataaaattaaagattcaagtagacaaagtaagcagctcgaggagcttacaaccaagatgagggagtgcaaaaggttggtctttcaatttttctgcttttttacgtaaacatctttatcatttctcttcttatttctttcagactaattaaagagcttgaccgcgaaatcaaagatgaggagccccgaaatcctcctgaccttaataagcaactcaatgatgagaaacaatctatggtttttcactttttccttcagtctgtttatcgtaactgagcattccactttgacaagcatcctaactgatttcgtgatatattcatgtcttagctgttcaaacttatatgtatacacttcattgtgcagatcaaagagcttaactcatatgtggctttgaggaagacgtaagttcatttctatttgggctccatatcgtatcttccaaactcatatcctcttttgattccttgttctgaaatgtaaatttcatacttgtttggctggtctgcagttatttgaatagccttgggaacaagaaacttgaactctttgatatgggagcaggagttagtggtgaacctacagctgaggataatgttcaaatggcatcaagtaagaatttatgtgtatctacagtttattacagtatgttatgaagtgcaaagagggaaagaaagagctctagtatgtttagttgtgtcttgaacaaaagctgtgactatatatattctaatgttctgttaccatgcattgatagaatttgacttgctgataaaaaatgtgtaaatttaatgggatatgtgttactataaatatggtcagcctcatagcttcaaggttttgaaatgtggaattggaaaccgaggtgcattcccttaacacctgaggcgtaagcctcagcaataagaagaaaatctgcgtaaaatatcatagaactcatgaacttataacaaacgacacataattctgtaataaagtcttaaaattcatgaaattactagttataagtcttgaaatataaactaactacattcaaggttcaaaccaaaaatcctaattaatggaggtatggtagatttaaagggaggggctgagaaagatagcgtgatgaggagagggggagaaggtgcttctgtgagggagatgagctgttttggggcctttttaaatgacttctataggcttttctttgggcttctttaaccagatttataagttatgaaagagctcaaataaaaccctaagatcacttttttcttctccttcaactcttaacaccagtcctttactccctcaagtagcagcagtcctcagctcagtcctctctcaatctcctcagtcctcactcacggaagcagcccctcctatcctctctaatgtgggccttacaaaatagcaatgagctgcgtaaatcagaggcgtgttctcagtagcacctcagtagtgtgaggcataagcctcaagaggtgtttttttactgccttgcctcaagatgggccatgaggcatacaggcatacgatgcacacatatgcattgatagaatttaactttttgaataacaaatgtctgtaaaatttgatgagacatgggttactgtgtaattctacgtacgtgctcttattggcgtgcatgatttttgatcttatatcaatgttctacctcatagctatgtcaaatcaagaactagtcaatgctgggatgaaaacaatggatgagaccgatcaggccattgaacgcacgaaaaaggtacttttgtagcagcaatttgaagccgggtgtttttggttgttattacctgcaatgtattcttaaatctttgaattttaccattaggttgtggaacaaacaattgaagtgggaactcagactgctactacattaaaaggccaagtacgattgcttcaacttgtcttcataataattgattttttcatggtttagccttgtaaacatttttttatctgaatggtttagccttataaacattagttttaactattgcagacagatcaaatgggtcgcattgttaatgagttggacacaattcagttctcaatcaagaaggcctcccagcttgtgaaggagattggtagacaggttagtctttgctctatatgtaatttatgtgtctcgtttttcaaactaaatttgttgacttattatctttttcaattggttttcagattgcaacagataaatgcatcatgctttttctgttccttattgtcgtaggtgttatagcaatcattgtggtgaaggtatatactgaatttattagttttataaagcttttcatttttatattagaattatagagccctttctaagatgcactttcagaagtttttggaaagaagagtctttattagagcttttaaaggttatagaaacaattaagtgtcgtttggtaagaagagttccaaatttattttcttaatgaggatattaaggaggagaatatgattgtgcttttgcaatgacatgtttttttaattgatgtttcttctctactctcattaatcatgttatatcaatatccagattgtgaatccaagtaacaaagacattagggacatccctggattggcaccacctgccccaagtcggaagctattatatctgaggaccgcagattatttggaataagattgtgttatatcacaagatttatttcgtccatccatcccattactatggcggatggaaaggaagctgctcaaaagggatgttatttgcgagcatcactcggttcttttttcatttattttcaatagctgaatccattcttgcttgagttgtgcatatcctgtgttgtgattctgtgtaaatcacatgcgagttcttctagctttgttttgatttcgatgatatgattcgtttcattctgtaattttttcaaagattgtttagtaagttgccggagatgatgatggtggtgttccccgtttcttttctcgcctgtgaatccacgctgtacatgtcccacgaaaggagattgattgtatgatctttgagaatatgtatgtatgctaacactttttttattctctttctataaatcttttacgtgggatggttggattttggagcagcattctttaaattggatgtagattttggttcaagtcatgtcattattattattatatggattatggctcttactatggggctattttctccgtgattgattcatttcactctgaacaatgaaaaatgtatgagtctgacttttgagctcttaactctcttccatttttgtcttcatgccaaaaatgactgggggcctattttttctcgtgattgacttcagaatttgagattagagttttctttgtacaagtacaaatagtaccacattgtcctgttatgtagacttatagtagatgacaagaagaggaagtaatgtttaatgaaaactacctcaaaagcttaactaataagaacaagtgttttagattaccaaaatacagaaacactttggctatattatgtacagacgaagctactatatatttttgtcttccttctatttctgtttttggttgtgtgaatggtggacaaaacaaaagaaagaataagtttttttgttgagaaataagggatcatgtggtgcagattctgttcccatccctttggcctatggcagttctggcgaccacgtattagctataagagtcttatacttcatcctgctttacttgagtcatcggtacttaaaccttagtttctatcctaaatatagtctaccacaacgccagttttcaaggggtaaacataattcctcacaattgcttggtgacaatcgaattcttgacccaagcaagagaggaggccagtaaaggcttccctaccactacaccacacgtgatttgtactattttttttttttttt

SEQ ID NO: 20784 - DNA, 2830 bp, Cannabis sativa
atcttaggcatcaaatttaacatactctaaacataacaaagctcgagggagactatgccataaatttcaatcaacccttaatctttaaaatcacaaaaacaagtaattaaattgaaaagaagaagaaaaaaataaaataggaaagaaagaaaattcaaaattgtagaaaaggaaaacctaaccttggtctttgacatactcaacaagagaattgcactcagaacacaaagcaaggcctgtgaaatccagatcttcacattctctagtagtcaattgctctttccctgttgtgtccattaaatacgcatacccattgctcgaatttaacacccccatatttctgtctccttcgctctaaactctccttctctctttgatggtcaaggcaaggagtagagaaggaatatttataaaaggtcatgcctgccagttcctaaagtgaactcggcgagagtcgttggcagtgcagctccggcgccgttacactcgaccatgccataaccacagtcctcggtgagacaggacccgaacaacccgtcggagccaggaaagattgagaggtgtcctttggtagctcgaatcctgttctgtggagtcttggaaattatacgaactcaactttctaaacaatatagctccaatactcctgagtaactttttgggatggaaaaagataaaatatgggatttgataaattaattacaaaattatgggcatattaaatagccataaaaaatttaaatgtgaaaaaatatcatagaagggtggtaaatctataaacttttttataaaatcctgtaattttctctatacatatatctatatatgtattttggtgagattatcgtttatcttttgatatttatacttttcaatgttggttgtttattatttgaaccagaaatgtcaacttatatataagaaatcgaacaaaaacgatagagaaattaaataaaattgaagctgagtttactcaaatgaagttaacagaacaatatggtacccttacaaaacttaagatacactcgtacactaagggcagaacagaaacaactaaaacaataaagatagcacattcaaataaatcttatatcagttttttgttgtatgtatttattgacatgaatgacatgagcgaactaaatgaaatctgtactaaaatttcatgttgagtagcttatatagtggctgatgatgagttggtggagggttctcaccaatggaagaagaaatcaaatttcttgaggaagatgccacacttggtacagcaaccagagccaattttttcttttgtctatcttctctccattttcttaattgatcctcaattgctgctttagctttctcagccatttcagctcgaaaattggcttgttctcctcggtttcggaattcagcaactttagccaatgcagcatccaactccttcctcaaagtttccagctcatgcttgttatcagaagttggcgcccaaatttgatcatcaccctttttgaccaaggactcgtattccttgagtgaagccgttatgtgaccatcattgcaatctcttctctctttctgaagctcagttttcattagtgctatctcaatttgagcttctgtttctttcctcttcatttcattaatctcagttttcgcctttagtatatcataagtaagtatttcaacatcatccatcaactggctcaccaactcatttgcacttcttaactccatttttacttgattcacttccattttgaatgcctcaatcaaagcttcttgactcaagctctttctttcccatacttccaactcttctctaattagcttcagcttcaattccgaatcggtatcagcagctaattttttggacaagaatgttagctcttcatttgcttctacaagtttcaactcaagaacattgcccaatatcattttgaaaacaaactcaccttccatctcctccatcatttcaacatctctttccacatcttctagcttctcttttgtttcatccaaagcaattttagccaactcaatttccatatctttctcagaagccattgcaatcttctctttctgagcctcacactcagaagcctttagcataaagttagcctcattcagctcagaaatttttctcaaaagctctagacacttttctctttcctctgctaaagctttttccatcacttctacttgtgtcaaagccttcacctctgcctccctggctgaatcaaactgtgcctccttacaaataagctctgcttgagtggcctttaactcgttcgaaagctgctcacagatatttgtagcttctgacaactgaaccgccatctctttcgcctctgattcaaacttttcgattctagcactggtgttcttgtactcattcacatatatttccctttctatgtcagagttctcaatcaaaatggaaagttcatcaactttttccttagtgtgttctagcttatgaagggtttgcatatatgcagcctccttagcttctagttgaactttacaatttgccaactcttttaacacacattcaagctctctatttctctcacattcctaccaatgaaaaaagagtgaaatcacataaactatatagctaattttcctttgtttattgtaaatctacatataaaactacaagattaatcagaatataatgggaaaggttatgatagtagtcaatggaaattgcatgtgactacaatcacttgaaataaaacatgaaagcaaatgaacatagattcttataattaaaaagttggtaatgaagaaacgatcttacattgttgccagtgagcccgttattctgatggtcacatttctc

SEQ ID NO: 20785 - DNA, 5524 bp, Cannabis sativa
  modified_base (5485)..(5489): a, c, t, g, unknown or other
aaattattaattaattaaagagagctaaatatgttgttagggaaaggaataggggttgtggactcattcacaggtggtctgattggtggtaataataaaggaaaaaagataaaagggtcagtggttttggtgaagaagaatgtgttggagtttaacccattggcatcttctgttaacacaggcactgccatttttgatcgttttggtgaatttttgggcagtggtgtttctctccagctcgttagtggtcacacttgtatgtacaataatacatatacatttacattctatatatgtatatatagattagttatggtgttaaaaataatattttaacagtcagttaattacatatatttatgcaagtcaattaactatttagaatactatttttgaggtagtaaacaatatcaaatttaaaaaaaaaatagtaggatatatgatataattataatatatataattatatatataaaaaaattagattacaaaatttattcatatatatcaaaaatatggtatgttgttattgatttattttagtattagtttttatatttaaatttaataaataatagaaaaagttgtaaatataaggtgacaactaccaaatagcttctatgtatgaatgagtattgttataggatatttaaagtgtctaatcttataattagagatattttataaaatttattaaactaaaaacaagtgagattcgatgataatgagttatactaataacattttataagggtgctaggcattatgactaccttttattattaggtattagtgaatagggatgtccatcactttttataggtgttgctttacgattagttagcgatattctttaaaagttattttttaaagttacatgagacccgatatttaattatattaacagtgatatattaatgagaagagtactaggcaccaatagtacattttagtatttttttttaaaaaaaaaaacattacgattgcaatatgttaatagtatttataaaaactattatattaaattatatgagatttaataattatttaattgcactgcttttatcatttttcacgtaattattacagtaaaacctctatttaagaataacctctaatttgttataaaaaaatcaagtctcgatttcagccagttataaataaaaataacatataattagttatacattttttaagttccgtattaataaagtttacctctatataagaataattatatcgtaataaaatatatacatatatataaaattaataattttattcaaaattataatacatgtataaatattatatttactctaaaataattctattatgatatagtattaatgattatttattattattattgttacattgatcttttttggtattttaatttttttgttagtgtaactctatttaattataatctctaaattagaatataatttagttaattctaaatatatttttagataaagattcttctctattagcaaataattacaggcgattttgtatttaaataaataatgtataattagatgggagaattaattaattaataattattattagttaattaattgattattgttactatacttgcagctggtaagttgagtaaagaagctcacttagagaattggattacttcattgcctgctttaacaccaggagattctgtcttcaaagtcactttcgattgggatgaatccattggagtccctgaagctattatcttcaaaaacaatcatcttgatgagttcttcctcaagacaattactcttgatgatgttcctgctcaaggtgttgttcgtttcatctgcaactcttgggtttacacagctaacaaatacaattacaatcgtgttttcttcagaaacaaggtaataattaaattaatatacttgcttgattgattgattgattttggtaatgtcctccatgtgtttgaataaagttcacaaccagaaaaaagaaaattatatgatttagttgattggggttaatttttgcagtcatatattccaattgcaacaccagcaccattgcttaagtacagaaaggaggagcttgagaacttgagaggaaatggaataggacagaggaaggagtgggacagagtctatgactatgatttgtacaatgatttgggtgaacctgataaaggtagaaacttttctcgtaaaacccttggagggaatagtgaattcccttaccctcgaagaggaagaactggtagaccaaccaccaaatcaggttaggcatttgtttaatttttttttttaagaatttgaaatgcagagatttgggattttgattcttcttctaaacatgtttttttgtttgtttgaaatgtattatatttaacagattctagaactgaaagcagattgaaacaagtgaatcttatgaatcctctggatcctgttgaatctttagacatatatgttccacgagatgaacgttttggtcacttgaagatgtcagactttcttgcttatggaatcaagtctttgactcaagccatcatacctgcactaaaacattattttgatcaaactcgaaatgagtttgataatttccaagaagtacttgatttgtatgaaggagggttgaagctaccaaaatcagtacttgataatatcaggaaaaatgttccttttgatctgctaaaggaaatgtttcgaactgatggtgaacagttccttaaattccctttgcctcatgtgatcaaaggtatatatttatatagtcaatcatgctcttaaatatactacaataatcttgttatacacttttaataattttcggtttgaatgatttggtatagaggacaaatctgcatggaggactgatgaagaatttggaagagaaatggttgctggcgttcaccctgtccttatccgtcgcctcgaagtaatttcattgtttcatgctagaatttctcttgttaaacaattaataattatcaactaaaaattcaaaagctattgtaagtaagaaagatttagtttcatcattggtcctaatttggtctgtgttgactacaggagtttccaccaaccagcaagctagaccctgaattgtatggtgatcatactagcacaattactgaagaccacattaagaacagcttggaagggcttggtgtatttgaggtattgttcctagcaagatttttcatatataatagcttcaaatcaaatgtaccacaactaatacaattaatcatatgattgaataataggcactctttcaaaacaagttatttatattggatcaccatgattcgtacataccatacttgaggaggataaactcaacttcttcaaaggcttatgcaactcgaactctcgtgttcttgacaagtgaaggcacattaaaacctgttgccatagaattaagcttaccacatccaaatggtgatgaattcggtgttgttagcaaagtgtatactccagctgaggaaggtgttgaaggtaccatttggcaattggctaaagcttatgctgctgtaactgattctggctaccatcaactcattagtcactggtatgaaactatcaaagaaatttgatcacatcataagtttgatttaagatgaaattttttctttagggtctgaattttctgcaggttgaatacacacgccgtgattgagccttttgtgatagcaacaaacaggcaactaagtgcactgcatccaatttacaaactcttgcaaccccattaccgtgataccatgaatataaatgcacttgctaggcagagtcttgtcagtgtcgatggcgttatagagtccacatttttaccaggaaagtatgctatggaattgtcagcagtggtttataaggactgggttttcactgatcaagctctccctgcagatcttcttaaaaggcaagtctatttggcatagatgataactaaaatcatatttttatgaattattataatcatctaaagaaatgcatatccagtgataaaatcagtgttgtatttaagtctaatatttaagattttcttttgttaacattgtattctatggctctctattcagaggaattgcagaaaaggatgtgaatgctccacatggacttcgccttttaatagaggactatccatatgctgttgacgggctagagatctggtctgcaattaaagcatgggttaaggaatattgctctcactactacaatagtgatgctagtgttcaaagagacacagaacttcaggcatggtggaaggaagttagggaagtgggtcatggtgataagaaagacgagacttggtggccaaaaatgaaaactcgtgaggaactagttgagtcatgcacaatactcatatggatttcttctgctcttcatgcagctgtcaactttggacaatactctttcacagggtaccttccaaatcgtcccacattaagtcgacggttcatgccagaagagggtactccagaatatgaacaacttaagtctgaccctgaaaagggtttcttgttgacaattacttcagaatttcaaagccttgttggaattgccctcgttgaggttttgtctaggcatgcttcagacgaggtctatctcggtcaaagagaaaatcctgattggacattagatgctggtcccttgcaagcttttgacaaatttggaagaaaacttgttcaaattgaagatgcaattgtgaggaggaacaatgatttgaacatgaagaaccgagctgggccagtcaagtttccatacggtttgctcattcctacgagtgatcaaggcctcactggtaggggaattcctaacagcatctcaatctaaagctcatctccttgtgttgttgttgttgttgctagtgcttttattgttcactagtctatttatcttctttgttagttgtttgtaactaagtggtggtgtcattaagaaaggccatatgggctattgcagtactaatttacttgcactgaatatgatgctagcttaatcatgtattatcatacctcaattaaataaagtttatatcaaagctttctgctagattttgaaattctcttcttaaggaattgagtgttgagttatcatatgtgtatcatcatgaactattaaacagcattgaaaaatcttaatgaaatttaatggtagttccttccttcaactccttgcttttataagggattttactacacaaaaaagtataaaattggctcatttcttactaaaatattaccattcttttttacatatttgtttatgtaaacttcttttttttagtttaatttaaaaaataaatgaatttaaaataaattcttttatttgtcaagaattagtagaaaattataattttaaattaatatttttatagaataaataaataaataaagcacaatttgataatgatcaaaagttcaagacttaaaactaattggggtatgtaagttgaaaaatgcctcttttattcatcaattaatcaaatttacctnnnnntttatatttatttgaaacatacctcttttgatatg

SEQ ID NO: 20786 - DNA, 3157 bp, Cannabis sativa
ttgactaaaaaattatttcaggtgttaaaacagataagggtgcatcgatgtatccatttttttgtgtatatttatgttgtactcttattattattttattagatttttgttatttgtatattgttttaatgttattttcttattaattttatattttttttttgtatatttataaaataccataaaaatatatatataaaaaaaaaaaatttgagcgtaaaaatgtaaaaaaaatttacaaaaaatattattttatgtaattatttcttaattcttggaatatttttataataccaacaacttaaaacaattataagaatatgattgtacaaaattttgaatatttttactgtttagaaccataaaattatctattacggttgtacaaattttaaatatttttcttgttaaatacaagtgaaatacagctaggaagattttataatagagctctttctaatttaattcttggaatattttaacgactaaattcttccaactattatttcttgacttaaccatctaaatttaaattcttgtaatataactcttcaaattaataaaacgttaaatattatctattttcttaagttaaataccagcaaatattacatacatgaatactcttatacacgaaggaaagacgatattacattacaaaatccaaagccaaaactcattagatcatattatattatattaaattgaattatataacatgtttatataatactatcttaaactttaatgttaataccatctatagttttacataaaatacaatttaatataatattgtctaatacaatacggtataatacagcgtcccaaacgaactctaagagaattttgatgagtatttttacaaaggtgaagagcagaacacagattcaattcaaattgactcaatagaacaaacatgatttgtcatatgacagaatatgcatgtaaatgcaaaaacagctttctttgtcagaatttttgttgggagtttcagtttcacatgactgatattaagaactcaaaacatagaacagataagaaaagaagaaacaaatgaatatccaaagcattaatttctaaagagaaaaaaaaagttgaacataagtgtctgtgaattccatgacatttccacgaaaagagaaggaaacggtaacaatttcaagccattatcttggccgatctcacgtagagactatcgaccaccttgccaatgttggttaatgtttccaacgtggccgggtatatggcatcagtcttgccatcttcaaaaattactaggcacccagcaccttggtccaaagtccctgcaaattttttgtccaaaatcatttgagataacttcttctctacgtgatcaatcggaagttcaatcaactcagcgatatgcccaatctcaactcgcgagaacggctctatcagcctgcacaaattctgctccaagagggtgtcgtaaagcgatgaaaggtgtcgatgaacaatgggatcttctgataactgacccttgaaatccccaagggcagtctcaaaaagcttcaaagagcgttttgagtaggcgtcggccactgctttcatggcatccaactcaggcccaacatactgcaaacctgcttttgatgatattactcctgtaacatcatcagcctggttcaccatgattttacatagaagcatatacttaaggctatacacagccctactatcttctaaagcattaaatgcttcgaaagcttcaaagaagtaactgtacgctgttttgtagtccttctcctcggcgtgcaggattccactctgcaaatcaatagttccctgctgagctgggggaacatatatggcattagctgctgttctagcagctgtgagggcagctttcgccttaggaagattcctaagggagaaatggagcttactctccaataaatctatgtcaacaagcaaaagcttgtcatccaatcttctaacttccttcaccaaacccgaaagaaggtttaaggcctctgagtactccttgctctccatcaaaagagctgcaagcctggcctccactcgctgtcgaagaaaagtccttttctcgtcacgagtccactggaccatttctttgcagagagaaatctgaagcactgctgtgcctggtatcttggccactgtatcaatgattccgcgaacaattttcgcagttttggccttgggaatcaagttaaagaaaggcctcagttgagttagaaggttcctgaggtcctcagcccgattttcttgcctgagaagatctgaaagatttgtgattgcctgttcctttatccgcagagcatcagaagatgatgatgggttttcaagaattttatagagaatagagatggcttcagatggagccttggcttctaaagcctgagcaatcgaatcggcagtggctggtagatatgatgaagccattgctactgctttgaattcacttgaactgcgatgataaagagataacgtacaaaataattgaaattaacaaaactataatgattagaaaatagatcgaagaaattttggagtaattggagtaacataactctattttaatattttagctagaaacactatttgtagttaaaacaattccaattcaaattgcctagcttagctacaaacacttcatcatcaacaccaatacatatatgcataatatatataatcatcccaaacgtataaatatatggtaagaacaatacaaatagcatggaaatgggatcgattcacaaatcaaaatcagaaaattatgaaagtttggatagtgagtgaagtaagtacctgaagtaattgtgttaaccggcaattgattgaaacggaattcctactctcctccgatctccgatcagaacgaggttggtgatatttctagggtttacagagagaatcgaagaaaagccagagagagattgagtaagggagagagcaaagaacaatgtgactaagtaactgtgcttgggcttgggcttgggtttgggctttggcgtgggcttcttacagtgggctaatatagagtttaaagggggaagttgaggagtacccttttttgtattagttaaccaaaaatacctctccacattagatttgattgaaatgggaaattttatttacaccccaaaattttctaaaggcaccccatttt

SEQ ID NO: 20787 - DNA, 6152 bp, Cannabis sativa
caagtggaaaatcaggactaactatagtaggcattatcaatatgaaaaaataaagccaaaaccaacggtgaaattttccacttactgaagtttcaaatttggaggatttgtggtcattatatatgccaagtagaggtaccaaaggtgtttgattttcttttgtggcttttctatattaactgcaagagtaataactaattggaatatttagtcagttatgcaatttactaaacagagttttttaagatttcagaatttgccactatcatgtatgaatggtaatatataaagtttttaaatatttaatttataattttcttctaaataaaatatttacatgtgttgcattattttaaatttgtctctttaccaatcatttttttacttattttcagaatcaattattacaacatctttgatggataagctcggaaggaaaattctccttcagttgagtttccttagtatggtaatttctcattgtatatctaaatgatattctttagcaagcaaatctttctctatatatatatcatgtcattttagttatgtctttctgaatagaagtaaagaatcagtaatgaaagagccatctaggaccattttagtgaattctttagaatttaggtgaatcgtctcagagtaacacttagtagctttctgtgcaagctcagtcatggcaacacaggttagatataatctcccacgttcgtatctccatctcaatgtgtgattaagctttttcttaataactataatcgttgtatcattttatgtgggacataaattttgtttcaaattttttgtttatctttattttttttagcagtgatgcaactggttaaaatgtgaagaaaagtctcttgcttattctccaaaggtaaactattctttatttttgttctttaaaagaagaattactcccaagggagatttataatgaaataaagaaagtggcaactagctctatttgactctgtttttttatatttaattgctttgtttaagagtatttattcatagcaagtctcttttgaattctattttattcagaattttttttggtattggttatgcatgggcagtgaaaaatacacacacatttatacatatgtaaatgttttgtgtttttatatatagtgattaattgaatgaaatttatagtcactaactattgatattttgtacagtgattctaactaaagaacataacacaagattgttgctaagagtttgggtctcctaaaaattgatgaattagttttagaagatatttattgtatcaatttttgttaattctcacaaatatatacatatattttttgaaagtacatattttttcttatactattactatggttgtaaacttgtaatggtactcttttactagctttattagtttgaataaaaatatatttttgttttgttcaaacaaaataataaggaaaagtattattgtaaatcatatgaaaaatataattgtgaaaactaaaagaataataatattataaattagaaaaagtattatgaaaattaaaataataataatattttaagcttataaaagtaataaaataatactcaataagagctattgtaaattattcaataacacttttaatataaaaaatatattataaaaattaataaaaataatgctcatttaaacatattaatatattaaaataatacttaaaaagtattataaaaaagtttttaataattttagtataagtcataaaaaacataatcaaaagtgtgtcatgattattaatattatagtatttcttattgtatcataaaatattatgaaatttatttataatagttttttggtattataagaaacattatttattgttgttttttaatttaatgtattattttttatagaatataactaactaattgcaagaagttacttttaggtggtgttaaagaccactaattagtctcttataataatgctcttattcttaaggtgatatactctataatagtgtaaacattattggtgcctaatagcaatattcatctcttcaaaataataatctcgattgatcggattacaattctataaaatggtgaagatcatcacagagtaaaaaaagacagtgatgaaaagagctagataataaaagagtaatttgtggtcaaatttcctatacttttatgtttgttacggtttaacctctttactcgaaaaattatggctatatttcctggactcgataatcgttttgctctgtattctttccatcaattttagccacagtggactaccacaatgtacacaagtatacacatgataatttttcattgatccacctaatttaataatttatattttaaaaatagtttaaaatatttaaaaataaaaaaataaaagataattaatattttttttttctttttcttctttatctttcttcttcgttcttcctagaaatcaaacccccaaccaaaaatcgaatcccaacctaaatggaacccaaaaaatctaatcatcccaatctaaataattcacatgtaaattactccaactcaaaaaactcttaacccccaatccaaaaatatatatttattatatatatccattcgtccatataggccccttctgtaatgagctgttggatcataattaatcttaaatcattcatagaagccaaaacaagctagggtccctagctacagcttgttgaatagtactaacccctaattctccattatgaaaccccataacctatattaacttcaaacacacacacatatatatatgtacatataacattgagaaaggacatgaatgatgatgatgattaaggatagttatttaaatcagaacctgggtgtaggtgcagcagggtcatcaaattgagtgagacccaacatatataatatagtgcacttaaagtgtacggtcaagccaagccaagactatataaggtggggtcagtttctcaatatctgatgcattaaattatacataatattaatattattattattattgatgcctcacccttagaacgagacaaggaataaaagtgatcagagggagccctcttatatattctttcactcatggaaatatcatcttcctcaagctcctcatgtttttcttctttttataatcttataattattagctactgaaaactaagttaactaataatcatagaaatctgaaaaagagcaaaaggttaattaaaaatactaagcgaaaaacaaaagtgaaaaaatatatataagaggcaaaacatcattttcctcaacaatcatttctcttgagacgttattttcgccctttcatcaattgctaaatattgatattcaaatcaaaatggtcttaatcaaatatatatatatatatataaatatatataatgtttagcaaagtgaccctttattgtttatttttctcgatccataggagaataataaattgttctctctgacctatctccctcttcttatatatgtgtgtgtgtgcagtgggggtttattatccaagtcgtcaaacaataagttttcatggggttcaaggtcaacatcacaagaaataatattagacccaacatttatttatatatatttttttttaaaaaaaaaaatgtaaaaaagcaagggggcataaatggtgggtgggtggtaattaatgaaacaaggacatgtgtagtgcacacatgacatgagatgcccatttattcaaaatattaatgctttcagcaaagatcatatgcacctctgatggtacatatttttacttcttcttcttctattgatggctgtgagccccagctctactacacatcatcacaacacatttctttcataattttttcttatgatcatcaaagtaggaattaataaatatttatatgccaatggatttttcctctttttattcgtataagtacgtacactactacaaaaattccatttagaggcgatttttaaaccctttcagcgtcagttttagcaaagttcgctactgacatatactttgatattaatttgatgtactttgaatttctgataatattaacatattaatccaataattgtggaagtaaacagatatatatgtatctcctaacaaaatttgctcaattttcagcttttttcttactagttactaattaattctttgttttaagaatcaaagttgaaattagtagtcttattatacacccttttgttttacaccaaaacactatacatacttatggggcaggagttttgcctaatgggatatcatatccaatcttaaatgaatgtacttgaattttttgaccacatctaagtgtagtgcaatattttgacataaaaaaagtgtatgcgaataattactcatcttattaacatcagtgttttgaaattgcaagttttgcttctttctatacatatcgtttctcagttgtctaaggtaattagttactaaatttagttaataattaataaaaatctataaaggactacacttatttatatatttttttttttgtaaggtaaaaaaggactacaattatatatattattaagtaatattaataacacgattttattgtcttttcaaaaaaaaaaaaaaacgattttattgccattctttttcatctttgtatatataattaagcgaatatatatgatttcccatcaagttattaaaaagagctcaaagattctaaactataatcattaattcccattctttatttggtaaagaaatattaatattatcacgcttgttgtttccaagtatatatacagatttttttaatattatatatatatattagtatatataaaactaatacatatgacatatttttgatgttaacgtttaaagcaaccaaacacaacaatttagtatagtctatatattattttctattttcaaagaataggagataatcgataaataacattagaaatgcaaatttcatatatgatattattatatagggagatcaagggcaccccctacagctatttctaactaagataattaagaagaaggtatgatttggcatagctagctaggtttgattatttgaaacgataaatgattaaaaggaataataatctttagtgttggtggggtaggcctatacctatgaaaaacattttataagattggtatactaaaatattagttaaagataaatcgtggggttttgaaatggacatcttttgtcttgaattttaggggtctaattagaagaaaatgtgaggagaaagggcattggatgcgtttttttttatttaatttttattttttataaattattaaaatattttagaataacttgtaaaatagattgaatagagatgatagaccatataagatgtaacgcattatcttttatatatatatctttttcatacgctactatatagctatagtactcatatttggtaatatattatattatattgattaatttaccaataataattaaagatataatataatatagaataatgaaagagcgttatacatgtttccattattggatgcccattatataattagatggggtggtatcctcctaggttgtaagtcatcatatatacataaatatatataattctaaagagtagtaactttcatttcatgagggaagtcatgaagtggcaacactataatatatatgtgattgaatatatgatcatcaatccatgaattaattaattatatcattctaataaaaagaaaagagaaaagtattaaacaaggaagaaaagaaagttgtgtaaacatcttttttctccttatacatgtatttgatgcgtgtacaaaaccatgaatcatgaaaaacttactacataatatacatatatataaccaaaaaattacaaagtaatgtctcaaaaatcatcttaattacaacttagtacaactcgtacgtttggctttttgacttaatatatttatttatttaagatctccccttaattctacaatattaatttgacaactataaaattgtaacatttattaggtaggtaatcggaagggactcgaaatctagtatgaaaacaaaccacaactataattatattaaatgttgtctgtttataatttttgatgtttttgatatttttatagtttttgtactttttatggtttttgtgccattttatggctt

SEQ ID NO: 20788 - DNA, 2936 bp, Cannabis sativa
gtataaatcatatggataaattgatttttcttgtcttcatagttgttacaatgttttgtttttttttcaaattaccaataatttaatttgtgtaattcgaaaaagaaagtacatatgatttgtgtatgatttttgtaggatctcgagaaagtaaaattggcaaccagtgaaggccattcgacttcaatgaatgtttatggcagaaaaaaattagaggttatttttaaagaataaaattgtaaaccatatatacgtattttcttttggaaaattgcttagttgattatgtatctttgcttgctggaatttacttgtgtgcatggaaacatggctatttaaataaattattttcttgtcctaaacgtttgctcaatattacgtcaaaatatgattattgttaatgaaaatcttcttccaatatatgaacacatttaatgtttatataatcatgaatagcggctcttttgttttattaaccattatgaaatatcttctgcaatacaatgcagctattggaacttgagaatcggatagaaaagaaaactaccatcttaaagactttagaggatctagattctgtatgcaaatggtaattctgcgctactgtaggctgacatttctcgtattttgtcatgtattcatatttagatcaatgcttaacctgtttgtgattgtaggtttgatgccacagagcaggttgaagatgcctttgttggtataaaagtcaccgcatttgatgaaaactgcattaggttgtcattgcagacatacattccaaaattagaaagctttttatctcaacaaaatattgaagctgtcgatgtgccactggaattgaagcatcagttgatgattgaagtcgttgaagggaccatggagccgaaaaacgttgaggtaagtgttcagttaagacatggaagagacacacaatttcattttagtgttaccaaaactcatgtcttacaggccaaaggactaaaacttagtttgtatgttgtatcttgtgttcttattagattaggtctactcctgaatcatatagtttgaatatgttttttttctttggtggtgaacttgttgaattaaataaacaagtaaaaaaaaagtgcttgtgttaagctacttaagtaattacttaaaatctgtgaagtggtattttctttgtatttatatatacatatattttacaaatgatgtgtttatctattttgttttgatttatgtttatctatgattgacaagagcactttataccatttacttcttagcttgaatacttgaaatggatactaataatctgtctgatttccagatttttccaaatgatatatacataaatgatattctgaatgctgcaaagaatttcaggtttgtacttatattctttcaaactaattgcttccaagtgttctgttttatattcttgaaaaaataagttgatagttgaaagaagttttacttttacttgattgctagacttagtcactctatgaaaaagaaaatcatgtgtaatgtgctatgtgaaatgccttttgcagtcaatcttcattgcagtggtttgtatcaaaagtacaagacagaattgttttgtgcacgatgaggcaacttgtggtgaagagtgcaaataaatctcggtaagaactttactacacaattctctacataacttataatcattccaaatatcatggcataattgcagtaaattattaaggtttgagtaagtattactatggtcaaccaagagttttaatagcaatgcaatttgtaagtagatactccttggaatacctggataaagatgagatgatattagctcacctggttgggggagttgatgcgttgatcaaagtttctcaaggttggccagaatcaagctctccattaaagctaatatctctcaagagctctaacaatgacacaaaaggaatatcgttaagctttctatgtaaggttaaggtgggttgtactttacctttacctttctttcatgcatgtaaagttgtccttttgttttatgcatgtgggaattcatgaatttataaaaagatactcttaaaaaaattaatgttggagaaatccttttctcatatgaaattcttttcaatttaagttgcacatgtatgtgtgtagtgcaataaatctagttgtggctttgagattactctctaaccttaaaaacaactaagaattcatgaactataaatagttttgcagtagggtattatatatttctggattttattttcaaaaagagtaatgacttttgtgtagtctcaaaatggttttgtaataacttgatcactgacaatttcttttgggttcttgggttatttggttctgtttcatttaggaggcggcgaattcgctggcagcgcatgctcggcaaaatctgtcaagctttgtggatgctgttgagaaaatacttgttatacaaatgcagatagaacttgagtctgatgagaccccaaagagcaacccatgattctataatatgtcaccttaaacaattttattttgcactttagaagtcatatgtacttaatctgaaaagaaattcatggtctgtttgatttgtaaaactaagctacttgttttttacaaattattatattcttctattcctttataagtaattcagtgtccatttttccccctttaataaaggtttgttagtttcttgaccatttatttgctcttaattatctgctattcttacataatttatatccattcttgtgagtatttaaagaggaattgagggaatgggtatcttccaagaggactcaatgatatggtggatcatatatatagcaggctttggaattgttgaaagattcttttagaggatcagttggttatattaccccaggtatatagtttaattgaattgtttagatcagtagcattttatttaaagcatgaatcttttgttt

SEQ ID NO: 20789 - DNA, 3073 bp, Cannabis sativa
ataatacaatacaatacgacctagctgataccacgttctaaacgagcccttactgttttgttgttgaattattaagtgaattcattatgaccttaccattgaaggttcttcaagtttaattaagaaacacactcatacttgatttagtccaccgatttaatcaactaataaagatcaaatttttagtatttccttattaaaaatcttgttatcgaagataaattttcttcaaaacaacatacatctcaatccacgattataatagagtagaatttctatctaagaatacacttgggaccaagaaaataatattctaattgagaggttataattaaatagagttacacttgaaaaaaaaatcaaaatatcaaaaaatatcaatgtaacaaaaataccaataaacaattcttaatactatattatattagaattattttcgagtacatataatatttatatatgtactataatttgaaataaaattattaactctacataaataaatttataaaatatatgaaatatatataagatgtaattattcttatatagaggtatattttattaatacgggacttaaaaaaatatataactaattacaatataaaagttattcttatttataattggcccaaattagggcttcattttttttttataataaattagaagttattcttaaatagagtatttttaaatagaggttctatacaagaatttgaagaacaccctttaggatggaacactatggagagattgagagcacgacaaaactacaaaactgacgaattcataattgaaaccacaaaaatttgggtctcgagtttggggtatgtaaaaaaacttttagttatccaaatatcaaggcactaaaccttttgaattaatagtgaaaatatggataaatgacatactaaaaatcaaaattttgtagatttggaagcgttttcttttgtttttcatacgttaattaattaaaaaaccgtatttgtgtaaacttgtgtaaaaaaagtcaataataaaagcccaatttttcttgtgtgaaaagcccaactatgaattgtatagaacgtagcagagtttattgggctaagcttaagctcagaagcttgttggacacttcaaaatggccttactcagtttggcgccaattcaattcccttcttcttcttcgtactctttttcgagtgagggtttttggcttaccgtttggtctgaacaagaattttcagtacaagaattttacaaactcaatgagctcagccgttcacatatacgacgacgatgatgatgtagacaccttcttccttttcatttattttcttcttttctcctttctcttcttgaattaatcctttttattttttgtctaaggagtttgattgggatgcggcggttaagcaaatcgacgtgacttttccctcttcgaatcttccttctacgtcttcatgcgttgctcctcctcctcctcctcttgctgttgttgattcttttgagaacagaaaaaggaatggggcctctagctctaggcaatccacgctcgacaagtttgttgtgaagccattatcgaagcctcagccgcaaattcaaagtgtagtcgaaccgggtcatgagaaactgcctaacgttcagattgatgctgaagcagccaaaacttggatatacccaggtttaattcggttttcaaatagtgattgtgtttaagtcgctcaattgatttcgaatgggctggtaaaaggaattacttaagcattttgatgctttagtctaactctttgttcttgattgttgtgtgcattttcctttttttttttttaagaaaaaaagaatgtttaggttgaaattgatcgagataaaactgcttttcttgtttcataatgctgtttttgcaattaagtcatctggtattgctatagctggatcagtggtcagcaatattcatataatatctttccctttttggtggtgtaatccaatttttatagttcttgcttctatggttttctcgaggttaattttcaggaaggtgatttaatttgagtttatcatcgggcaatactgataccaatccccatagaatatttttcctcttttcttttgcttccgtggttgcttttcacttgccgattattctttttctctcttgacgcagtaaacgttcctctgcgtgattatcaacttgctattacagagaaagcattattttcaaataccttagtggcactgccaacaggacttgggaaaactcttattgctgcagttgtcatgtataactatttcagatggttcccagatggtaacgtaatcttattatgcttcttacttagttaatgtctgtgtcatcttaatttataaatttaccacgtatttgataacttccaattgattgatgtatcactcttggagtgggttaagtggagaattataagtgtttttttttttttgatgagaacaaggtcttcaaaacttcatcttgcaaattatacatgtgccaaattattttactttcttattcaatccagtcatggaatttagttcttggtcaccgttgtttttctttagacttcttatttttgttttctttatgctgttgactttttattattttatttatgtttgattgtaatcattaatattttttcttcccatgtaggaaaaatagtctttactgctccatctcggccacttgtcacacagcaaatagaagcatgccataatattgtgggaattccacaggtagcgcttttttaacacacgaacagtgattcattcaaatctggtgttcactttcatttttggtataatttagatgttaaaagattgggatcaaatgattgtaggagtggacaattgatatgactggtcagattagtcctacaaatagagcctgcttatggaaatctaagcgagtattctttgttactcctcaagtgctggagaaagatattcaatctggtgaatttaccctacaatatctcatttcttacatatactgacatcttatttgaagacctataactttacaatatggaaatttatgtttcaagcacatatacattttttattagcataa

SEQ ID NO: 20790 - DNA, 3387 bp, Cannabis sativa
  modified_base (954)..(959): a, c, t, g, unknown or other
ttagtgacaacttgtaactaaatactttattttagtcacaaataacactaaaaaattgtcactaaaagtagtatttttttatagtgaatctctggaagaatatgcatcttaggtaaaaattagcaagatttttttttttaattattttttaaactccggtataaataagatttatttggtcttttaggaatttctctgtggtgaattgattaaaattttcgcccctccgttacccatgtaaaactttttaattatatatcttgaagtttattatttgtttttgtgtatttttattttcagtttctttctgcatatatcttttcagtggtgatatgacgaaaagtgcttagtaggtgcactagctagactatagaaacttgagctagagctagagttagagctagctagctaaccacagacaatatttgaatcgcaggagcagaagaagtatatatgaccgatggaagagtaaaaaaattatgagtgagaggacataattgtatagttagtaataaacaatttgaagtctagccacatttggaaagaggaatagaaagtgtaatgccgtcagtcactagctttgaaaatgggagaagtgtgaaaaaaaacataacatttgtttatataattattatgtttatttatataaatactatttttttttatgtgaacataccccacctgtagattttgattgtcacctaggtaatttatttaacaactataagttagactgttatttaaattaaattttgattttgcataattaaattgctatttatgtatttatttttgtttgaacttttgaattgagctcgaattattatatcacattagtattagagcaacaaaatgtctaaagaaataagcatattataattgaaagggaatatttacattaatttttaatattcaaagaagacattttgcaaatatataataataataataatnnnnnnaataataataataataataatggggcaaaattgtctgagaactaatcatatttatttttgtaagaacgggagaaataagtatatacatataggtagtgaagttaatatacaagaggagattaaaaacagattgtattgtcaaacaataaaatgttatatatattatagaaaagttaaataccataacgttttcatcgacgacgaaggggggaaatcaaacacaaggaaaacatacacataaaagaaaacgtgtttttgtctataccttttcttctcgtctctgtctacagaaccccacttgataaaaatattgtagctctttctagaactctactatgggctagctattaatataatctcatatcttcccaattcttgtactatgtgtcttatttcagccactcatgaccaatataatggactcggacccaccattgtacaaggcttacaagaccctcttcgacaaaaccatcaacgaattagcctttcaaaacagtaataacaataataataataataagaaccagctattgtcaccatcatcaccaccgtcagctgtcaccgtagacgagtgcgagttaccgttgatcgacttgagcagactcagtctcggagaggtagcagagagagaggaatgcaagtcgcagatagctagagcttcacgggaatggggcttctttcaagtaataaatcatggaatctcaaaagggctgttggaggaggtgaggtcggagcaagagaaagtgtttaaagaaccctttgagaaaaaaagccaagaagataagtacctcaaattctctgctggaagctaccgttgggggacgcctacggccacatgcttaggccagttgtcgtggtctgaggcttttcacattcctctccacagtatttcgtcccccaatgataatgctaatcaccataataatactgatcatttcaggtatcttttctttatgaatcacgcattaaaatataaaatactatcgtatcattcagtcgatcacttttctttcattgtactgccttagaattgacgttcgacaacaaacttctagtcattagaatgtacgtggtccactggtcctactacctacactaacattaaaatataagagagtacaataataatgttattattaatttcacgttcacgaacacttaatctataaatttataaagtatatgtatagtatgtaaagggacaattatgggaaggacgatccttaactatatagtctgccaataattatatattccattagtagtggagtctactttcattgttacagaaccaaaaatttttaccaagtatctagctttttgaaaaagctgtctcccgtgattgaacctgtggtaacatatataatcaagggggccgggtgggggtgggtatatatgtactatgaataaagagaataataaagtaaaaatgtaatttagtttagctatttttagccacatctcctagtctcttattattgtggacattgtcccacatggaataaatggtagagaattgagccatctataagatcatactccactcattaccaattggttttgagttggaaccccatgattctcaacacttggcaaagttttgatatcatgatcagcaactagattttcgcactataattattttgtttcttaactagtcatacaaccaatcatatacagttttttatggggatcatacaccaaattcattagctcacatatcaggacttgtcatgtcatatttacattgtagttttgtaataattaaaaaagaatctgatatgctagcatcttgtctgggtggtgtagtcggttatcacgctagtctcacacactagaggtccccggttcgaacccgggctcagacactttttttaattgttctttttttgatcagtacgtactttatctaattggatcctatcatatatgcgctatacttcgcagatctacagttgaacagttcgcgaaaacagtttcgaatttggctctgaaactggcagagatcttagccgagaaagtgggccacgatccaagttacttcaaagaaaattgtttaccaagcacttgttaccttagaatgaatcgttacccgccatgtccggttccatcggacgtctttggtctaatgccacacacagatagcgacttcctcactatactccttcagtacaacgttggagggcttcaattggttaaagacggtaaatggattgctgtcaaacctaatccggacgctctcattatcaacattggagacttatttcaggttttctttcaacctacctactccttaatttatacatatatttgtggttaattttcatttctttttttatctacaaatcaaatgtaagtaatttgtgtttaaagtttgatagaataatatataattaaacaggcttggagcaatgatgtttataaaagt

SEQ ID NO: 20791 - DNA, 2078 bp, Cannabis sativa
atattaaggtatgtttattattattcaatgccctaaataaaatgattgatcttagatgtttatgagtattaattgtgtttattattattgataatagtatagtcattgtatagtaattttaacatatagtactaatgagccagcagttactttaaatgcttctagtggaaatttggtattatattttggcgaagttttttttttttttttttaatttttattttctcagtgcctaacgtcgactaaataatgatctggtatatagttcgtgaagtttattgttcagccaatttattaaccactaatcattactaaaattgtcattttcaggcagtggggagccagggcaaacgaggtttctagtatataagtggacactggacgcatgtttgtcaagataaaagaaatacactgggaacgaaaatagaatgagtattgtcatgactagctatactcttatcaagcacccattgtgtgaacgtactttacttattgccattatcaatttgctttataagtcaatatttctggtttatcatatctctttcctctcctaatttcattttagtacttgtggaggagatattatatatatttatatgtgtataaagtgtgtgtgtgtatgtgtactgataccctatcttttcatggaagaactattctctttagaatgaaaggttggtgcttttgttttatggagtctccaccatgtccaaaagaattattttatctccatgaatcttatttgttactttgaggaccccccaaaccactcaacaaagatgggctacaaagtactcagtacttgatccaatggtgttaggcctatcgaaatgtacagctttccaaatggctgtgatttatatatattcttcccaatagagaacaatgttttttttcccttgaaataccatatacaagaatataaaagtacattattattattagaaatgtaattagttaaaagactatttgcatatttatctttttatcctttcgaaatccaatgttacactcatgtgagatttatcgtcgcgtgtgaactacttttgttttgccgggtagtgtgaactaccctttggtgtttagaagatcactggttttagcttttaaatagtacaatattttcttgaaaaaacagagttaaaatattattagtatccatcgccctcaccaagcctatatgtacatattgcatatatattaatgacgtagttccatctcgtttgtggtgattcttggtctccttctttgcaagggtggttattggtacatgtgcaggtatatttaactctcatgttcttgaatagcttacaaagaaccacaaatccaggagttgtgcataatttaatgtaatataagtttacatttgtgttgaactaaaatgttttagcccatgaaccttaataaaaatagggatttttataaaaatattagattttgggtaaaagtttacaattttattgtcacacggaattttttacaaagatattgtttttttataaaacaatcgtaacacgacaaaacagaactattaaaacaacagtagaacaactaaaaaacaaacgcggaacaacaatgaaaacttaacacaatacacattataaaacttacacagtatttttgataaaatatctactccacagtaaaaaaaaaataaaaaaaattagaattttcagtatgtggtgtaaaaactccataaaaatattaaaggcaaggcccaagaatgcccaataatgaaattttcctaccagattggatccaaatatatgcgtctaagcgcaccaaatatttccacaatcagacgacaacttgagcttagctatgctaacctcaaagcggaaagtttagggccacaaattcaaataatcgttgagttggttgtgcttaattgactcaagttatttttccaccttcactacctaagttataaataggtgtaattgagtacaaaaagggtcaattccgtctcaaattcaaatatattttccttctctcactaggattcatttggattaaagcatcatagagttttttttttttttttttttttaaaaaaccccctgcctgtaaacgac

SEQ ID NO: 20792 - DNA, 3459 bp, Cannabis sativa
gagccagggtctccggttccgatcattaaaggggctaaaccactccctggtcgacacccatttatggggacaccagaaccattgatgggtcttagagagagaggtgagcaaaagtctaattcaaaggcttcagcttcatcaagaaggggttcttggggattaggcaaaagtggagtagaagatgggatttcatcaccctttgttctaaagcctgttcctttagatttcgaccagtgtacaccggtgaaagagaggcaggcgagagctttgagtagtcatccaatgtctccaatgatcagaggaagagcaggaaaggatggcggcaactcaagtgctaccggaattcggtgttcttatggtggtggaactttgggtaagatgcttgattctaaaggtgaaagtccagcattgttaaggaaaagttgtgttgttccttcttctaatgggaaatttccaagaagcagaagtgtctgcgaaagagagccaagaattccaattagtcccttcaactcagctgtaggtacattttccccttaaagtaaatattggtattgaattgatgatgttctttgagagctcatttctgtacattttgttttgatactgatgttgttgtttcaggatataaaaagctcaactcctccaccaagattgcgaaatacaaaaatagcaactcaactcaacatggctggagagtctcaaaactcatcatccaacacaaaatcgtctaatcagccacagcatgttaataacatatcacctgataataataaaagcacatgcctatctatgaacttgccaggaaaacttagcattttgggcaaggtgaattctattctatgtttcgatacattctctttgaactatatattaagctttaccaatttgtttacccttttatctttgatttttataggaagctgttcagcaaagagaaatggctcagaagattgctcttcaagcactaagagatgcttcagcaactgaggccttagttagatctctcaagtaaagaacactctccctagtgctgaaatttcttattaccaagttctaaagatgactgattttcaacaatgtgatttgtttaactttgcaggatgttctctaacttgaccaaatcagcaaaagcagagaacccatcagcctgcttcgataagtttcttgaattccatcatcaaattgctcaagcagtagctgaaatggtgtcactacaagctgccacttcaactgaaatgtcccaaaactctgttgggattaaaaggaaagacaaggaagaagacaacatcccttctgttttaaacgaaataacacacaattctgctagccacaccgagttaaactcatcaaaaaggcggtcagcgttgcacaaatcagttacaggcaattctgagaagagtgaagaaaaaacagctactgccagtggcattggaaagctcctgagatctagcagtgtgaaaaaagcttcttcagagagaaaaacatgttcttcctctaccccacttggaaaattgtctcttgactccattgctgagaatgatgaaaacagcaaaccgggttcttcttcttcttcatgtggcttaagcaatacaaccataaaattgggtaaacagattgaaacagaatctgggaactggtttatggagttcttagagaaggctttagaaactggtttaaagaaacagaaagggaaaaaatcagcagatggggaagctcagaaagttcctcagtctttgatacttaaggtcattaattggattgaggtagaacaaagtgatagtagtaagaggccagtacatcctaaagctgcacaaatagctcgaaagctcagaatcaagatgaagaatccttaagaataggaataacattttcgattagatttacatttttatatacgttgattatttgtaatgagtttatggagtctctgtgtgtcttgttacgcattatttgtttgataatgtccacgaaatatataaatatctaaatttgtttgccgtttgagattaattctagttttatcgacatgaacgacatgtcgtttatatgtaaaacgacatatataataatacactaatttttaaacgacagtctttccatgaatataacgattttcagatttcgaagataaaacagtgtgagtttcaaagtattatcaactaactaactataaacagctttagtttgaaaaccctagcgagttagggcacagattaacagacttacaggtttgccatggagattgggtgcatgtggatgagacgaattcggttgagacccaattctctcatcacttctgtgaccactccgattggctcctcctcctctccagctttcagagaacccattttgtacattttccggaaacgtagaacccacgtacagggtctctttcagtttcttcgaacccaccgtcgtttgcttacgaccgccgccgccgtttcaccttcaaaccctcgagctcccttcgactgcgctgaaggagttgacactgatgatgtttcaaacaaaagctcgaaggttgttcttaagggaatgaattactctgaacttgaggtaatttttttagtgggaaaatgaattttgttgattgaaaattgggaaatgaaatatagttctaattttgaggatgtggtgggtatgtagaaatgggttcaatcacatggatatagacctggtcaagctttaatgctatggaaacgcttatatggggacaatatttgggcgcatcatagtgatgagttagaaggtatatgtttggtcttgcgtctttatttacttttacaaattgctttgttaaaaatctacttattgtaggtttgaacaaggattttaagagcatgttgagtgaaaatgctgagttcaaggcgttatctttgaatgaaattataacagcatctgatggaactaagaaggtaggcatagtcattcccctctctcacttgtactgtttaattatgtatttgttttctttcttgagaatattctcattgattgtgaacctcacaggaggttgcagattttatttaagttggaagatgatttaataattgagactgttgttataccttctgatagtggccgtaacactgtctgtgtttcgagtcaagtgggctgtgccatgaactgtcagttctgctttactggcaggtaatctaagatttcattttcatttctttgttatattcattttatagtttgagtcacatgttgatgttcttactcccttttacacttttcaggatgggtttgacaagaaatctaactgcagctgagataattgagcaggcagtatttgcaaggcgcctgctcactagcgaagttggttcgattacaaatgttgtatttatggtatgtttgctggttgattcggtgtttttttctctatctggggtatgatttatctattgaaatttactatccttatgtcttttgatggctctagtaatatgttttcat

SEQ ID NO: 20793 - DNA, 2968 bp, Cannabis sativa
ttttttttttttttttgtagtatgatttggcggatagaattttaacacagtgaatatatattctctgtctttgtttgtatggttttcacacgtgttacatgtaccatcagattcaatatttattattgtaaaaataaatagattgttcatcaaaccgtcttaaattgtacaaattacttgtattatataaaaaaaaaaagatattagcggttaaatatctaaactttacagtttctctagtttcgttttgctctgtacatttccattcaaaaattatagttaagtgtcatggtggattgtacacgtgtacactattgtaaattttagtggtccaaataatattaattttaaaaaataattataaatattttaaaaaaattaaaaaattagaattttttttttgttttaataatttaagtttacgtataaaaaaaattcaaactaattcgaactaaatcatttgagatcagattaaataaattcgttgtgaatgatttgatcaattcggaccgtattaaattctctgtttggtcacgcttttagaaatctcggtagcgattcaaactaaactaatccgtataattattatatatagttgatatatttttttttttggacaaaatattaatatttgagaacaactttatgttaaatgttgatattgaatttatattgttacgataataattttttattcttatttatgtattataaacttattaaagtaaaaaaaaaataaaaaaataataaacaattattaaaagaaaaatagaacaacgaaatacaaaccatgatttgaaccaaattataatttatttttgagtggtttggtttgattattttattagtttggttggttttgaatttttaaaaaaattatagtaatggttattagtttaaaaaaattaaaaatttggaccaaatcaatccgtaaacacccatttacatgattattaagttaatttacttattgttatctatttataactagagtctagaacttattttctagcccaaactctctatcttttttttttttttactggaatatcaatttgttgctattaagtgcttaatagtttacctcaatgatgaaaaagataatagaagcagggtatgatgattggaacttgattatataaaacatttaaaaactattcatattcaacactaatgatcaaataagtatataaaactactaattaaacaccatatattattcaaaaactaaaaacttacatatcaataaaaacctaaatataaactaacaaactaaatcttaccttacttttaacttaaaaagatactctcgcgataattagaaacataagaaaaccctatttgtagttctatattttggagagtcttactctttagatcataaaagtaaagagtattctttttatgcatgtatggttgaaataagaggttaccattatgtgttacatgaccaaattcccatataataatatctgatgcacattgtagcataggttgggtacccaagtcaagagagtaatatttagtccaagaatcccaaactccatattccttcataacccatatttcaatagatgaagttgatgatgatttagtgagtagagatagatacccaaacaagttacaaatacttttaatagaaaaccctttagtttctaaagaggaaggaaattcaatgagcttgaattcctcactacttaaatcaaaagcaacaaccttagtagttaaatcacacataatttctctaaggctataatagattgcccaatgaatagagccattaacaacagttgaattttccctattagggatttccaaagtaatttgcatctcatcatgatcttcattagagaatatgtcaggcatgtctatagttttccatgaatttgttttcaaactataaacacaaattttttcaccttttctaaaaaaaccaccattgagccattttggaaactgttgaccaccacatgcaacaaccactttgaaatcattattcaatggttcgtacccaattccatacaattttgtatatggacacgaaacataaacaggagatgtaggaagtttcttacacttgtcaatagctgggttccaaagattaatagaataataaggatattgttgtagccaacaaatcaccccattatcactacccacaaatttaatttgcctcttgttgttataattgttcttgtaaatagggaatcgtttgtatgaaatttcactgaaattctcagaattacgaactgagcacaacattccatcattaagttgaaagcataagagtgtacgaggtagttgttgtttgtggtgaagaatcatgaattttgggttgtttattttggaaaaccaatgtttgttcacccattgaaattttaccaaagattttgggtccaaccttaacactatttcttcaattatgtccattggtaaatctccaaaattcgattccaaagtagtgtctgccataccaaccatctaacaaaaactctttctaatgagtaatgataatcgaaagaaaaaaaaaaaatctaaatttgatgaaccttaacctaatttgatcaactaaatctcttttatatgttgctaatttttttttttaatattttcgtatttttttttttttaacttaaatctaaattcaacgataattagtataattagttagtcgtataaaaaggataataaaaaagatattttcgttttaattaccgtgttaattgatatattgttggtgtgtttcttattaaaacgaaatcatatactaaatttagtaaaaataggccaggtgaaaataaaaatactaaatgtaattatataataaaaattgttgtttttttttaaacattacaatacatatctctttatatatttatttttatagatttgcttaaattgtttttcagtgtctttttgagatgttctcaagttgtttttgtttaaatttgttgtgactaaaattaaa

SEQ ID NO: 20794 - DNA, 3358 bp, Cannabis sativa
aaaaaaaaaaaaaaaaaactttgcctatatatatttggacaagctccaaatccaaattaatcaaaccactaatccataaaactctaactcgatttcatttcattactctctttttcttattcatctcaattatatgttcaatgtttatagattctttcatatctttttttctatacagaatctttttctgattctccattaattctcactgatcattctagtacattagtattatcatcgtagtactttctccaattcattaattattattttttctctttatataaacccattcaatcatacccagaaaaaccacaattctctctcattcttccatacaggtaactttctctgtttcactctgtttcgaccaccatggctccaaacttgagcaaagcagcctccgacgttgctcctctagctgatgggtccaagaacccatcaccattttccattgatgggtcaaatctcacagtcaacggccacgtcatactctcagaagtaccggataacgtcacggcaacaccttcgcctcacaccgccattaacgacgactcaatctcaaccgtcggttgcttccttggcttcgacaccgacagcgcaagcagccgccacgtggcccccgtggggaagctcaaggacattcgattcatgagcatattccggttcaaggtctggtggaccacccactgggccgggtccaaaggccgggacctcgagcacgagacgcagatggtgatactggagaactcgtcggaattgggccggccttacgtcctcattctcccactcatagaaggcccatttcgggcctcaatccagccaggcccaaacgacaacgatttcgttgacgtttgcatcgagagcggctcgaccaaagccacgtcatcggagttcaaaagcatcctctacctccacgctggagaagatccgtttaatctagtgaaggaggcaatgaaggtagtgcgggtccacctggggacgtttcggttattggaggagaaaactccccctggaatcgtggacaaattcggttggtgcacgtgggacgcattttaccttacggtgcaccctcaggggattctggaaggcgtgaagggactggtggacggtggctgtccacctgggttggtcttaatcgacgatggctggcaatcgatcggtcatgactcggacccaccgactcaggagggtatgaaccaaactgtggccggggaacaaatgccttgtaggctcttgaagtttcaagagaaccataagttcagagattacgtgtcccctaagaaaccccttgataagggcatgggtgcctttattaaggaccttaaggaagactacaagagcgttgattatgtatacgtgtggcatgcgctttgtggttattggggtgggattaggcccaatgttcctggtctgccagaggcccatattgtgaagcccaaattgtctccgggcttggagatgactatggaagatttggccgtcgataagattgtcagcactgggattggactggttccgccggagaaggttgatgagatgtatgaagggattcactctcatctggaagcagttggaattgatggagtcaaggttgacgtcatccatgtaagttaaattttttatctctattaatagatatataaaaatattttgccgtgctatacactagctatatatgttaattaattgactgtgctaactcaaattgaacttggttgatgttaatattagtttatcttagcttattatttagtagatttaacagttatttctgttgctttgaccttgtttgtcggcatgcttttcatctaattataagtttggtcggcacgttatatatatgtgtcatagttttttggccctttttttacttactttttacttttacttttcaacagaaatattttgacctaatcattattaattattataataacattttcatgtgtttgatttgaacagctgttggagatgttgtgtgagaactatggggggcgagtggagcttgctaaagcatactttaaagccttgacatcctcagttaataaacactttaagggcaacggcgtaattgcaagcatggaacactgcaacgacttcatgttcctaggaacagaggccatctgcctcggtcgcgttggtacgtaataattattgaatacatacacaatctcaaataagaagaagaagaaatcaagtatacaatattcatttacatgtttgtatgtatatatatggtagtatgatattaataatgaatttgttggtgtgtttgttaaacaggggatgacttttggtgcaccgatccatctggtgatccaaatggtacattttggcttcaagggtgccacatggttcactgtgcttataatagtctgtggatgggaaatttcatacacccagattgggacatgttccaatcaactcacccatgtgctgccttccacgccgcctctagggccatctctggtggtcctatttatgtgagtgactcagttggaaagcacaactttgatttgcttaagaagcttgttttgcccgatggctcaattctcaggtgtaattactatgctctccccactcgtgactctctctttgaggaccctcttcacgatggcaaaaccatgctcaaaatttggaacctcaacaaggtaattaattaattacaaatcaaaattaaccaaaacccttctttttctaatttgggatattattaatgtacttattttttcttggttttggtacagtacactggggttgttggagcatttaattgccaaggaggaggttggtgcagagagactaggcgtaaccaatgtgcctctcagtgttcccatgcggtgacctctaagttcaatgccaatgacatcgaatggaaaagtggaaagaacccaatttccattgatggagttggagtgtttgttatgtacttttctcaagccaagaagcttatcctttctcagctctctgagaatgtggaaatttcattagagcccttcaattttgagcttattacagtttcacccgtaactcttttggaaaagaagtctgtccactttgcacctataggccttgtcaacatgttgaacactggtggagccattcaatccttggcttttaacaatgagaaaagctgtgtccaaattggtgttaggggaaccggagagatgagggtttttgcatcgagtaagccgctgggttgtgagattgatggaatcgaagttgagtttcgatatgaacaacacatggtcgtaattcaagtcccatggcctacttcttctgaaatgtctattgttaactacacattctaaatttggaagagctactatctttatacttacatataactatatat

SEQ ID NO: 20795 - DNA, 4285 bp, Cannabis sativa
atggatgtgattccaatcaggtcaacaagcttctgcataatttcccgatgagcctggacaatgacatgagttcaaaccaaaaataagtcaaagtgacatcaagaaaacctcacgggtacctatattgcaattgctataatttcttggttccaaaatcacaagggttaggtgggaagcctagttttttttaaaaaaaaagctcaatgtgaaatataatgacaaatagccgacatcttctatttcatatttacaaattaaaacacacagctggtacagacatagatttaatttaaacatctcagttctcaccctgcatgcagaaattaccaggggatttttcagttcagtcgtaacaaactttttttcttttaacatttgatggtagtattgatttcactcggatgtaggaaaagaaggatctgaaggccaaaacttccttaattggttccaataatttttatattcaaaagaagagaaaaaatcattaacttattctctaattagttacagttcccacaacattgattgcatgtccacaagcacgtatcattgtacagcatatattttaaaagaaaagtcaatttgtattaatgagaaactaatacaagaaaggtgtgagtgaatcacaccaaaaagcataaagatactgattttggtgagcatattctccaactcattttggtgcgattcactcaaaaaacatcactaggacaagaaaaaataagaaaagaggaaaagaaagatatttgtacaaatttacatgaaatgaaaagacaagaatcaattgctcaaaaaaaaaaaaagataagaatcaaggtactaacttgaatatagctcaaaaagggagctgtcttccgcaacaacaagcatatgacaacctgaaaacacacaagaatcatgggaatggaactaaaaatggcaaatatgaaatggtaatttcaaattatgtacataaaacgtttcgtaccaaaatccagaaataactgaagtctgaaattttacaaaaaaggtaccttgctgaaatacccagccagaaacggactgtgagtatgttttggttccaaaaaggaaaataacaaacccatcaactgccaaaagataacttcgtcaaacactagacattttccattaagtgaagaaaaaatgggactaaatagtaaaacttctgacctcttcatcctctaccaatgtcttgaggataatatcaacttcacaagtaaaaatctcacaggcaatgaaaggaaacctgaggaaaaatatatttgcaagatcagaaaatgcattaaagcaatcttcacatgtaaaacttgtattcactttcaaaatataaaaaaacctacttcacacttcgacttctatcagcatcttcaggagcttcttcaacaatgtatctgataagttgttcaacctgggttctttctctcaaactacaaaacaaaatagtggggagacaaactgaatatatgtattcataaagacatagtgttcttaagaaaaaatgacacatgaaagtgactgaaataacactaaacaaccagtaggattatccaatttgtgcttaacttctgcagaaataaaaataaaataaaaactatacagttatttggactttagaaaataggagactacagcttaaaaatgtacacacatttcataatataataggtgtgccttgaaaattaaattatgatttcttaaatatcaacgaaggagtagaaagaagcttccaaggtcagaacttaaaaataattgtagaatattgcagtttatgcattccatccacatgcattaactaagaacttccttttctataaaaattcttgaaggaccatcctccaattgcactaagaattaaatagatacatcatagtacacagagacaaagcttaaatgaggaaaagatgaagcaagttaaaataaaagtgtatatacatttatttataaatttaaaacaacaacaacaacaaaaagctttacaagttaatcagtcgtccattaagagctttgcactcttgaatgatttcgtcttcatctagaagttcctctaatgtgaaattatccttgtccaaaattgtctccacctacaatgtgacaagaaacaagagaaaatcatttgacttgattaaataacaaaacatcccaaaagaagaaaaattattccacttgagtgggtaaatgtgaaggaaataagaaatagtggaaataatcaaaacagaaaattgtttatggccttaaaaggaacacaaaacatctaacctcaagaaaaaattgaactaaaatcctaattccacaacaatccttatttctagatgtgtccataatagttggagtacacatcctccatttaaaacctaacagtcctcatttcctgatgtgtccataatagttggaatacacaccctccatttaattcctgaacagtccttatttccaaatgtgtccatgatagttggaatacaatcctaaattcttaacacagaacaattatatatcttgccgcaaccaagatttgagcatcgtcaagccctttttttttctatagcctaactattaattcttctggcaaacacatttgattttagtactgcctcatttgtgtttcaattccttaataagctaaggtggcattgcaagggtgttgcctataatggtcaaataatcttgaacaatctaccaattcacaatcgaacacttatctctcaaacttaaatacctcataagtgacaatctagatctacaatttacagataggacatatctacaacacgaaaggtaagcagaggcttgattgctcaactcaactgaaccttgccaaagtttaaaccacttaattactattacatattttactcatgtccaggcatgtttctttataaaaaagaaatttagctgaactttgcaaccattcataatttaaaaagactacagaccaagaaatttctaaatcataaaactgcttgaatgaaagaagtaatttacataattttaagtaccagttctagaatgtgcttaaaatattatagtacacagaagactactttctagtctctactcacatttggatacttggaaaagcctaaaattcagaacagtagagtctatttcaattcaagaaggagatcaactaagtcgctgtacataatattttaaaataaacaaataaatggcaccaaatgtgacacaacaaaatggtaaatactataacaagcatcaggaaacggttgtttctacaattcctaggcgaaattttaatgtgcagcaacactgcagcgtctaacattttcataccacgtatctccaatttgctctgtctataaaacaagaaaagtaatttctctatctataccttacttcactctatttctctataaactcgtccagattgagaacatgtggtggtcttctttttctcagataagaatccagcataccaccaacatgttagcaattaattcctatttagccaaaatggaaaaactaaatggctataaaatactcaacatgagcaccaatgaaaatcctaataacatacgatttacaaaattccccaaaaagcaatgttgaatcaaaactcacgaaattctaatccgatccctcattttccacagcaacaaaacagaaaatcaaatcaaatcaacaaaaaacccagaaatttaaccagcgtagaaaacaatccacagcgaacatcgatcactgttacatataagcaaataaagaaaggtaagaaaaagaaaaagaaagcgggtaacgcacaggagacgcagtggacaagcccgccatacgccaaaacatgttgaattaggcaatagaaatgggctccgagaggctaacagtagtcagatctacagaaacaccactccgtgaaaccctagcacaggctcaccaattcctcgattccacaaaatcaccgtacagtcccggcacaaaagaaagatccaaggagaaaagcgaaaaccctagattgaattgggatcgagtaaaaggggttcagagaaagagagagaagaagaagaagaagaagagctgcaatcgcgggagagatatgagagagtgcctatggagatgagtgtacggttgatatcaaaatataatttcattcccatttcttttagatatatttcctttctaatttattcaaataataataataatttattcaaataattttattgttaaaaaaaaaattaatttattgtaagaatgatatgtttggccctttttgttattctcttcctgcaaaaacatttttttcctttctaaaagttatgtttggccaaaaaaaaat

SEQ ID NO: 20796 - DNA, 1705 bp, Cannabis sativa
  modified_base (1130)..(1144): a, c, t, g, unknown or other
ttttttttttttttggtaagaagtttctttgaggttgtttagtggaataagttgattgggaaaattatatatttggttctatataataaaaaatatatacgtggatgattatatttagatctatagcataggtagctaggtagagtcattaacttggaaataaggaataaagttagcacatgattgtgcaatgtgacaaaatgaaaggcgttatataaccataaattttcttatgtattgtatagccacattgtgataggcacctcatattatcaaattatgtaccatgttagagttaagtatattcttcttgaaaagtcataatgaagtttgaccatatatattataggacaattggaccctttttttttcttttttttttaggggcaaatgacaattgatttgatatcttaaattaaatggttggttagctagctaagaaaagaaaagagtagttggaatcaacaaatctctctatctttaatgtttaataaaaatacttcaatttgaggataaaacgcacacaattgtgaatgttatgacaaatccatgccattttcatttattatgggtattggatgattagatagttcttttgataagtgtattatatgccatttaattatgttgctatttgttttatccatttatggtataaaattttcattatcttttcatattcatataaatgagataacatgttattactgcaatttgtcaactatctcttatttttattttaaggaaatgatagtaaatggttccaaaacttgtaaaaaaaatagcttttttaaattatttattatttttatagtcttttgtcacataaatataattatatttttttcatatttttttttttttagaattagaagtaaattatttaaaaattatgatatgtttatattagtttggttaatattttttttatttgaaatttatgtcaattttttgtttaattttttatgagttattgtgggttgttgctatataaattgtgttgttcattatatttttgttttgttatatggtataatattattcttagatgatattttttttttattttactatgtataatagtggtatataattttgttactatatacaaatattttaatgtatgtatnnnnnnnnnnnnnnntgttacatatatttaattattattattatatattttagttgaatgatatattatttattttaaataatatttagttagtttctattttattatatataatgatgatatataattttgttgtcatggtatatatattttaattgtggtatataatttagttagtatagtgtacacatatatagtaatatatattttattattattattgtcagtatatatatattttggtgaatgatatatgtattttttgttatacatatattatttttttttaaaataatattaaattttatttttttattatacttttgttgacatgatatttaattttattagcattctatatatttttatttttatttattgttgttatatataattttattgtaaggtatatattttttgttatatgatatacaaattgtattgtattatatatcatatttttaatcatccatgtttagtttttattttattatatataaatgtgatatataattttgtaagtatggtataattattttatggttgtatataattttgttaatatggtatatacaa

SEQ ID NO: 20797 - DNA, 1954 bp, Cannabis sativa
aaaaaaaacaaaaaacaacaaagaaaaaaataaacatacaaacaatataaaaacaacatgaaaatacaacaatgtcaatcaatagttcgtatttagtaaaaaaaaattatagtctgtacgcaaaaatatttttctcttttgaataactgtacgtaaaatatttaagaatttatttctttaattttttgcttttttgatttaattatgaaaaatcctttcttcttcttcttctgtcttttttttttttttttggagccttggtattcaactattcatagaacagcggggatgggcctgggcctgggccagcccactcccacaagctcaggtccatattggcatacattaaccagcccattttcaatttaaacgaaaatggatacttatttttcctattaaccgtttcttttctttttcttcccatcagcgcagtgcgtttttctttttttcccaaaataattaaattaaaaaaaataaagaaatatttttctggtaaggattttctcagggcgaaccagtgaaatctccaaatcccaccacagagattgagggaggataagggttagcaatggcgtgttcgagcctgggtttaggttcatgcccaaaggtgcttgctttttaccaagacaatactttatttgtatttaatttcatgaatttcagagaaaattgttttaataatcttccattgcagactccaaaaatccatgtttattgcagaaaaaaggagaaaaacagagagaatttccacccttataaagtaatcgaaattacacctccccctaaacaccttggcgtccgttgctttcctcctgtaagtccctcgcttttcccccctttttcatattttatttaaaggcttattttgctgccaatgttccccatttgttgttaaatatttccttaaaaaaattaaataaaaaagcttccttcttttgtgtattgggatttctgcctttttgtgattgaaatgatgaaaatgagtgcatataataaaattgatgaaatgagtaatgagtgaggctatatcagtggataatgggtggagctgtttacagcctattgtgtgggacaaccaatgtacaaaaataatgtgagttgtgactatatagctttttaagatcatgacatgcaaatgtagattgacttcaagttaataaagtttagaactttatataaatttttataagaatatgaattgaaaaaggagaaatgaaaatggggttggtatcataatcatactcaatggttttgttttgcaagctctttgattgggtttgatacttctctctgctttaaggaagatcatctatggtgaatgacttcaagataatttttgacatgaatggatttcctattttagtaaataaaagatgccattgacatcattcaattcaccctaaacctaaatcatggagaagagaagatgatactaggacaagtgtacatttcagattgatggccgaccctgaaaatatgagcaaatcattgtgacaattcatgattttatcttatatttcttttatgattatgtactttttatttgattgattcaatacatgtgtgtggatgtggtggccttgtatgaatcctctttgattttccctgcaaaaagaattctcatccagagaaaaaaaataagttagtccaaacaattttcaatgatctgtcaatgttgtcaacattattctgtttggttcattaatggggattggtaggtccaacttaagttgtgagtttgggaacatataaacatgatatctctgctaggttgtttttcatgtttcattgtatctgatctgttgctttgtctacagaacttgcaatgtggggagagtgtgactattgaaggccaagcttatacaatctcagctgtaactcaccgataccagctccgaaaaggcaagtatgaacctagtgagaagagactagatgttttgtctacaggaagata

SEQ ID NO: 20798 - DNA, 5033 bp, Cannabis sativa
  modified_base (2206)..(2207): a, c, t, g, unknown or other
ttagatcgtgagaattaaactgaattaactatttgatgaacacaaaatgccatatacataaacgaaaactaaaatcaaatatgtagtaataaatatagattcccgtcgtcaacatgcactcaaataacaactcgtctctgtctgttttggggttaagcaaccaaaaatagacatatataatttgacttcatatcatgtgagagttgagtcatatataagttatcttgtgatttttttttttttccagctaaaattattttcaagattttagtaaattgatcttcccaaatttatttatactgtggattgaaaaagtttggtatattaacaaaatagtcaaatcaatgtcaaataggtttctatatatagagccaaattgaaattttaatagcaatatgcaaaaccaattgaaggagaagaagaagtataattgtacagcagatagacaaagataccctctcataaattgtagaagtgaactgtgtatgtggccctctcagattcccattgcgctaatgcaaacaaaatgatttttttttcttccctttctttttttctttaataaattaataagaagaaggagaaaaaataaggtgtctaaccaccaaagaataatatagaattataaaaaaaataaataaattgtttatgaagccgaagtggaaggtgcaacttccgtgcagtttgtcccattcagattggattgatatcaaatgaaaggcccataattatagactagaaaccttcgtgccatagccatgattgaggccgcctaatattttctctaccaaaatttattaattaaaataaaagataaacaaaatcatttactttcaactgttcgaccaaaattcttttacttccactcgggatctaatcatttacattaccaaaaaaacagtatgattgtcttgtgccacatcgacaaccaattcagagtgttaatattgttgaaaattacactttgattttttttaatcgatagtgaaaataaaaaaacaaatatatatgaacatatttggcattatttttcattttgattttaaatttttagaaaatgaatatagatgatagtgtttattgtttttaagataaataagaactttatggctaattatttataaaagatgtatttgacattttatttcatgtttaggcctgcaaaaagtggatataacgaataacttttaagagattacatgactaaacgtcacatttgaaaaaatttcacaagactaaatctaaatttaaaaatttgtggatacatacattgagaaatttatagatttttaaaatagatcaaaaaccgtaatactaaaaattgatacatattgatcgaaaggttacaataaaaattaaaggaagacaggtaaaggtaattttttggaagtgaatgaattcgaattttattgtaatgagagagaatggtacaaacagtttaggctaattagcaatttttccccccgaactttgacatatacctaatcatgccccctgaactttttttgccgttaaaaatttcccttgaactttgacatatacgtaatttttatttattattatattattattattattttgtgttgtttgttgaagtagtattgacatctttcactttaacatggaaaatagtgtaatttgaagttaatgtccccacgtctgtgtaatgtaacaatgttccaccattttaatattttgggccgacacttgggtgtaacccaacacaaaggacaaaattcctaattagttttgcatacatacatacgcatcatcatccccaattccccaccatcaccaccatcaccataacaaccacaataaatcaaagtttcacagctcacctctttcaaacataaaccaaattaagctaataccaaatctttttccgactccagtggcgatacatatggaagacacgtggaaaggtttgccatgtgggggtacatgtcaatatgtcatggcccattaatgctattgaccaaactttgggtaccttaggatttcattaatcaaataaaatactattactaattttaactaactgcattatattaacaatcttaattttatgaaagtataatttttacttaaaagtatatatttttattttctattttcattatacaactttattatagcatttcttattaataaaataaatcacacaaaaaatatgagaaattattctatatattatttttttaanntttttttttaaatttacggtttaattttttaaaataatttatatgttagattattataagattttttattataatttaagttattttcttagttgcaattagatactattaaaatgtcctataacatttttttcataaaatattattaaatttttaagcggaaggtgaggtgggtctatcagggcattgcacatgcagatgtgaaagattgaagaggcagcaatcaaaaaacttagcatccccctcctaatgtcacgacaatgtcaatgatagcatgaatttcaacaccaaacgacacgtgttcacttcccattggcttctttattttgttatcaatgcaatgcttgcgtcttctttaacaccaatttggtatagtttatatcctcttaagatacttgtaccagctttttcctctcttcctacactttaaaacccctcctcatagaagtagcaccactctcccactactactctaaattaaataattcccacaaaccatttcggctgaggctcagatctgagaacctcatagctatgggggaaaaggtacttaaaactacttttcattttatttagataaatgtatatttgttgtggttcaaaattatctttcttttataatctgtggctatgcttttttggatatctttttcttgatcttaattaaaaagaaacacccactattctactatactactatctcttaattctgtcagaacctgaatctattattctggcgcttactgtgtctcttcgcagattaaaaattactgaattctgtatttttgtctacctcctgaatattaatatgtcatgatttgattttttttttctttctctgttttaactttttgtgttatgaatttatttaaccacagcaagttgtcataatggtgctgaaggtggaccttcagtgccatcgatgctacaagaaaatcaagaaaacactctgtaaatttcctcgtgagtttctctctccaatgatatttctaaattttattttgaaagatctctctcattgttcggtatatatgttttgaacattttaacaattgaatagatttaattagtgtgagtttattatgtaacgaaaactgagttattatgtgctgtgtattgtgatttgtttttttgaacaagagaaatacaagaccaggtatttgatgaaaaaaacaacacagtgaccatcaaagtggtttgctgctctcctgataagatcaaagaaaagattatctgcaaagccggagactctcttaaggagattactatcaaagtacctgaaaaaccaaaggagccagaaaagcccaaggaaaagcccaaagagccagagaaaccaaaagaaaagcctaaggagccagagaagccgaaggaaaagccaaaggagccagagaaaccaaaagaaaagcctaaagagccagagaagccgaaagaaaagcctaaagagccagagaagcccaaggaaaagcccaaagaaccagaaaagccgaaaccaaaccctcctgcccctgcccctgctcctgctccagctccagctccaccaaaggaacccgcaccggcggcgccctgtactgggtacccaccatttccgtactatcgcacgtgctgctcggagtgctacggaggccacggtggtgggccgtgtgtaaatggttttgggggcccaccaggcccacccccatgttatcaatacgatgggtattatggaaggccggtgtacgatagttacggtggaggaaggggttaccaagtgaacaggtgtgagtatgtatgtgatgataaccctggaggttgcacggtcatgtaaattacgaaaaacggttacacctcatggggccaaggcgatagcgagcaatgctgttaattcatcgtgttattaaaagagaacaacaaaaataataaaaagacatgaaataataaattaaaatttgtaaccaatgttttatattgtctgtgatgatgatgatgatgatgatgatgatgatgatgagggtaattaattgagtctcgtatgtattgttaaatgacaactaaacgagaaattaaagtggtgatcaagctagcaatatatatgtaatgtgcattgtacatttagccatctcatctctaatgtgaaaccactttttgctttatgagtgatatttttctttgatttactttttcattgtggtaatgaaattattttggttttattgctgatgtttttgagtcgatgtagtcgtaatcgatggatcattatggtggattcaaatagttaaatatacatgagttggcgcatggattttttcttttcagaaaataattattgaagttgtagatttctttatcaatcatttccttcagttggtgtccctgctttttcatgacttttcctatttttatatataattgatgtttgtctgttttatttgaacctcgttgtcatggaaattaaaaaagttaaaatgataaggttttaggcacttaaagcatcacaaagtctaagattgattggtttataaatttttatatatgagatgatgatatacatatttatacaaacatcaattgtgaatcttctatgtctatattcaattcaaatctgatcattgaggaagactctcttcttaaatgattgttcacgtttcatttaaatattacaacgaaatgcgcctactccaatagttgtcataaacaccttataataaaattggttgtttgttacataattaaatttcttattgtataataacacattattgattttctatacttaatttttttttcttttttttaaaccaatacattttacactacaaaaaatatgacacttttttcaaaacccaaaaa

SEQ ID NO: 20799 - DNA, 11259 bp, Cannabis sativa
  modified_base (645)..(661): a, c, t, g, unknown or other
tctaaaatggtatttacccaaataatagtttttagaaaatatcgctagctaatcgcaacgcgacatatcgtaaaaatactaggcaccactggtgcctaatagcaatcctctttatattattattctttcttgaaataataaggctaataaagacaaatatataataactcttctctcttcttccactcacaataaataaactctttattttcctctctctctctctcttcttctctgtttgtgggtctccatattttctcaggtcggtgatttaattttaggaatgactagataggagtgattagtcagtagtatagagcaaagtaaaaccagaataataagaagagcaacggtttccttcttacaaatctcttgttttagttatttcttttccttttttttttttttttttatcaaagatgggagaaacagaaaaccaccaccaccaacatcaaaaccacaaccacaaccataaccataaccaccagcaaccgccgccacaggtggttgctcctccgatggcgccttcacttcctctcggagcagcaaggggtcccacttgggttccagctgaacaactccaacagcttcactattgcatccactccaatccctcatggcgttagtctctctctctctctctcnnnnnnnnnnnnnnnnnatatatatatatatatgtttttaggatctgggtattttggatttcggtttttttattcagattcatatattgtattgttattttttagttattcagctgaaaaagattcacaaagttgagcctttttgtgtgtgtgtgtgaataaatatacatatatagtatatgttcttctttatcatttttccttttgatgtaaaaaggtgtgtgcttttttcttagtgttagtattattttatttttctttcaactgcatgtactcttagtcttagtcttgtgagtggggttgccgtgaggatcttaaattaccagatatatatatatatatatatatatatattggtttcgattaataaatacttttaattacaacttccaatcttttatatatagtttaattattgtgaatatttttgtgtggtagctttagcttagcttatgaaactaactaattggtttctggtattttaaattaaattaataatattgcagcaatagcagttattctagctttccaacactatattgtgatgctggggtctatagttctggttactaacacacttgtgcctcgaatgggtggagacagtgtaagttatttaattaatccaatatgatatattgttatttttagaaagaaacagaaaaagaaaaggcattgatcatcatgtaaagttgacatattcttggtttgttgttgttgtttgtactgaaacagggtgataaagcccgagtgattcaaacattgctgtttgtggcaggaatcaacacacttattcagactatgatggggtccaggcttcctactgtcatgactgcctcttttgcttttacattacctgtcttatctatcatcaatgacgtttctggtagggaattccaagatgagcatcaggtatatataattatatattgtagacatgttctgcttcaattattgatgttgatttcttactaaacatggatatttatatagcttcataatttcaattttgatgcttgcagaggtttcgttactgcatgagaactatccaaggttctctaattgtctcatcctttatcagcatgatacttgggttttccagggcatggggaaatttgacacggtatcaatcatattcttctctctctctatatatataaatatattactttcatctaattttcataattgtttagctgaacttcctcacaatgatttcccctgcagcttattcagtccaattgtaatcgtgccactggtttctgttgtgggacttgggctctttgcaaggggattcccacttgtaatgtccacaaaaaacgcttttcgtgtcttcataacataacataacattattaaaagcctttaataacactttttttttgtttctcctttgcttgtatgcagcttgctaactgtgtagaaattggcctgccaatgctgatattccttgttatatcccaacaggtttgtacaaatttgcaatttgttaaaaaacatttccccagcaataaattaactttaccatgttccgtttcagtatttgaagcgaatccattccacggctcatcaaattcttgaaagatttgctttgcttttctgcattgcgctcgtctgggctttcgctgctatcctcaccgttgctggtgcttacaacaatgttaagcagcagacgaaactaagctgccgtacagaccgctcttttcttatgtcatctgccccttggtatgtcaagattattactttcctagctaacaaacagagttgttgtgtttcattctgcaaaagggtcttcttctcttgacactgttatgatgtttgttttgatcatccataggatcagaattccatacccctttcagtggggtacacccatattcaaagcaagccatgtctttggaatgatgggggcagctcttgttgcatctgcagaggtttgtcttaatttcaagaccaaattactcatagaaagaactcatgaaaaataactagtctgctggctattttcttcttttctggcatgtaattataaatttcgatgcagtcaactggaacactttttgcagcatcgaggctatcgggtgctacagcccctccagcatatgttctcagcagaagtattgggctgcaggttgctatgatgaatataattgttaatattttactttacaatcaagaataaaaatatggggctctcaactctcaactgaatgtgtccaaatgcagggtgttggcatgttgattgaaggaattttcggtgctgctgttggcaatactgcatctgtgtaagcaaacagtgatgattgtatttgatttacctctaaaccattttctcctctcctaaattttaatggcaatatactcttatttgattgttgcagtgaaaatgttggcctacttggattgacacacattggtagcagaagagtggtgcaaatatcaactgctttcatgttcttcttcgccatatttggttcgattcttttgtttctacttctttacaaaaaaaaaaaaaaaaacaggttcattcgttttgtttgatcatctttattcattcatgtctttttgttttttggtttccaggaaaatttggtgccttctttgcctctattcctttaccaatatttgctgctatatactgtgtcttgtttggcattgtcggtgagcgatgtttctgatgctgctgctgttatagttctttaaacatataccgttttccgtctacttttctttctcaaatgctttctattgagttcttttttactataatctcttctttttctttattattattgtatatttgcagctgcttctggaatctcattcatacaatttgcaaactgtaattcgatgagaaacctatacgttttaggccttagcttgttccttggaatatcaataccccaatattttgttatgagcactgcttcagatggacatggaccagtaaaaacagatggtggatgggtaagttagttaattatgcttgcttgcttttacccgaacaaaacagttacgatgatgcgcctggttgggtctcaccattctgtttttattccttcaaactgaacatacactcaagagagttttgtcatgagaaaatatgtgtttgtttgtttgtttgtttgcagtttgatgacatattgaacacaatcttctcctctccaccaactgttgccatgattgttgggacattgcttgataacacactagaagcaaaatatgcaattgatgacagaggaatcccatggtggagacctttccaaagcaagaagggagatgttagaaatgaagagttctacagcttacctctcaggatacatgaatatatgcccaccagatttctctaaactaataatcatatttttggctctgtatattactacttttcttttttggtctaccatctttaatctgttagcacaatgtttgagcttttttttaggttgtgttgtgtgataagttgtaatcaatgaacactttgagcttttctttttcttatttccttcttcagaacttacaggactttaaagagtctctgaaaaagaacactaatattattttggtctctcattttgaaaatgactcctgaaattttagaacccattaaatatcatatcctagttagtgttataaatacaagtggtaggctgtttcggctcacatttattcgtgtttttcaaaatgcgtcgcgtaaaaaaatataaattgtgtcgttctgtgctaacaattttaaagggtagatttgagatttttataccgtgcttgaattcgtaccatgcttatgtcaatctggtttttttatatacaagttcgaattcgtgttctttatttctttaaattttatttatacaattaatatgataattactagattgttagtattttttatagtctcaattgtttttatataattttttaataatattttataggtaatcatataaaaaaattataaaaattattaaactttaaatatttattaataaatacttaaattattattactattataaaattataaggatctaaacataatatgtttttggacagttcatgtttacgtgttgtgcttgtcatgtcgtgtcgtatttaagtccgtgttttttatgctatgtcgtgtcaatttgtagtattgtgtttgtcgtatcgtgcctagtcccatatttttttgtgtatgtgctcgtacctcttaagcttgtgtttgcttcgtgctgtgtcaaaaaacatagttcatatttacaacattaatcctaattatttttaattataatttttttttcttttttgtcgttgatttcttgggagttgatgaaactatgattagtgatcaaaatctaagacattttaggaccaagttagacattttgaaaatcgatccaatccaataacaatcgatatatctaattacaatcgatcgtcaaacatcaaatattcaattatgatcagatcggattgggtgttatttttaaatatccaatcgaatcgaatcgggtgttcgatgaggtgtccaaaatccaatacatccaacatccaatcaaactaattagtattttcatttagtttggattagtaattagattttatgttgttatatgtaaaaaaaaatatatatatctatatataaaaattaatattaaaattttactttaattttaaattggatagttccaattcattccaatagatactgaatttaagatacttgatggatttgatccgatccaataaatattaagtttaaaatattgaataaatccaaattaaactaatagatatacattaaatatatttaatggatagaaccaatccaatctaacatttattggatgttggattgattggacgactaaaatttattagatcagatcatatgataaaatttatcatctattatataaatacatcaaatctaattaagcctaaaaacattcgatgtaattccatgaaaatctttatttaaaatgacatgtatgtagtatagaatccttttaacataacatggcccttatatattagtctaccaaccaaaaaaggtaggaaaaaaattaaataaaaatatatttatataaagacaatgggaaaggaagaggtaagaaaagtttggagaaagtggagagagaaagaatatatattttgtttggttggaaataaaagaggatatatttatagaagatgaatattggtgtggaaaagaagttattggattttggatcccaccaatattttttctaattttgagataaatctaataatatttataatcaaaataatacaaaagcaatcttattttaaaaataataattagtaaattgactaaaatatattactaaatcaataattctattgataaaactttaaatttgtaagtaatactacttagtactaattaaatcctattgtaatatgattaaaattttaatttctaatttttaaaattatattcactttcttttggaagattgtatttaatagaatcttcacgttgagaaaaaaaaattaaaaatcatataatataataagtttattgtatttttttaataaagctttagctaagataatacagaggatattcactttgtttccttttcacaaaaacaggaaaagtctatgctgattaagccggcagagaaatttaaagcactccattgatttttttttattattatttatttatttattcaaacatataaatttgacaaaataataattttctacaagtacgagtatactattactaatactatccatccaaagctgccttggaaattggtacatgatcatatataataataatacaataaattggaatatataatattatgatgatgatagttgagtaggcccagcttatttttaagaagcaaaaatggctacaatatctttttaagtaaatcaatgtgaaaacaaataaattaaaattgtgttagccatcttctcttctcttctgcatcatatttgataatttgaaagccaatattttggacgttttctgaatttcaaccatttttatctttaaatatataattttctttttttgttctctaatccctatcaaatcaaaaaatacgtcaccccattaaaaaaaaattgctaataataaattaacaaactaaaactaaagtctaaagaagaagagaaggttcactgttatttctcactacagttatatggcccccacacgttttctcttctctctcaaatccgcgtatagatattattattattgttctgttttttcaaagaaaataattatagataatcacagcccatggtttttatttatttatttattttttgacttaaagtgcacgtacacatgaactgaaagcattataaagtaattccaagtcttcccaattcagttcagttcagttagttgcctaggtcgtcttcacttcagtagttaaatgttgagttattgactcataaattgggaacaaaaaaaaaatggttttgaaaaagaaaaaaacacatgcatatgctttttagcctaaaaaatgtctttcctagtagtgctctagaccaaaaagaaagtcttctcttccttttgatgatatttttaatctcagtaggccaatgaggaataattatatagtccaactttgatgaagttggtagcacagtttctaaactatttttgtatgttagcaagaatattactaaaggagagattgttattccaatactaaattaccaatcaacatggaaactgttgaattataattatttttaccatttttacataaacataatggaacatacaacacaccttctgatctgatcaataagctctaaatttatttacaaacaatatacaaaaaacataagatgactactcgtcaagccagtctaggctgtactgtgtctcagcaacctgaatgtgtagattgggcaatgccttcttggtactctcccaaagccaagagacctcgtcgtcacagatcacgtgacgaagagactgtggtgaagcatcaaactttggcaagctgttgaaccttgaacactctctcatgtcaatcttttccaagcttgacaatctatctatcccttgagggagacgagacagtttaagacactgagaaatgtcaaggtacttcaacccaagtagctcacagattccacaaggaagttcctttagttcagggcatgcatataacctcaagatttgtaaagtcctgagttttcccatatcagcaggtaagtgctttagattgtggcagttggtgatactcagtgtcttgaggcgctgcatctcacaaatggttggagggaattcaaataaatcctcacaatgatcaattgtgagttctaacaaggaagggaatatatgaggcaagtctaccattgactgctcaaagctatctttgatattacagaggattacagataacttcctcaagtatttgaggggaagagtggaattagataattcaggtacagaaaccttttctagccaaagactcctcaaattggccaaactcagaaattcagggaaatttctaagtgtggcattagctgaattgtagtttataattatgagtgcccggagcttgggcatgttgtccaagaagcttggtaaaaagtactgcttggatgagaagttcagtatgagaacttcagcctcaggaaactccatttggaaccagtccatttcattcatttcgcctgtaaacaaagtgttaatttttcttttttcccttaaataaggatgaaggtaatagtagaaaaaatattacctgtatggattgaaacaatccgagcgttaaatggctgctgtgaattcctctcccactctttggggacagccatttctctccttggcataagcaatcgctcgcgctggtttatatggtcacgattgcttatatggagagcaaggtccctcaacacatcatgctgagtaacagcaatatcatagtaactgctgtatacatccccatctctgcaatagatcaaatcaaacacagtaaaggattggtcacataactaaaccgatataagagataaaaaatgagtttagtataataataccttgaatctttcacaagggtaagtaaatttttgtttgcaagttcaacaagaattgcaaaggcttcttcctcatcgatatcatgtacttcaacccacatgttgatgagtacatcaagaggtatcttcttgtcttctggaaatgcccccaaatccaggaaacaccgtttcactttatcatcaagccatttaacactcatctccatcctcacaaggagttcgttctcatgggagtcattaataggttccccacgcgataaccggttcttggcgcttgcccaatacatttctggttggtcccttaacgatgcaccaatgactttaagagccaagggaagccctttacactcattcacaatctgaaaaaaagagcgaatataagcaagtactcaagaacccatttgagaaaaacaaaaaccatgagagagtgttcaaagtccaacagtacctgcttgatcaaatttacattagcaccgggaggtattgttttttggccaaaggcagagtggcaaaacagagagatagcattgttttcccttaataactcaacctcgtaagtgtggttgataatggtttggaacttgaaacgagaaacgactaaccatgtgcaaccgggtattttcgaaaccaaacgttgaagctcagggagtgaccacacatcatccaaaaccaccagagttctaacacttgctctccaagaacattgcaggttccactgtggaacgacgtagtttgggcccagattttcgttccccgaaagatatccccaaatgctcctcaatagattatccacattaggagattgtgaaaccgtcaagaacaaaattttgtcattgaaataagctataagacacagagttagaagaaaaccctcgaaattcataatgagttataagagattgaactgagattgatttttttacttacttcgaacctcgtcatctctgcaaatttctttagctaaggtggttttacccgaacctccaattccacgaatcccaacaacactcgagttgttcccaagaatcatctccttgaccttcttcttccccaaatccaaaccaaaattgatcaaattcccctccaagttcatctgattatcctcctccactttcttcaaagcttcctccatccacccaccggtttctccaccgccaattttcatggagccaagcctctgttcaatctgctcgaacctactgtctattcgctcgagccccctgtccattcgctcgaaccccgcgtcgctatcgaaccggatgtggtggacgtcagccaatatattagcctgaaaaggaccctgcataaactgttggacagtcttctcgagcttttccatctgacgagtcagcctgaggttcttatagacgttaaatcggcctgtcttcaggaccttttgagctagctcgttgcctttctttagagtgacggagaattgatcgagctggaactgacgatggggttcgagctcaacccctatgtacttgatcccctcaatggttgggaggaaagaattaatgtaatgaatgaggttctcggcgcttgatctgcaaaagcaagctttacggactatggctgcgagagtcttgagaagctccgtggctatctcgccggcgaagaaatcggtaaccgccatgagtggttgttagagtagagaagaaagaagagaattttggaattgggagtgaagaagaaagccaagtggaattggttttttcaattcattcttttctttcttctacttctattcaagttggcggtaatatatcactttctataatatataaaagtttagactaatatttttctttttatttaaaaatttaccaaaattaggtttttctccttttaaactttaatacgtgctgaacttttttggcatttagtgtgtttttttttttttaactattaaaatttaaagatttttgtaaaattttatttaattttactaattcagtgattgtttatgtactaaatcgttaatatctaccaaataatgtctctcaaactttgatatatatcaaatcgtgtttcctaaacttttattcatgttagatttttcctactaaattagacaaaaatctttaaatacaacaatctcaatagtttgggagtgttttaatgactttaaaaattcagagggtataatttagtacgtgtcaaagttcgggaaacaaatatcctaattagcccaaaacttatgaaacaacttattttaatcatttttattttatataaaatatatctcttaatttttaaaaatcacttttaatatttctttttattttttcttctaatctaaattcttaaaaaatatattgataccaaaaataattatattttaaatattataataaaaaataataaaaatgaaactaaaataagtattaaaattattacagtaaaaaaattaaaataaatattaaaaatgattttcagaaatgattttaaatttatttttttaaaatattaaagtatccttatcatagttttttttttgagaaacttacaaaaatactggaatttaggttaatttttacaaaaatactatcacacggaacaaatttcaaaaatactgtgtttttat

SEQ ID NO: 20800 - DNA, 1921 bp, Cannabis sativa
attacatatatttgtttttatatgaaaaaagaataaaaatcatattataaaaattggtgactttataatatatagtgcggtgcggtttgaaccacaactataaaatttaaaatcgcaaaccgcaccgtaccacacagtttgacaaaaatacaaatcacaaccgcaccgtaaaagatttcaaactgcattaaaatttctatacaattcttaaccaagtcaaagaagatagccatcatacactgttggaacgttgttggtgcattacatagtccaaatggcattcttcgaaaaataaatgtgccatagggacatgtcaatgtcattttctcctgatcttctagtgcaatagctatttggtgataccctaagtaaccatccaaaaaatagtaatactcctgacccgccaatctatttagcatctaatcaatgaatgaaagggaaaaatggtattttctcgttgccttcttgagcttgctgtaatcaatgcatattctccaaccattgaaagttctagttggaattaactcatttttagtatttttcaccaccgtcattcctccctttttaggcacaacttgaatcgggctcacccacttattttcaaaaattgggtaaggcgctcccgcatcaagctactttaccacttcctttcttactactttcttcattgacggattgagtcttctttgagcatcaatggttgttttgactccatcctccattaaaatttggagcataactgttaaggggacgatccccttaatgttggccagtgtccacccaatgtcctttatgtgtgctcttaaaactcttaacaattttcagtctccacatcagaaaataaggctgagcatcgatcggtttgatcgattttttttttccatacaaaaatttaaattctggttctcggcttgaattggtgcaatccaaaaattgatcgaccaatccaaaaacttccttagaaccgactgatgtaaaccgcggtttgatcggttaaatctgtctaaaccgaactttgtttttttttttttttgaatctataaaataagggttttttttttgtttgttgtcaatttcttctcttgcatctcttctagtttatgttccgcaagaattaaagaaaaaaatgtgtgagagataaatttgatattttatgaggaaagataatgaatatcgagagagaaatatttactaagattgagtgatggaggaaagtggagataatacttaaattttttgaagaagtaagatattatcttgatatattgtgagttgttagattaagattgaaaaaaaaggcaaagagaatagcaatagtatatatttaatttgtagtataaaatatatataactttaaattgatgagatatatataatataaaaatcaaatacatatataaaaagtaatggtaggtttcggtttttttggtcagtttgttaccaaaataaaaccgattattcaatggtggttttttcagttttaacagtattccgtaagtcgggttgaatagttttttcaatttttttagattttatactccgccctaccagaagtgaagccaaaactataaccgaaagtgtttgttctcacccacaaaatcatacctcaaatggtcatgaagtatttttaactctagcttcgatggcttctcaattgaaggcaatggccttagcttttctaaatatttcctcttcaatgcccgtaagaattaaactctaactttaaaggatcatcaatcatttttctttcttccactaagttaaccaccacatcaacttcaaattgttcccattacactctcaacttcaactcatccttttgaataagtaataccattaatattgtttttctctaaaaaaaatgaaaagaagtagacgtataattaatcagaatttatgtgataatatgtaaatatgaatt

SEQ ID NO: 20801 - DNA, 3156 bp, Cannabis sativa
atatatataatagaatatacaaacttacttacatttgtttctgatcaccttttctatatgatacttcaaaatactctgcagctgagtacaattgttttctcatattcttcaattccttaatccaaaaaataaacaacaacattcagtttcttcatatattatttcctctatatgtgataattaaccaaacttaaatttttactttcaaactgtctgaaaagatcatcttctgttgcatatatagttcatcatggtgtaaaggctgtggtgatgaagagcttaacatctccatgtatggctaaagaaaaaaaaaagtgtcaaatagacccaataataacatagaaaatgaattaagtaagagattaaactaatgattagataaagaagatacctggggttttcttgttactaatcttcaactgcaatctgagttatttttcccacaaactcaaaactatagtcaacaactaacaactgcattacttaataataagatttctaacaatttataaagagatggttactgagaagtgacaactatccaataatagtttgttttgagtaaatagtttgaaacaaaaataattaaccaacttttatactaattattttaagtgaagtgtttagtgatggtgtctttcacttttttgttgtaatggagaaaattatgaacctataaatataaagccaagtgtaaaccacattttggtgggggtaggggggcctctctaggagtagatgggaaagaagggtatcttaaaatttaatcacatttatcatataaagtcattgtggggatggctactttgcctgccaaaaatttaattgcaatttcatttcatataggtgtatatatcataacaataagttagataaaaatatgagccaactactggactctttatattatgaagccactactataatttattgtaggaattcaaaatcccacctgcaaaattaaattacttgcactgtttttgcctttcttaatggcctaccatgaatatgaatctactttttctttctaatgttactatcttttcaagcaatgtaatctcttattgccttttcataataggaaagtaccacaagttggaaattggagatgactttttgaagtgagattgagaatgaaaaggacaattatgatttagagagaaaaagacaagatgaaattcattaagaagaacttcaaagttatttgacagttgagaattcatggacttatttatggtccatattcactaaacatacatacttagttttctctccattttatcttctataatttaagaaagtcattcaatgtgcaataattgatctttaattctcgtgtgagaaaatgacaaatcaacatcagaaattaagctaattgataattgaacaagaaaaaaataacttgaattgaactgaactcagtaatatgaaattcatgcttggtgttggtatggtttttgctatctaaaaggtcatttcagaactcaataaccatttttaaggaaattaaagtggatggttcgaatcccaaaagccccgccatggtggccaaattgaaattacgacggtttaacaaatcttttaagctctgtgtggggcaccaaggaaacaatttaaagatgatgagtatcgagtctaaacgacaatcaaatgtgaatcacgagtggtttgcgtttacacaatcctctccaactctcttgcataactgagagtctggttgatgagctgcagggaaggtatctccttgcagggtgcagattcttttgccttctggaaaatcaccaaaccatccttaacttcccactcggggtgctcctgtgttcgtaaagatatatttcaataaatgtgtctcacaatcaacaaagaacaataatgtaagagtagcacgaagtttacctcatcgatatacttcagcagttcttgttctgaagtgtacaacaacatttgacaggcatctttgatcgaaagaaaatcatatgctttctcactgcatccagctatttcatctctgtaaaaatacagaacagatgataaaatcaagtttcgaatataaaattgccaggaacattcgcttgatataataaattattatgggggattttctactccacatatttgcaagaagataataccatacctaactgtttttgccagaagatccatgaaataaacataagtctcatgtggcactgtctggcgagcactcaacacacgattataagccccctccatgaaagactgctccaactccactgcatgtttgatgcatgggttctccaaagctgaagatgacagcagctccaattctgtatgaaactcagcgattctgttctgcacgaggagtctcaacaggttgagacctaagattgggtgctcttgagaagatggaggtaatcggttcctgccccaaccagaaaaagataaaggaaatttcaatagcgacattcagaataaggaaattgatagaaactcatgagtaaacaaaaaatagtaagcagcaactatgatatgtttctcctctccagtctctttattttttggtttaatatcatggattgttaatttagtttttccaaacaaacaataaaactcaagaatgtgctgagctaacgattataacaaattaccgggcatctgtgtaatagggtttcaactgaaagaaatctctctcgaaagcatcttggtcctcagtctttacactcagaacaacagcatgctcgtatatgtcccctaatagttctcagacacaaaaatggtcattagaaaataatcaaaagagatgacaacaatgacaactttactatctatacacaaacacaatcatttaataattacatatagtaaggacttttcaataaactctggtaatcattctccttgatggaaattggttttgtctaactcaagtttaaataagatggacaagtcagtatcctaatgcttcaagaccaaacatgcttagtctcacataatgaagataggacagatcatcttactaccaacagaatattcatgaaaataaaatttataaatatgaaatccactacacagcctcattgacagtttctatcataatcaagcctagaaccattgaaggatctcgctacacactagaaagatgttaatcgccatattggaactacctaccatgaacct

SEQ ID NO: 20802 - DNA, 2414 bp, Cannabis sativa
  modified_base (2258)..(2259): a, c, t, g, unknown or other
ttagcctaacaatcataaaagtcttctcgctccaataaaatatagtgcaagatttgactaatgatcaaacatcaagagatgctcatgttacaaaatagtctctcgtgaatgtgccatggagcagcacgccacaacaagtgttacttatctcgtagtgggtgtagtgaagctttaccaaataaataatagaaaaaagtttatgcattccaatttatttttggcaagaactttcatgagagtacaaatgaggaaaatatctcaaattatgatcaaagaaaggaaaaaaaatacattttatggaagaaagcgttttccaaaatatagctataaccaaccaatatactatgacatattcaaccaatacgaaaactcttcttcttaatattaataaaataaaataggaagttatccattaacttataatgacataaaaataaaagaaattgaataaacagatagtgccactcacatgacccaaccatataacatggaatggtgtaaagctatatgcgtgacctcattaggtgttcaattacgacaacaacagtcttcctttatttcattatatgtatttactagaataaacacttataaatcagtattattgaataaccaaatgtcttagtatcaataatacatagtatatgttcttccaataataataataaaaaaataactagtatatatttttggagatcatattaaaataataaatgaaaaagaatttgggaagtagaactggatacagcacacacacacactctttaccgaaagcgaaaaagggtaagactattcgtttcgtggaccaaacacaaattcctctcattctattttatttatttatttccactatgaatagtaaaaaataataaataattttagaaatttttgttgtacatatattttagtagataatttatctctttcagcataaaattttttaattttttttaatgattatatatatatatgttgtaatcatgaacggatccattagtattataattcctagtaataaaattaaaaatattatttgttagaattaaataattataaattaaaataataaaaaagtttcagcaaaattaaataaatttaataagagtaactataacgtaggtataaatattttttaataataagtccttacaaagtaaaaattttattatctataaaattttgaataacttataattgaaaaattaaaattcaaataatcaccctcttaaaagcgatatatcgatacatctctttctattttagtatctgaaataatttttctgtcaaattttttctcatgatcatgtaaatcatagttatttaagacatcctgcaaaattttaagaaattggtattttttaacttttaaaactagcttaatatatagttaatttactattaataaaattgcatgatttattcaaatataaataatttaattaatctttattttttctaataaaaaaatcatttatatccataaattattaaaaataaagaatttgatgttaaagtatctaactagtactcaccaaatgaattcatcaagaatataaattttaataatcgcataactaaagacatttatttaaatttggtatcaatttattcaaatgtaatgtggagctaactcttcttacacttcttttctctaactattataggacaatatttttaggttataacctataaaataaaactctatttccataataaaagattaatttttgacatagaaaaaataaaattattgaaaaattaattataaatatttcttttttcttctatgtagataatttcttttatgtagataatttctgtaacatacaatagtatatgcattttggaagtttgtttagttttaatctaaaatttgatagttggcccccctgttatttgaacttggctccgtccctgattgcacgcatgactattttattttatactcgtgtaaaatagactgtttgaacattattttctatattgtaacttatttcaaatctttcaaaattttataagatatcttaaatagctataatgtacatgaatatgaaaaaaagataaactaaatttttttttgaatgccgaaacaagtaaaaggtgcatcagtacatccctttttttaatagggtatattatagaatcaacctaaaatatattattttagtttttaaatttttttttacatatattctaaataattataagacaatacaatttttttttttaaaaaaatattattattatcattattattnntattattattattatattaattaattatggtgtacttaaaactaaaagctactatgaaaaagtaaacacgcgccaggcgccactgggaaacatctaaccgttaatactaagctactctttcccggtttccacgtcagcttcccgttcattgctat

SEQ ID NO: 20803 - DNA, 3099 bp, Cannabis sativa
cttgaaaaaaaggacagtagtgctaatattctttatttcatttatttattggaatatccatccaaattccagggagagaggattcttaccgatagacacaaaacacagagacccataacacgagccacctctcttgccattcaatccgccattacagtatctccttgctctaaaaatccctcttgtctttttatattacttttatttgccctacctttgtctttaagagtaagtgaaccgccattttaagccaaacccatctctctcttcctctctacttgtctctatctctcttcggagtttcaacgctctgtttggggcattattctataattttcaagaggggtttcgtacactctttctcttaacagcacaaaattcactctattaaactctaccttgttggctatggcttccttcattccaatttctcaatcccagacccttttcaacaatacccgtctcagaaaactccctcccctgtttcttcccagtcccaatttggggtccgacttcttagccaagtctggttttgtacggtttcaaaatcctcgtgggattacaggattgcccatgaagaccgccaacgtcgtcgtttcggctactacggctgagaagccaaagaagcggtacccaggtgaggcaaaagggtttgtggaggagatgagatttgtggccatgaagttgcatactaaggaccaagctaaggaaggtgaaaaggaagttaaagagcctcaggagcgacccgtggctaagtgggaacctactattgaagggtatctgaagttccttgtggatagcaaattggtttatgatactcttgaggagatcattgagaaggcatctgttccttcttgtgagtactttctctctttcccttttaaataataataataataatgaaaaaaaaaattatgctttgtgggtaataggtcttgtttagcttaaagcttctttcttgaattagtgctgatgacatataatttggtattgataatcattgattgcatatatgcgagtctcttatttattggtctgatagcagtttatgactttatgttattggctattgtgggtccttgtatatgtgatcttagtttggatccaaggtttgttatgtctttgtcataaatggctctactgttctcattggatgttttttttttctcattttcatactttaacattgtcagacatagtcctaccttaagttcttgttcttcagttgttgacatggtatattccaacaatcaaaacattcctttgctgttaggattagagaactgaattatggtgagattctggctagctctcatagttgagtttgcgagtgtgtgaattgtgcggtgttcaagtccggtaaatgatcttattaaagaaaaatagtagaaatatgatagaatgttcattctttcacttacattatatgatctttaacttcagatgtcaattacataacatcattaggcttccctaggatttagtatgatacacgaaatggactttgattgttatcaattgagacatctgcttaatgattatttctaaggtaggatagctcctgagagtggcagtaggtaatgtgtcccgatttttcaactatcaagatgtatactgtcgtggactcgtggtgactttactatgatacagctaacataccagctttgctatgtattcttatttttatacagatgctgaattcagaaatacaggattggaaaggtctgaaagtttggctaaagatttagagtggttcaaggaacaaggctataccataccagaaccgtctggtcccggtattgcttattctgagtacctcaaggaattatcagagacagatccacaagcttttgtgtgccacttctacaatacatactttgctcataccgcaggtggtagaatgatagggagaaaggtatgcaaaaaaagttctattgtatcaaaatgtttctttgtttcggtgtcatattcctgctcagggttaagctttaagctataacttcatcagaaacaaattgtttcacctaaattacggtttttgtcttctattaattttacaaggaaaaacaaagatgtcattcattcaccaaatattgaagcataagatttcttgttggcatccttttctttgcattaggtggctgaaaagttattaaacaacaaggagttggaattttacaaatgggatggtgacctttcccaattattgcagaatgtgagggaaaagcttaacaaagtagctgaggtacttgtcttttcttgtacccttttgaaactttaatcggtgtaggggtgtgtatttgattggtaaaacataacttgtatggtatggttttctcagagctggacgagagaagagaagaaccattgtttggaagagactgagaagtcctttaagcactcgggagatattcttcgtctaatattgtcatgatttgtaatttaatgctgctgttgttgactgttgtaatggcgcaagcctaatgtttattagaacataccactgccatgccagtggagacttgtattatactcttgtgcatattataatggcgtcagtaaggcaacatatacataaataaatatagaacttatttttctttctttccaccaaatttctgttcatttcttctttgttattgtggtgatttgaaatcaccagtcaagaacacagaaacaaaaacagaactaaaagaaattataagctaatccaacaataaaaagggaaatttacaagaattgactaaaaagctttcctatttatttttttaattaaatatgtattttttttcttttttatctttttctagttttctttttacttttatacggtattaactagtttttaggataaaggttgacacatgtgggtccagtttgctgctggtggaaggaggacgcgtcacttggcgcgttatgcaagatttttctttttaaaaaattaaaaaaagtaaatataaaatgagctgagaaaaaaatcattggataaagtaaatatctgatcattgttattttttttagaacaattatgattgaaaaagctaaataaccacaaatattattcactttaatattttactattttttttaatttatttt

SEQ ID NO: 20804 - DNA, 3319 bp, Cannabis sativa
caatgagacgccaatcactatcttttctatttttgtttttgtccttctcttttggagtctcaaattattattattatttttccttcaaattttgtcaccattgaaaagtttgttttttttttgttaaatattgttcaaacataagtttataaacaaagtcaaatgggtgaattcaaatttcgcgatatgagaaatatttaaattcatgtttgtatttttcaaaagaagatagcaaaaataatgttaagaaaattggtattaaaataaaaaaacactaccaattgagttttaaggtagaagatattacatttacatgcactaatactagggagagtgacacactttctggtatggaactaataattgcacactacgtttacaaaaaaaacaccaatataaataggacttccaattagcatatctatatttttaaattaaattatttacttttcaaaataggattaaattaaaattgtcactttaatatgtcagttaaatgagtcagattaaatgatgcaagagagtctttctaccattttttttttcatatctcttcttcactttcaaccatcctttttattgaactttttttttttttttcactttttattatcttttatatcatatctttttcaaagagggcgaggtatctcctaccattgatgcatgcaaatccatattcaactttttggatcattaggcaaaataagtgagattttctatcaaaatctctttcacaattgattgttaaaatcatgtaatcaaattagataacaaattaaattgtgaccatcaataagaatactttttttttttttttaagaatatgtgagaatagcaagattcagatttttgaatctgaatgcacatttgattgaaatatttaaaccgttcaattttttaacatatgaatgtattttttattttgatgtttcaaagaaaaaagaaataccaaatatatatatttttttgaaaaaagaagtaaaaaactaattttaataattctatgtcaagtcactaggcatgcatggtttgagtgtcactcaacgcatactatgttcaaagttactcaacatgcatagtttagaagtcattcggcatgcatggttagaatgtcactcgtcatgaacattgccaagtcactaggcatgtatggcttgagtgtccctcgacatgcattttccaaaatttcacttgacatgcaacttccacaattccatgacgacataactatacttaatcaaattttccagagtaaggaaaatgaaagagtatgatagcaaggacaaggtgcgcatgcgaaatgtgtataatcacgctttctacaagctttgaaagcaaggaggtaggagaggcaccgtacctgcaaagcttgatagcccggccaagggtacatagcagtcaccactcctgcaacctaggaccacttgatactagaaaaaggtataagtcgcaatgccacatcctgcaacctacaattcgtagactatgagtgtcatcatgtccctagagaccaatattgtgtaccaggatattaaagcctataaatatcctattctcagatgtgagaagaggttagaaaatcagtcttgtaatcaacacattaaaagcaatagaaagaaatttttctctcaactctaaaatttcattgtcatttgaatttgcacttcatattcatcttcatcttatctctgacttttaattttaaattttttattctttggctaaaaagtttgttgacgagttcttaccgtcaacaatttggcattgtccgtggaaaggacaggctaaggctttgttgtttccttatacacaatcattgcaaaatgcctagatgcacacttcgtctccaagatgtaggggttttccttgatgacactcagctgatcacttcaaggcaagacccaccatcacccgtcgctggagaagaaggtgctaatagtcacatgcctcaacaagagaagaggatgtgaacatttgcatgcctcaagaaggagagaaggtgcaagcaggcgaaggtcttaatcgagacaagaagacaaccgtcgtgaggaagtctcgatggacgaacaacgtgatggggcgaccgcttccatcacacctgatggtgggaacaggtcacaaaggcaaatagttctttttcctataaggcaccctccaccaccgatactaaaagatctagaacctcgcaccataaatcaagaaaagagaaatgagtttattcaataagttcaagctcccaaacttgtattcataatgaagagataaacgagctgagaacaaacaacttatagttgaaagaaactactgtaaacatgcaaaaagtgctggagaaattcctaaaaggatgctcttatgcacctttgatctagcgaagagagccagaagttaggaagaaaggcgaaagtgaggtgggggaggaatgaatgtccaaatactcaataaataacacgccggaatcctcaccgccaaaagtttggtcccaaaaagacccagaaccctcgtcgcgaccaaataagactgagttgaaggtgatccacagtgatttgaaggagaaactcaatcaaaaggccactgtcgagaagcgagtgccatcgttgataatgcctcaccatgaggaaggtccgaaacacatgccgctagaccttctagaaaagttgaaccaaaggaggcaagagcttgataaagaaatggaggacctccgacgaagaatagcatcggctgcgtcagaggagtgttattggcacaaagatgattttgttgatgaatcgtctttctccagagagatctaatccgaacaactaccttctaatttcaaaaagcctaacatactgccctacgaggtaattaatgaaccaaaataccatttgaatgccttcaaagaaatcatgaagatgaagaaggttacaagcaaggcaatatgtcaatgctttgttgtaatactcagtggtgcgacatacaaatggtttaaaaagttggttcctggatcaattacctcatggaagcagtccactgatgaatttttagtccaacaccacgcctcccgagattatgttgttttgaggacaagctggcctacatcaagcaagaagagaccaagagcttgaagagctatattcagtgtttcaacgctaaaacaaccaaagttgggagtattgggatttatgccctaaaagtatgtaattaatagataatatattataatttatatgaaacacaattataagataaatgaatacattaattatataagtataattaataaatatctaaaaattccttattcatatggaggtggtataatcttgtaaggtcgtac

SEQ ID NO: 20805 - DNA, 4935 bp, Cannabis sativa
aaaagtaaggttgttttgcgattatattaattgtaggggaattgttttgattgtttttaatatctgtaaaattagttgtgacaaaagttttttatccgaaacgatggcggtgatgttccgcagctcttgtttcctcactcgccccaacaactcctcctcctccaaacccttcccggccgatcaattctctcccaagtcccatcttcccggtcagttcttctcttcgcttctctaccactgatttctgtatttttgttcttataggatacattaacctccaaatttctgcacttttttttgtcttttttggggttgttgaggtaccgtagaattatgagatcaattcaaattcgatttttttcttgaaggaaagttattaatgaaacttaaaatgcatttcatttaacctgaggttgctaccattgtttagaaaaactgtatgtaatgaaaataatccttaaagaaaatcctttcgtaatggaatttgaagtggtaaacaattgaaataataataagggaagaaatctgtatcttttgagcaagtggaaatgatagaaaatcctttttttttttaatttttaattttggtctgtgtgcttaggtcgacggttttgttcatctatgtactgattatttttttctttctccgagtcaggaaaattagctttgttttcattgaaagtggaaaagcttaaatcatcactcaaagatactcacaatgaagtgttagagatacaccatagtcaggtatgatggtgagtcacccatcagctgttccctcatttggtggttatttttacttgtgctaatttatggtttgataatatgcaaatgcaatcttagtctgcttcattcatcaatggtatgatgaagaggtgtaaggccaagtatctccaagttccactaaatgagagcatttctgccttgtcctgaaaacaattgcattctgctgttttagaccattagtattgtttattgtaagagatatgtgaagacattagtatcattatgtgtcggaatgtggaggtgcctcttgttaatgatgtcttatgtcatattgacttttttctttggcagggaaacatgcaggttaacgtcccggcagtggcattttttgttagcaacgctctggtcactgtgccttttaaagctttagcagaaacatgtgaggctgataattctatgtccaacatgcctgtgctgctcgctgtagctcttattggggctactgttggaggtaatgggttggtgcttttctagtctagtatagacttagaaattgttctcactgtgacctcctcacgccacttaggaaattcgatatacatataatgagttggttgttatgtaaagatgtaaagcttaatgtagggagagaaagagaggggaaaaaaataaaaacttgtgtgaaatttagaactactttttttatgtagcaacgtttgtgcttgaaaataatgcataccatattgtaggtttgctcgctcggcaaaggaaggcagagctacaacgattgaatgaacagcttcgccagataaatgcagctcttagaaggcaagcaaagatcgagtcttatgctcccacattaagttatgcccctacagcaggaagaataccagagagtgaggtaataattgattcaaggaagcaagaattgatttcccgtttgaaagctgggaagaattttttgaggaatcaagaaccagagaaagcatttgtggaatttaagactgcccttcaacttgctcaagaattgaatgatgctatagaggagaagaaagcagccagaggcttaggtttgtgtttgtatattttataaaacttttaagagtggccatgaacgttttttatacaggcgttgatttggctcctttttttcatttttttttttgctgacacaggagcttcccttcaaaggcaaggtaagtatcaggaggctataaaataccattcattggttttggagatctccgaacgtgaaagagagaattcaggaaacaccgaagcttatggagctatagccgattgttataccgagcttggagatcttgagcgtgcagcgaaattttatgaccagtatatttcaaggttggaaaaagactgataaaaatattttgttcaagctgctccagggtgttagaaaatttagttgagggtagggacaatggcctgcggatcttttcagtttacttgtgttcaaaaatgtgtagaatgctttttctaaggtgtagaatgctttaaactcaatttgaataaataattggaaaggaaggagtaacccggttgtagagattatgataaaaattaaatacaaaaaaaaatactaaagaccaaaatcacaatcaataatacatcgatttgagaattaaataattaatccgtagcatcccacaagtacctaaatgcgggccaaaaatgggggaagcggcaggaaatgaaggtttacaacccaaaatcagctgaatggttggaaattaaaaaaaaatgtgaaaaagacttcagcaaattagcaaccaaaaaaaaaatctaaagccatcactgcttgtttatactataaccaactccctctgataatcgtaaccactcatcataagaaagaccacaaaatcatacaccatacacatccatacaaatagcaatcacattatgcagggtgacgtccccaccccgaaaaaggattaaataaaaaaaaaaaggatttcctaaaggttttatgaactcaagagaaagtctgcataacacaggaaatatgaccgggattacagcgttataattatgcattactggtagtacatgagttgctgagcagcagcaacactctggaatccgccgtcatatatagcctggcttgcgccagcagcacccattcccattgcagcctgcttaagatgctgtccctgtggatgcatgagggcatgtacacctcccatcttgctcatttgtagctgacgctcataggccaaaatatcagtcgcagagaggccaggtaaaggtgcagctgcaacagggggaggtaatgggttcgaagctgtccccggtggagtgggcttgctcccccaagagcactacaataaaaaaaaggtcagttaattattggaaatagaaactatatccttagcagtgatcatcaaaatgcacaactgcacactccaatttcttgctcaggaggtttcaagaatttttactaacacgacatctttacaaaaccttaataaccctataagagctaattatggtacttccacgaaattgcatcttattacaaatggttagatgtcatactccctgtttccctggcgaggaaggaattgtcccctgcccctatagattgaacagcctaatccagtacttgtaaaatttcaggggttgaaaacttgatcgtattgaagtctcaacatgtgaagtaactggtatgatctctaagtaaagcaaatcagactagactggttcagttaaaaataaaatggccaagagtgaagtactgaaccacaccttaatttgtcgtccacataaaagcgactgggtgtttcccatctgaattgccagagctgcctcagcatgagtactatacctcacaaaaccaaaacctttatcacgctgaactctaacctcttcgagcaccccagcaccaagcgaatgaaaatgacgatgcaaatcgagctgagtgacctgtaaattggacacccaacaagaaggttgctcacattaatatcaacgctgtaacctctatgatgcaatatcaacaagacaaacaaaaataattccatcttaaaagagtggacaattttgattatgtagaatgacttttttttggtagatgatcttgacaaggtgttcacaaccaagttcagttctgctactaactagacacgcctaccattccacgtcaatagcataaagttccatgcatatgacaataattacttacttcgggagcaagatttccaacatacaccgtagtatattgagggttgttttctggggcctcactgttagtcgcctccttgccatcttctgcacaatcaaaatgatatatacaatttcatatcttgagacagtggccctctatttacaatggaaaatcagtttacaagtaaaattagtgatagtgcacactttccaaactagaacaactaaaagaaactagccatttgcctcacctgatgagccatttgttagctctaccacactttttgcatctgtgcttttggcgtcctcatttgaaacagcaccttttgtagcccaattacatcgtatctgtctgctacctaaccacttacctgaaaaatgaagtaaaaaaaatcagcaataggcttggaaaaaaaggaaaatagaaaacaaaagtgtttcagcctctgtcaaatataggggtgttcaaaaatgtctgatggtcatgatgaatttaaagagtcaaattgcaattgatgagattatttatggtaatatttttgggaaattttaggtgaaaaaaaaaaccatattgtatactggagaagaagaactaaaaacatgcaaaattactcaaaagttattaaggtaggcaagttaaggacatacatcctcattaagttaagctaaaacttcaatttttttaagaaaatataaatgacagacaataaaatcgttctcaccagttaagtcatttattgcactttgagcgtcctgaaaaagcaatgccacacagatgattacaaaaagatagcataatagaagaggggaaaaaaacactagcagaccaaattaaaacagtacctgctggtttcggaatgaaacaaacccaaagcctcttgatcgcccagttttctgatcccacataacccttgcatctctaagaaaaagaggaaaaattagagatgactaataaccaagtaaattgagcttaagtaaactaaatgataaaagcagtatcaatgacgtaatgtactataactgcat

SEQ ID NO: 20806 - DNA, 3750 bp, Cannabis sativa
gcagccgcagtggtggcttgtgcgctatacattccgccactgccttctccaggctgctgcaggcatgatggtgttggatggtcgtttgcctttgatgttgaaaacgggctggtgcctgaaacatttggagatgctagctcagggaagttggagtagaacgaatcgatttggaaagcaccagaagcaccttggactgaatcgattactagttgtaacttctgtagggagtggccaaccttcttgattttacgagaaggccaacgttttatcccatgttgtctgcatattctcttcaatgtcgttgaacatactgaaaaaggaaacgaaagtggttatgtaaagaactcgaacaatgataaggtcattgcctgcgtggtttaagcttctacatttactggtgacaacagattaacatcatcaaaatgtatattattttgttacctccaatactctttgcagcatctttaaggctaccagcaaaatattgtcgaagcacttgtaaggttatggttttctctgccttggttcgtcttcgttcacccgttttaacaccacccaagtttgaaaaactaccttcaccaacagtagaacactcttctacatactcatcacttggtttcaagcttgaacctctttgattttgacttgactttgagtgtcttccatcacttgttttttccactgtgaacaatgagagatcagtttcattctgttgcacctcttggaaacaaatttccgtatcaggtctgtcaatggaaggtgtcaaaactttattggcttgaaaatcaccttcctcctctagctctttctctgtgacaactcttaagctctggcaacattgttggatgattaaggagagtgaagttagcattttcttttgttcttcgggatctgtgcaatctttgggcaagaaaaattccaagacaaaatcagctgcaccagtatgaatgctgcgaagtcgaattgccacagcagcatgcaattcaaacaacatggcatggtgagacagaggatactctgtcttgggatataaagttatgtcagctgagaagcatggttggtttgtcatgaatgctccaccaacaactccttggcctctaagcaggtgatgctctgagcaagcctcatggaaaccttggatgtggggatcagcaacataacaggcatgatccactgtcgaaacacactggacatagttttcatcagagtgacggcacccctctttagcttggtatatacatggtacccaagtttgagctaagggtaacctatgtgtatcacaagcagatttcaagacttgctgaatctcaggtaatgcagcttggtagtacttgttgaatacctggaaaaaaatagacttacttgtgagctaatgaaaaaaaaaaataacctttggaatttggataaatttgttttctttcaacacaattttaatagttaccctcacattatgagtgctcaaaacttcagaactcttaagattgacagcctgcaaattcgccccgattgaagaggaaaaaaaaacacatggattgttgtcaataagcaccataaactcacaattggaatatgcatgatttatcctatccatgaaagaaaaacatgatccttggctgaattaaaccaagaacctagatatgtaacgtagtcaagctattgtttgtcatgataacatacctcaagtgccttgcaaacactttcaagctcagggcgatacttgattttctgagtagtcatgataacctccaccacacctaagcaaatcctactaccttgctcaaaaataggaagggcaagagtcccacgtacgtcatattgataagcatgcatcagccgtggatactcatcattcctaaagtatcgaacatcaggcgtccactctggaaccttaccagagaacacccttccaggcaatcccattatcaaacccttagaatcctcttcagctggaaactgatactttacagatatatctctgtaccgtgcaagctttggacagctatcatcaagcgcaaaaggaagatctctagttgtaagaacacgcctaccttctttatctacaggaatccatatttgaacaaggatatctttatctcttataacatctttgatgtacataagtgccctgcataatttctccattacaaaagatgaaggaccttgactttccttggttccaatccaattctttcttctcatttcatcattttcggttatcaaaccttctgaaactccaggattattgggagcattgtttatggtctgagaaggaggcaaagctcggagaacacttactcccacagattcgttgaaaattgatttctgtctcccttcttggttactcctctgagatgggtttgcgttcaagtcaccgttagtctccaaagtaggccagaataaaggatcaaaaaggggattagaactagaagtctggctaatatattcagatccatctctggtttccaaccagcatccttctaaaaacaattcatccatgaaatctaaatccattggatactcagatggagctcccaaaatggtagatggtgatagaacaccttcttccatggtataacttttgcaaaaccctcccacttccaggatttcttttcctctagtatttcagaaattaggatccaaaacttcttttggtgtgagatacttgtgggaatgattacactaaccagtaactgaacccttcaaacttctgaaaaggaaaatatgtaaaaaaaattgtcagcagataaatcttttgattaccacacctaaagaaaagaatcgccaaaaatttatcacaacatatttacataatatgattttcccttttacatgtaaagatccaaatatgtcagcaagtacaaagaaggggttgaggtttattgatattacatgacagtaattcaacatatcatttcatcacacaattatctcaaaataaacagcaaatatgtatgtagctgttaaacttaaatgtaaaagcatgggttcttcattttatcacctagactactctctcaaaaaaaaaaaaacaattaataccattaaatccataaaactgcccactggttcttatctccactcaatcaaatagataaaagttctttcagtgaagtggatttctctcataatgcttagacaagcaaaaagaccaagagttgaaattaatagagagtgaaccatactgtcaaaaaaagtatatgaccaagagttctagatttacagaagttatcacattacaaaagtttgagcaagaggttctattgtaaaagatttcaacatggttaggaatctatattttcataagactgttaaggcagtaaatctctagagctgactaataatcaagcttgtcacccttataatttgatccaataataaagtctcacctttgtcagatacaatagctactgtagcttccaacagcaacccaaaggcaaaacccagaaagaaccccttggtctttaattggattctgaaaattagctccggcaataaccagattgctataagtaaaaacaagaagaggagagaaggaccagttataagcttttcatgaaactgaaaacagagaatgaaacaggggaagaagcttatgaacgacattcttcttacctgtttagattctgttcccttagaattcataaaaagcaggttccaaaactcaatttgacttgagctatctccaacccaaaacagaagatgttgtggctaaccagtctccaaaccctagtttatccaaaaataaaatgt

SEQ ID NO: 20807 - DNA, 8923 bp, Cannabis sativa
  modified_base (35)..(39): a, c, t, g, unknown or other
cggcccaaagtatttttgtaattttttttcctttnnnnnatttttctgtttttttcccttttttttttcatgttttttcctcaggaaaaaaagaaactaaacaaatttctgaaatggatgacattaacacaaaataaatggaaataatataataaaattttagaagaaaaaaaagtcaaattattacataatttttttatatcatttatttatttgtagcatgaagtttgaccaattgtttaattgttatattgtacttgtaggtcaaattttaaattggagtttggtgttaaattgaatatatgatgtaaattttggtgaaaaaaataatatatgatgtatattttgtattttaaaaatcatttttgtatcaaaaaataataatggtgagttgaggtataggatagggaatcttggatcttgatgtgtagaatcaatatataaatcatgaatgagaaaggtttgtttgcaacttaacatcaaataaacctactattatagatagcataactctttttttatttatttaaagtgagtctatcactattagtgtttgtaaattatttgaattatgaaggtgtttgatatatatatatatatttatatatataaaaattttagaacatctctaatagagtattaaaatattagtgaagtgctatattttaacacttttaaaaaaattagttttccaatagtgtgctaaatttggccaatattaaaaataaaagatatgttaaatttggcacaagatataatattgtacaaaatttaatacacaataaatataattttttatattaaagttttgttattgatcattaatgataagttttaatatacattttttaattacaatattatcattaattattttttaaaaaatatttatttattaatggttattaatgatattttacttttgttttcatttgtatcttaaaatgttattatgccttggcgcacaataataaatgttgtacttaatataacatttatttatttttatatcaaatttaacacaatgttaataaattgaagatgatctaagataatttagtatatttgtatcttttaatttttaaaaaatatatatatacttgtattaatgtatatagaagtacaattttttgagctgtggtttcttaaattttataaattgaaaaatccttaagatatgttctgtaataattatttaaatatatttttttattttttttaattataaaagttaaaatattattaaaatatatatttggtagaattatttccatttttattatttaaaataagaattaaaattctgaaaacaataataagttacttttaaatttatgtaaataattttttaatcatggttttttttgtactttcttcaattaatattcactattttttctctcatctttcacgctcaccacttctaacagttctacacttctactcattttacttttcctttatcctttctctctcctcactcaaattaaattaaaaaaaaaaaaaaaaagtaaccaaaagtatttttgttttttatttttaaaatttaaaaaagttataacttataagaatcaagcacattgttatttttcaaaaccaaaattatacttttcatttttgtggtaaaaaaataagaaataaaaattttacaaaactcatttttaagatacaaaaatacaagacaatactattgggaggcaaattgtaaaaaatattgatcaaacagcttttacaatactattctcttcatttattaacctttagtaatcaatttcaattcaactcatgttgtgaggtttctaattaaaagttgtttaagttgcttaattggtaggactactaatactatgttaaactatttctagggtaggtaatataattataaacaaaaggctattttggtcatgtcacatccaaatggtgtaattatctcacccaacacaaactctaattattttgtcctaaatttgaaggtaaagagtattctacaaaactttccaataaccaactatttagaaaagtataaatttttcatttataaaaataaaaaggaaaaaatgttctacttggcccaattgagtgaaaccgactagtttgacatttcaaggatttggctataagaaaaggttgagactcaaccatctattttgttagattttacttttaatatggaaaaagagattgatttgtaatattgcttttggtgttattagaattaattttgattttttgttcaccaaaattgttgaagatgagatcaaatagatcaaattatatatatgcatgtataagaacacaatggctaatgtggagtgagtgagtttggaccacaattttaaaagacatgaaatgaatggttgctcaaaaggaattgtttaagagagaggggtctacaatatgtgcatcaattgaaatagagtaaggacaatggataagccctacaacaacaatttaagattttaacaaatatttatatatatacaattaattaattaattataaacatttacatagcaaataaataaaaaaagagtagtgttatatacacttacacattaaaataatacttgtaatagtgttgttgtgactaaagatgtagttaggacatagtaaaagttaaaaaaataaatattgttcagctcaataatgcatctaaatcatgtttgaatagaatgaataatttgaataaaaaaaatataaataattgaacacaaagttaaagtattattttttcttaaaattttctcatattaggtgttagatagttgaattaagtttattaatattcctctcaatttcaaataaaaaaaaaatattcgaattggataagattgtgcgctccaggccctttgggtgtcatattttggtaagaaaattacattatatacccattttatattatttattttagtttttaccttcaatttcatattttttaagaaatactcacttttatagatgatgtttccattatacccttaacttaatataaaatatatgctaaacttaagtggagagtgaagttatattggcaatctacttaaaaagtaagtatattttaataaaatataatgaaggtatttttgattaatggatacaaaaaaagaagtattcctcaatttatctctattttggtcgagtttaccataccttcggctcgtatgttacgcgccgtaatatttcgttaagttccaccattgttacaccaaaaataaatggtttcacaggagctctttttttgcggcatggcgacaggaccaataggggattggctctaagtgtagatagggtaaaatctacggggctcatacaaatacttaggccccttctcttctcttttggatgtatggggtggtttagaatgtgctttccaatctatggtccctcagagcgagtggcaggtaatatgggccatctgacttccaactatgtgatgtgcgactcccacaaagcgaatgaagggaagctcttcgagctttcgagtgagcttacgctgactctcaacctctttgatgggtaggcagggctatttgtcgtgacacttttgttatgttactgctacttcttacacaaaaacaaagtattatcaacacaatatttatattttacaacataagtccttcaagaatactttcattgaaatggataagcttgtcttcaatattttaaagtgattatttacaagaaaggaaactcataatcctaacctaatgattcaatataaacataaaaaaaaaaaaaacattattataaaccaaattctacaatgtaaactaaacaattgtttttccattacacgtgtgggtagagtgttgttaagaaagaataatctttcttggggtacatgcacatgccattgccaatgcaaattttcaaagtcaatcaaatgatcttctttcttgataatagtagtaaataatttgtaataaaatcccctttcccatagagaattttgggatgttataacactacaaagatgacatttttatcagtaagttaaaactatataatataaatatgatctgacttgacattaaaggctgcacagaattccaataaaattaaacatttaatacaataaaagactctgcaaatagcggtgcagggcttttagtgcagaatttcccaattattttgacccatcaaatgggggcatattctggtatggaattagcattgaattttgcccatatatgtcattctcttatgcaattatttaaaataaaaaatacatataaaataaatatatttccacatctgtcatcttctgaaataactaatgagaaaaataaaaggggtcaaagaacttattttatgcagtcaagaagttagagctgaattaagtaataaaaaactaatcttgcagttttgtttaataaaagtcttcatttttccaagtgtcaaaatgaactgttatgcaattcatttcattttgggatcatcaagtcacagtcaatgcttttccttatcatcatcatagaagaaaataaataaataaataattgaaagagaaatatgcagaatgaactgagagtcaaaaaccaaacctttctcaccttctagttctttctatctttgagaaggtgtgacttttgttttgtactatatatgcctcaatttggtcactgcaagaaaaaatatctcaagcattttagaatagtttctctatggtcaaaatgatcaagtccacagagcaataagtctataatttgtaattgttatttgcaccttaaaaacaaaaaaagactgcatttttagtttccacaaagaaaatcaatagtcaaaattgacaaaaccacagctgtctttttcactcagaataatttatatgtgagtcaggttaagttggatgtgccactcattgtctgaaagttatctactttatagcttttcattcagagtttgatattatttgttactttgttttataagaatccaaactagaacctatactcaagtgtagtaaggattgaatgtaacaaagaagaattaattactaaagagacaaactttaatagattaaacccttaagaatcaaataaagaggtgaacaagacctgcaatgcaatactgtatcagccaatgaaaaatttctctgattgaataaacatgtaaacttttcttgacaaaatgggccaaagagaacagaaaactacatataatcatatataattcacataaaaatcagatatggcatgaagaagcacaatacccagataattgattatacaaaaagccagcatgatcaactaaaaaaaaaaaaaaacagcagccatggacatgggtaaaggtccatttgcatactcctaaatttctttacagcaatatatggtgaataataaatacaaagaaacctttttttttttctcttcttacactttatactttttccttttccaatcttcttcttcttcttcttcaaagttcgattctttgaattacccaccaattgagatatcaaaacaaaccaacaaaactattattcagaatagctagcttttcccaaagaatcaagcccttctgtacggctccgaacaattctatgaaacacttccctaacttggcgttccaaagggtccaatccattctttaaggcaccacaaacttgagaaagctcttcaactctttgcctcacctcagttactttctcttccgttaatgggaactgaacagaatctgttaactcgctcataactcgagagcatttctcaatctgatgaatctccttcaaaagcccacaagcgtttttcctgtcccttttcttggattcctcaataatcctctcgtgtagagatgtcatggggccagaccacggtaagttacggtggaccacagggaaatggacctgaagacccctgtcctggcaaggtatggctgcaaccaaagcccacattacaaacaacaacaccgaattcatagtgaaaaccgccacggctaatcccccggtggccaccacttcgttggctcgcggtgcgctcacgttgttggcgatcgcctggagctgtctggcggccgaccaagaccgcgaaacgctccaagaaagtgatcggaaatgacccaattgacggtggtgatcgcgggaaaagttgttccggccaaatgagcggttccggtgagctagagttgagccgggatccttctcatcgagcataccgatcgctaaatcgattagggctttcttagctcggcggaattgaccttccccgaggtttctgtttccgtctaaggctatgagaacgatctctaatagcttctgccactgtctgatctgttcaatcccatctctgacggcattacaaacgtctaaagccttcacactccgttcaaagtagtctgaaaccatccgatccaacggtggtctgagcaccatcgatttatgattgaacaaaatagctctgaactcctcttgacaacagaggaaaacatctaaaagtttccgaacccattgaacggaaagaagctcctcagacccaactacagccgccgccgccgaagatgaagaacacaaatcgagaaaacgatcagcaacttgtctctgaaaagcttcgagctcgatctcaagcccagactgggaatcatggtgactgcctacgccgtccatggaccggccaatactcgcaaacccagtggctgaaccttggtaatccgtagcgggcattatcacattgactaatttcaactcccttttattcgccgatttcgaaattgagaagtgaaattagggttctgggtttggtccagatagtgaaaagcttcaaacttgaagatcaattgggtattttagagagagaaagattagagagaaagagaaggagaattcaattgagaaaccctaatgtttgaagaagaagacgagagagagggtttttattaggggataattgcaccgcgtaaatgtttttttttttaattaattaattaatttatttatttatttgaaattaatattttatttttaattattaataattataattggtggttgggagagacaagaccatagcaaagtagagaattttcagaaagaatgagtctttaaagtttaaaccaaaaaaagtataaaaatcactactctcactcggtcacttaattaataacaataacaaatcttttttcacttttccctacaaatatttaattatacttttgatcaaatctatattttattctgtcttttcttttctttttttaattattatgagtttcatattaatcctagtatgaacacagagaaaatttaaccacacatgattctcctaccacagtccacatgatctttttctttttcttttttattttaagtgaaaacaaattatgacatttgaacgtggcttaattttaactcatgtgtaaattattaatttctttttttttttttttgaaaaataaatataaaaatattaaaaaacagcaaatttctgttttttaaaacaagtatattgtaacattgaccaccacaattaggattacctacaataataacttagcatttttataaattatgaagaaaaaaacataagtaaaaaagatatgagttttaagaaaatatatattaaaaatagaataatgatatgtctatacacaaatcatatatatgttatacatatttataaattactttaattaattatttttatttaaaataagttttacttataaaaatcgacttactttataagtatacattatatttgtgtataaattaattcatttgataattttttttaaataggtaatgtgtctctaattgcaataatatatatataagtttcacaggctaatgtgattttaattcattcatatcaccataattattagtgatgctcataaagaaactaattataattatcatcttagggttaattttaatttatcaaaaaaataattttgaagtcttgatctgagcggaccttaggtgcgaatttagccgccttagcccaacctcagcttttggtatcacttacaaatattaatttgtacgaacatataacaaaattctaataaaatatttaaagttgtctataaaataaaattataagaatatgaattggctagtttatttaaagatttaggaagccaattaaacatgataaaataacaaatttgaagagaagaaccaattactttgaatgtagtagaatgtttcataaattccaaataatatgggaagaggtcaacattctcttaaccaaaacaagtataatgattaatagttagatttcaaaactcaacctccaaaataaatgatataacgtgattttgtgacacaaacatgaaacatctacaatttctaaaacaaaaagtttatgttataaatcatattttaaatattcaaattcagataaggtgatatatattgtgttgtactcaaaattaataaatcaatgcaaattaaaaaatataatatgtccgtgatgataagatactctaagtttatggaaagataaatgctaaagaatatttacggtggtgagatataatattgttgatgatgtaatttgatattagatctcacttgttttactttaataaatattatagaaaatcgttagtcaattataaagagatactttatcgtggtactaagcaatactcctatgaaaatgggtgttttgatcgatagattttttatctacttcagcaactaaaaaaagattttagtcaatttttttttcatagttatgtatattataattatttaatattatttataatttttttaaaaaattaaaaataatttaccgtgctgaaaataaatttaaatgattacttgctgtacatattcaaaatattatataataattatttcattttatctcaaaaaaaaatatcaaaattcttaataagtcaaatctgttataaaataatataatataatatagaatagatgagaagaaagaagaagaatatgaagagagaaaga

SEQ ID NO: 20808 - DNA, 2692 bp, Cannabis sativa
ttatacaacctattaatacaagtaaatatcaaacataatattctattaaataatattgatagaatacaatacaatacaacatactactatacaatacaacaatgtataccaaacgagcactagaagtgttatttttcaacacgaacatggaatttttctaatgaaagacatttttatagctaagctatagaatcagattcttgccggccacagaaataatacaaaaaaaaaaccctttaataaacaacagaaacaacattcatatgaagcatatatgaacctacacttagacaagcagagcccccaaaagaaacaatctcaccaaacaaagatttaatctactgcaagcacaaatgtcttttccaaagttgggaaacatagcaacttccaaaacttactagaattagcaaaaatgcctatccaaccttcccctcttgtagttcatagtatataggaagaaaactaaaagcagcataaaagattttcttaacccaacactacaagaagccattaattaaaaactgaattacataaatgcactgcttctacttaccaagctacaacatttcatttatactaaagcactcatttcactttactggctccatatctatatatcattaccaattgccatccaatatttggacttctgcttgttcatctcctttaaaatccaacagcaccttaaaatttgcaagtggctacacagtccttaaattacattctgttgggtcaaattagtgtaatcctaaaagctttattgcaagacttaatcctacctaaagtaatctttgaacatttctacggttcatctataactatgctaccccacaaaccattttgacctcattcccaattggcccagattacagaaaagaacaaacttgtagcccaaaaagtagagaaaaagcaaaagaaaaattactaaaacacaacgaaactaacaaagcaaaataagtaaaacccatctcataattttacgaacgaaagaaaacccaccattcattcaagaaaagaaagaaaagaaacattgaattacagatcgaattgaggtatcaaattgaagaaacagaagggttgaatttaagcttccttacttgcccattattgcaattcaatccacaaccacactgagggcattcgaaaaaattatcgatggagaaggaagccgaagctaatcccaccgagaactcgaggtcgttcccatctcgaacgacctcaacgatgttaagcaacaagaataagaccttaacgctaaccccagttagcttcgtgagcttgtccttggagatatagccgcttatggtggatttgtactttaactgatacgaaccctccaacgagaaactgcaggaaccgttgaaatgggcatagaatcttccgttgcttcggtctaattcgtagctatttactccctttgggagaatacccatgggaagatcaaagtcttggagaacctcgtatgccgatcgcttatcttcaacgtcgggtgatgacgtgaccaattgagatagcataacgacggcgacggcgacggcgatcagaatggccgtgtgagacattgtttcgattcttgtttttcgatttttcgaactaaaattttgttattatatgagtttttttttttttttttttggccaagttgacaaagttatttttagcttaagattgtggatctaagacgatccatccatccacagtgttaaacgacagcgttttaacgttttctaggagattaaggatctaagtggcacgtggtgcaaagaacagaacacgttgacaataaggtagagcgtagatttcaaagcacggttcatgaaatagaagtgatagagttactgtcggttttttatatttcgtcacccattgctgttttttaattatgtaaatttgtttgtattgtactcaaatttttagttcagtatagtaggagaaaagttccaaaagtgtaagacaaaatcaaaaatcaagaatcgtaatgatttttcctttttgttaaatgagtaatttccaattgcaatgcaaaaagaattctttatttttcattgacaattatgaaatacatgtgtgcatttatagatgtgatataatatttgtatgataatagataaattcttgttgtgcctaatccatttttaaggacttaaggcaggattagcatgttaaaaatatgtctctttgtaatttatggttatacagattcaccactggctatttcaaaatcacttaagaacacatagataaaagaaaaggaaagaacaaagcaaagccataattatggtaaaacaatgacacgagtacaagaaaaaatgaatcattacaaataacaacaagtaacaaaaaggaaacattaattgagactgatatttgatgataatataaaactatgatgagaatgagcaagagataactactcgtagtctaggttatacaatcacacaaactgcaattagtttgtaccaattatacaacaggttaccatcaaacaccttttatccaatttataattctaaacacagtaacatgttacaacatgatctttaatagcatatattaatttagataagaatacgacactaatttattcaaacacagccaaactagatagttcaaaccaatttattcaaattagtactcatgctaatcataaattagctgacaaactcagtcaatttagatacgaaaacgacac

SEQ ID NO: 20809 - DNA, 1118 bp, Cannabis sativa
gtttccaattattttgtagttggattagattatattatttcaatgagaatttctgcaataaaaaaacttcaggtaataaaactctacaagggtcataattcaaggaggataaattctatttattctttcattgattttcttttgatgggtggatcctaggcacaggcgcctagcaccttagccctaaattcaaccttaatattaaacgagtcctttgttagaacttattttaccaatatcttaatttaaaaacatatatgtttaattatatacattattatgtaatatcctaaaatataaaattcataaaacgataaataaatacataaaatagaatccttatattgactgcatcaaaaattcatgactccttccgtttaattattctaacccttaattcccgttttgtagcagagtattatcaattgatgaacttggatagcttccttaaacccgaaaagtaacaattttacacaatcttccacaaaaatctgattaccactttgaatagtgtgggtctgtactcaactcactaatggaacaccattgagatggagaaaaaactatgaaatttgaattatattaggaaaataattgagagctttttctagtcgaatttagggttgaattgcttaaattaggttatctaacaaagcattcatcatattccgacacttcatagggttaagattagattagatgggttaggaaaaagataatgggcaaaaattaaagccatagctaaaatcacactaaggcccaaggactttgatttttgctaatttatttcatttaatgaaacatttattcatttttccaattttatcattattctaatctaattatttaaatactaatttttatctatttaatatttataaataactatttaacaataatacaagttaaatatatttattaattagacccataaaatattttaattaacaaataaatctttatttctcttttcttcttaaatttgcccaaacttaatgaaaattctcaaataagacataatacattttcaaattttaatagacttattaaatcaattaattgagtctacaaggcagtattgtcccaaataatatggacaccatggacctatgaaatca

SEQ ID NO: 20810 - DNA, 6428 bp, Cannabis sativa
tagctcataagtcatttatagtaagaagtttctttctttcctttttttttaaaaaaaatgactaatttaccccctaaagaaaaatttaatattaaaataacctaggggcattttggtaattttactaatccattaaacaaacattctaaaaattctaacttagtcctgaataccctcaaaataattcttccattaatgtcgtgacatttccgaccacattgctaaatttccccagtcgtcgggcatgataaaatatttttatttcaataatagtatcatcgatacccacatatctcaatataatcttcgtaattaataaattattctatctataatcagtcactaaattctcagtagataccctaagaaagatcataatcttacttcgttaccaaaataattacgtatttaataaaatatgtctatttaaatattattttattttctgagatattacaataaacaaagcaccttaaacccaagattaattgctacccagtcatctagttgtcttaaaatgaaaaacaaaaccaaagtttaaatactccttggcccatcatttttgtctctaacaaaggcccatggaccgaacagatatataaaaaaaagaatgtctcaaatggcaggggtcctgggttccttgtatagatcaacttggcctatgggggccaaaggctcaacgttctaggcaataggagtttcgatgcttttgttagttagaactatagaagtgattgcctcggggttttctttggccacctaactcacacagtattcacaatatacctctttggaatcatcgaggtaatcaaaatttcctttggggttttccttccaaaactcctaaaaacctctaaggcagtcgtttgtagattgtcaacctccttcccgagctcctcttcactggtctgcctggtccgtgcgtcctcttccagctttgtaagaagagagtagagactctccccctcatctataagagcattgacatccttggacaaagcctccttgtcaacctcaagttgggcaggagaagctatctcttgcatctccttcgtcagctcctggactcgggtattggtagcaaggagatttttctgcctccccgaactcattcctcatgtcttaaacctcttttctagcagtatccacctccatctgcagtgtgttagtggtagcaaggttcttggtcgcggtggactttgcttgcgaataggcataagccatcttcaaattgacctacacggaaaaatgttaaaattcgagctcaaaagagagaataaaaacaaagaaggaaatagtcccccgagcagcctccttcaagactccccccatgacaagttccaaggacagctcattatctgtcctagatagctgataactcacttcgggaagtgaccgatccagataatacagtagcatgtccttgcccttttttgcctttgtgctgagcaccacgaccgtcgaagaggtcttagtctgaccagacccatctgagctcccccttttggaactgtttgattttgagaccttctagactagagggtcgacaacacatcgttccttagagaggtctattacttcctcgacactccccttctctttggacggagtctccttgcctttagatctcttgggcgggggagtctggccctagctgtaaccaacccttttcttcagagcctgaagtaccttctgggacatttcttcacaaaccaaagaacagagttagaagcaattgtaatataaagaatgtcatgaaagtaataaatggaagtcagaaatagcctgcacgtggttaggagcattttcctgaacaagcaaagacggagcatcgtcgtccgaagagtcttcctcctgctccatcagaacgacttttcctttccactcaacaagggcggacgaccagacaagcatatcaagttccctaatcctcatagcctgctccactagtgcttggtcacttgggagagccttcttctgttcttgctcggcttctcctgctctgtcaccccaacctagctagactttgccttcttcttctccttcacgggcctcggcacaaagtcccctgggaagagtttgtacttaacataattagctttagtggacagcagggtgatgttccaagcaacatcttacagctaaagaattctttttgccctctccctgagccccaatgtgaaaggagggcgacagtacgagggaatttgctgtaactagggtgacggtattcatgccctgaaaaagtagtactcatccacaaaatgtgctattttgttgacatcgctgtccatagtgcccgttagccacttctactcgagttgagaaaaatagaaataccccgacctgctctacttgggagttaacttcaggtcgaagagccagttggtgtcattttgggagggctcgccccatcctagtgaggcataaaggatgaacaaagaaaatagatatttgatgcccttcagagtgatctgcaatcctccttaagtacagaagtaagagcagcattgcaccctgcttagaatgagcgccagaccaagcgtagtagccatccctacgactagtttcccagtgatttggtgagggagggaagcatttgacatcctccaagtagtcgtgcttttctaagttcttcattttttcctgggttactatggaaggaggagaaacccaccgagctcctacagcaccttgtcttctctgaggaacaacctttttgtattcctcgtatcgtagtcttccccctccaccaaggtttcactggccttaaacacttgttctctatcttcgttgaacccaccaaagggcagcctccgagttgctccctcctcctcggcttaagatggagtatcaggacggacctcgccttggtcctccacctcttagacatcagcctccccctcgatgtcttcctctttagtagtaacgcgagcctgctctgcactaagcatcgtggcaagtcgagctatgtgagggttggtcaaagaagatttctgcactatttgtttggtgcgagccatcatcctattcttagatgggtccttgttgttatgcctagttattttcacgtcaaaaatggtagtaggtaagccttcagcggcaggacttggacgacctataggtagagtatctcttgtgtctggtaagacaatatatgtccagttggacgataaatattctctccaacccttcttgagctcctagataaaaagtttgtatccttcaccttcgatctggccgggataaaaatgatgttgcacctcaagttatggagatagagtatgttcgctgcttatctcccaatcttcaaagattgaattggagagaccgacactggatgaagacggactagcatagagatgtggatgatccttgtacagaagaaggagatcttggtagatattatgtttgcttcccccaaaactcaccagatttcatctacaaaaggtaggacacaagatgagtatttgggtgggataacgaacacaaacagattggttataccgaccaggtccaatcaaaggatcaaaaataggaatttttcatgacattagggtttacaatgcagaatttcaaaacatcaaattaagggttaattttcactaaaccaggaatggacaagtgaaacagaatatcattgaatgaaaatcaaagtacagttataatcaagccacatggttaagcatagtcaaaatctcatactcctaaacctaaattttctaaggttttcctagaacaagttcaagaactatcaagttttctacagtggaaacctagaaaatcaaatattcaagcataaaagaggaaaaagatgaagaacttactcactgtttgaagctctaaagttgctcggatggtgttgttcagtgctttttggagattcttcgaaggatttgagaggaaaagattttcttgctctgaattcttcaagaacgaaaaatgctaaaaggggttaattagggattttagcccgatttataagctaatttgtgaggtagagcaatcatttcaaaatttgatgaataccttagtttccccccaaaaatatacgtcaagcactcaattaattgaatggtaactgtcaaaacttgttattttttaggcgtgattcgatgcgtaagtctgtttgcattaatgagcggaatattgaagagaccattggtcagagtcacgttgggtcgccaacagatgctttgaacacgtgccacccgtccagataaggatccagaccgagcgaagtccacatgtgatctcagaggtctcgcgcagacttgggggcaaatgttatcccatttgttacactatgatgtcgcaacacgtacgagtgacacatgtccaacattccttgcacctaggcggagatgagtatctcgaaaaaatttcatgtagcacagtaaaggggagactatccgagcagagaacaagtttggtttttcaaactatgtaccaggacttgactactttagaatggtatcgtagagtccaagtacgaagataatccctacaatcatgagattgaattagagggatacgacaggctgtctcaatcccccaattcatttattcaatttatgtaatgaatgttccttcctattatagaaattgtaaggaaaaggaaaaccttccctcattcattaagcccctacaaatagtgatctagcttcactgttatatggatcgaaagaaaagcttgagagagagatctaagagaaatactcaaagatttcattgtaagagcttcgagagaaaaaacacggtgttctttgttctcaagttaataaaacctaaagggagtaggctattaccatattaaaggggccgaacctcttcaaaatcttgtgttctttatcacttattagttttttctctatttttattacatttgtaatagcttaataattcactcatttttaatcttgtattcttttttctcaagttaatacaatctaaggagagtatgctattacattttattacaaaagggcctatatggtttataacgggctcctcaaaacaaaatgcaaaactgagtaccacactcctacaacaatgattcaaccattaaaaatctgatcattcattattcagtcgacataaatcaagtattttcttagccctagtcaaatatctcgatgatatcattgttgcaactaacaactttaacgggcttctcttgatgctcaattcaagtctaaagaccttggtgacttaggattcttttttggccttgaaatatgatgttgtgataaggtatttccgtcagtcatataccattcacaatataactcttgcaagacacaagttatggttgtgctaaacatgtatctactatagtggaacttaacatcaaattaggcaaagactcaaaggaacctatattttatccaactacttactggagtctaataaaaaaaaactcacatatcttacaatctcaaggcttgacatcagctttacaatttacaagcttagccaatgtctccaatgtccccaacaaccacatctcactgatgcatatcacattctatagtacttgaaaggaacactaggccaaggccttttcttctatgcagatgctcctacgcctccacgattgtctacttttgttgatgctaattggatataattgtttggtactagacgctccatctctagctactgcatatttcttgacaactgattaatctcatggaagtcaaagaaacagaaaatagtctctcgaacttctgatgcagctgagttaaaatctcttgccaacatagcatgtgaaataacatgccttaccaccatcatcagggacatccaagtcaaaatttccactcctgcaagtcttttttggtacaacaaggtagcaatacacatatcagaaattcggttgtccccgagcgcaccaaccatgtagaaattgactgccatattgtttgggacaaactcaccaatgccctcatcaaattgaaccaggttgcataaaaaacaaacctagctggcatcttcattaatcctttgttccctaattcccacatcaatgacataatattcaagagtggtgttaagaatctttacactccaccttcaaggggcctattaagattagttagattcttctatgaagttagcattttctgttatacactttgttacacaatttctcagctcttgtataatataaatacaaagtccttctccttgtaccaaattgattcggatacaactcaataaaagatttcctcactttcattttctctctgttttactaatagttatagttacaatatcgtttttgtatgtttttttttaaaaaattaatagtttatattgcagaaaacagttttgaaatttttggaacgtgtgtagtgttgggattttatgccctaaataaaactcatttcaatctagtctggttttttatcaatgaaagattagaa

SEQ ID NO: 20811 - DNA, 3270 bp, Cannabis sativa
tggcattgttttttgtactatacgcacaactgagatagggagagctttctcctcacgacacaaattggtttttcgacttgaagtctagtccaagacaaaatcgattgggctacttttatctctgttttattgttgttcaattttgtgtcatgttatctatgtttactgtttatgttgtgtgctaattacaagtttaaaatgcaaattattcttcatattttaggcaaaaactcttatgttggaaactatagaacaaatatattgtctgtcaagttacaaccctctctctcatttcttgagagagcaaaagcaacatttaagtttatatatagttttgttgattcataataataacaatcatcatagcaatttttgaaccaaaaaaacatgaattgtaaggatgaaaagtgtcatcctgcgcccacagcagaggaatgatatttttcctaccaatctgtgttataacaaaagatcctttacaatcacatgtattaaaatagatcacgagaagaggaaaatcagcaagaagatgagtatgatctgatgagttgacaagacaagacaagacatcataaatcaaaaactttgttatttgtcaagttataaagaactctctctatctctgatgtagtaacttcatcataaaatgttccaagatagagattaagaaaacaacacataatcacattacaaaactactaataaagtaaacctcaaaaaggacttaaacttagcaaacaactcataaatcacttcaacagttacaatattatgtcctctccgttaattgataatgtttctaaagaaggtgaaatcaacattatggactcttttaaatctaacactctttcaggctcgtgatgtttagaaataagtctgagatgcttccaattaagcaacggtaaacaacatatcttcttcaagttttctggcaatatgagcgcctttatgcaaacgtataaacattacaaacttgaaatcaagccacaaaatcaaattaaaaaaaatatgataataaacttataacacaagtacctcatatgaagaaacatgtaggcttagaatattccaagagcaattaagattcacaagagaattcaacatgttggtgaaccaatctgtgtcatatttcatcttgtcctcacaaaatacgatttttccattcaacaaattggatgactctatcgatatgcaacgatccatattccctttataacaaaaataggccaattctggagctgattccattgtaaaagcattgatcatatcatagaagtatttaaatttcaaactttcaaagtattcactagagattttaagatggtccaaatgtgtattgctgtcactcaatatcaaattctcaacaagagaaatattagaaacaacaacttctaatgatggttggtcatatataaaagtatggtcagcaaatgtaagatttctaattttcttgcaagaagagatatttatttcatcccaagcaacaccatgtagtaacaaagactcaagatttatggctctaacttgaatttttaattcatatttaatatcactaaatgaaagttcaaagaacttgaggcttaaactttgtaatcttgactgatcatcaatacttaagaattcataatcatgtaaatgcaatttctcaagagaaggactacccgacaagaacttaactaccccgtcatacttggcagtttttgaatttcgaacacctttcaaagacaaactttttagagatgggaaactaaatgaatgagaagtatccaactttacccaattcaactccaaaatagttaagtatcttgcattgtctactaatatattaggtaaggtgtaaaagtggtctaaccaaagatgtatttccttgatcttattctcaactgcaaaagtcaaccacttgtctaagaggccactcttaatttttttgctcaattggctagcctgccttgttgtataatagctatccatatccatgtaaaacttaaactagttatgactgaatcgatgcacatttgttgcaatgttctaaataattattgacataattgtagactttttcaatgttacttgtagtattattggagaaaaagagtgtagggactgaataccacatgagcttccaacgcattgaaagaaggcatgttcgaaccacatcttcagtggggagaaatgagagaatatgatggatcactgcattgggtagcttagaaatcctgtcctcatcacccattgatggtgtccttctaagtgagctgtggagtgtaacaacagaaaataaatacacacacatatatatttatatatagtgaataagaatgttagtgtagctaacctcttcttatgtagtgcaaaaagacctcaaaaatcagtgatatgagagagagagagagagagagagagagagagagttgaagagatgtagagcaatggaataaatggctttacgttaaataagaagaattaataataagctagtctgctgctccatttcatttccaacaaaaaggaatagaaagagtcatatatatgctatactatattacttttaatactgcagttaattttgataaataatactttattgttatggtgctccatcccaacaaatatgaagtggaagagactaaaatgcagagaaaatgaaaatccatccattgcattttcttggtcaaagaactacatgtcaatcataaagaaaaagtcaagaaaaaattaataaccttttgaatttgccagaaacaaaaatcacagggaagagaaagagacacatacttatcaattttgactgaaaacttgttgttattgtgatccacattttggttgcttaagataagaatcagttcaagatttgaagtgaaattacaaatctataaaatgccttaaaatagctaaccaggattgaattaaggctttctagtttcaaacttttcttccttaagttatgagttatattcaaaccaaaagacagtattatattgatcacaaacaaatgtctaatatgttggagaggcatatagttaatctttacaagaaacttaagtgtgttagatcattaaacaaagcagctgagaaacaagttcaattctgctggtctcagcaagaaaatacagccatagaatatctcaaaggaactcagtggttgcttttcaagtttcaagttttcattaaggacaaatgagaaaactccattatactatgcaagtgtgtatatttgtaagaattgtaacatactcatatcaactagttcataataaaatataaggaaaa

SEQ ID NO: 20812 - DNA, 4075 bp, Cannabis sativa
gaaattacataaagtaattaatgctatttttttttttttctaaatgttcttcttttcgtttgttgttttacacttttacagaaatatgttgtcggagaaattttgacaacactaaaaagaaactcaatctctaggctacgaaatagacaaaggttaatagaaaataaaagagacaatagaattatagtgattcacttagagctcagtctgcttagtcaatatttggtaatatttttttagtttaatttattagatttggatcacttctttatataaaaagtaattgcccattgggattacacaccggtcaattaggatcattattataataattacataatttaatgaataaaaaatgtttaaagtataacagtacaattttgtctgttcttactttaataacagcaatgtgtgcaacttattaagtcacattttgtccattcatattccaacatgcaggcctacaggctctgtggtattgtactcgcataatagtccttcaggcttgatttagttagatgtctgtggtcgtctttgattgcatatttggacatcacttgtgttgacaacttagaacatgtgagttcttagcgagttatcaaacacattaatcttttggaccaaacctaagtaaacaagcagtctttacttataacaggagagatatactcgctcatcacatataacaaatatgcgcgattagtactgacttctctcgatcttgtttcttttaaccatgctgggcatagtattagaccactatctcggtcgcatattcttgcaaggtaaattatgcgaggttgattctatgagaaccatactattgacacgtcattattattattattttttttttggaaaataggtacatgtcatccttttcacgtgttgccaacttacgctagggaggaaagcctcaaccgcatatctcaaaatgcttctttaagtgtcctagcatagcgtttttagcatatctcaaaatatattttttacagtatcgtagtctttccatcaaattttattgtgaaataaatgaagtggtggattatagttgataaatgaatgcaaattatttaccattcatctttcttatatgttaatgactaatggaataaaatattttttatataataatatatatttatatttttagttttttaatcataaaaataaaaaggatgaaagctatttaattttatcaattattatgccttattacgtcactcattttataataaaattaaataaaatataataaaaaaattacactattataaactttatatttcaaagaatattattaaccaattattattatatatgagacaaaacttagttgtataaaaatttcagagataaaaaatactaattattctagaaataaatacaagctactttaccatgtttatggtttccacactattcttctaacttattatgatttgtatttaattattatattcactactttataaaaagaagtgaaaaaaaatattatttcagaatcaataacatttatgagtttccatgttctattttgaattattatataggtctaataaaaagccaacttcaatcacacatatggaacaactttatttgattttttgatgtgaagagcaatagatttagattagattgattaccatgaagaatatgttctctttctgacaaattttataccaaggcttgtggtgtatattgagatgagataccaaccttcaaaccattttgcatcttaaaatgtgataacctaatggaccttttcattagttttgttgattataattgataaaattatattatttactattgaaaaaattaaaaaatatatataaatatttttatacactaaaatattagttttatctctattaagtgactaccatgcaataatggttgtttgttaactaattatgtagtggccaaaaatattaacctcaatctatatatctctctatctccttctcttcctagtctctttttatctttatgagtttttctctacaaactttccatggagaaaatattgtggagaaagatgaaatcaaatacaaaattgagttctttttattttgaggggatttatattattaactaattgatctagttctaacttactttaaaaatctttcttaaaaatttgggtttttgaaataaaattgttgacttcctaatcatgcaaattttgttatttattaaaactcatattgtcaaaatgtgaaagtctataaattgttaaaatagaataattagtatagatatagagacttaataatatgctgaaaaacaaaagttgggatttcagacttaaatttgggtttttattttttatttatcaaatctaaatatgataatgaccttagttgagtgacaattatttattacttaaaatgaatgattacctaacatgataattatttatgatggaaaaaattcaataaaaaaaattataaataattataattatttagttgggattttcttataaattatttccattcaaagtgccaaaaaaaatagatttttttatttttaaattttgtatggggtaatcttagattctttaatggtaaatttgttatgctatcctttaaattttggattttggtttaaaaattttagataattaagggaaggataaagtataacactaatggctctattatgaaacttttatttggatttttctaaaattatcatctatcataagcaaatacaaggtaacttgcttaaaaagaaagaaaaaaaaaagattaataagaaaacacaaataaaagttaattatttattcctattatatattttgcttattctattatatgcaccataaatgctaatcataaatcatatctatgtttgattttttttgtttccttattggaaaatataactgaaaatatagaaatgagttagttactataacaattcttccacgtgtaatttcctatttttttactattttttttttttttttgtatgaagtgtaatggggaagggaattactacttaaaagattaaaatggagaatagtttgctgcaattcacaaccttggatcccaggcctctcgaattttaaacccctggtgttttttgggaatgatcctaatatcaaagttgctgaatttatcactgatatgagacaataggatgttcaaaaactccaagttcactttgtcaacctgatgtggatagagttctttcaataccattgagtttgtttccttgtgatgatattctttcatggcattacactacatcaaggttttatacggttaagagtggttataaattggcctcggaagaactagattcctctctaccaagcagctctcatacatatgaaacatggtggcagtcgttctgggctttaaaattaccatctaaaatttaaatttttgcttggcgtgctttccatgaagctttacctgttgctgcaactttgcatcatcgacacatttcaacatctccccaatgtcctctatgtcagctgagtttggagaccattaaccatgcacttttctggtgtactcgtgctaaacaagtctggaaaaattgggatccagtgatcaattggcaattgtctaagtcctgctctttctctaattttttaatctatgtctcctctcaacttcagactgataaggttgaactcttcattacggaaaggaatgcaaaaacacatgctaaaactccaaagactacttcgcgtatcctgcaatttgctagcaactacttatcagattacaaacaacctcagaccagcaattttaaaacccaccaacgtgtctctgaatgttcaaactctcaggatactgctgctgcaagctgttcacactctcagacttttgctgcagcaaataattcaaatgcataggtttcagcaactttgcagcatcgtttggtgcctccaagtaaacctaaatggctagctccaccatcgggtagactcaaattgaatacagatgctgctgtcaatgttttttctagtgtgtttggccttggtgctctccttcgtaactccagtagtgatgttattgctgcaatggctaaaccaatgaaagggtgtgttaaa

SEQ ID NO: 20813 - DNA, 1926 bp, Cannabis sativa
gtccaggagacttcatccctcaccttcatctcatcaaacagcttatgagcatcctcgatgcttccacatttaccatacaatgtaacaattgcatttgaaactgtcatgaatgaaactaacccggaaacaattgcccggccatgaaactgggaaccctcttctaagcttgctaggttcccacatgagctaattacacttcctagagtaaaatcatctggctcaaccccatttctctgcatttcagaaaaaattctaacagcttcttcgctgtgtccattctggccataaccaaccagcatagccgtccaagacaccacattcttgcgtggcattctgttgaaaactgcatcagcatattttatgtttctacacttgcaatacatatcaacaagagcactccccacaaagacattatccttgggataagtcctaataataaaggcatgaatttgcttgccttcttccaaggccaacagtcctccacacgcagtcaagacgctcccaaatgtaaattgatccatagtcaaaccctccgatctcatatctcgaaacttgtcaagcgcttctctgcccaaacctttctgggtgaatccagtaatcattgtagtccacgaaatcgaatctttttccggcattctactaaacagacactcagcattttctatcaatccacaccgtaaaagcccagtgagcattgtattgtacataaccacatttttctccacaatcttttcaaaaactagctttgcatcgtatattaaacccgctttggagtacatatccaccaaaggactgccaacaaataagtataactcgaacccatatttcactatttgcccatgaacctgcctacccaagtcaacacaacccttacttgatgcaaccataagaatcgtagagaaagtaatacgattcaaactggcagttcgatcacataacatcaaattataaacctttacagactcagccaatgaaccaaatgatgcataccctgaaataagtgcattccaggagactccatcgcgagctggcatgcgattaaacatctttcgcatctcaggaagatgacccgttttggaatatgcagaaaggatggtattccacgagaaaatgtttggttcagacatttcatcgaacgactggcgcgcatactttatgttacccaactttccatacgcatcaatgagtttattgataagaatagtttctgggtgtgtcaagtttctgattatgtgagaatggagcttctttactagcgcatagttctgggtatcgcagcaaagtttgaacagaccaatgtagtagccggtggaccaacacatattggcctccaactaatatttggccgaaaacgacataaagttttcttctttcctcctttttgtgcctgcgtaactaaactacgacaacgaagaaagaggggcttatttatggcttctgcaactgaaaactcaactggagaaatttgtcaatggaagactatgggagtgtggactgtcacaagaggagttcgaaatgctgaaaaaagccgcgcttctatactgaacaaaaccgctctgttgaatgtttctttttaggatatcggcaccaacctaattttacatttttcactttaataaaaaattaaattttttaaggtaaaatctattaaactcaaatttattaccacaatgaattgtcaagtgtaaggtggacgtcggtcgatttagtcgggtaatagtatatttttatcaatccaatataatattaggttgcaaatatttaatcgtaacctgcccaatcaaaaattagagaaagttcaacccgcccaatgatttcgtcggtttggtcgggttaacctgtccaaaccgttctttacttttctttttataagggataattgcggcaaaagtccccaaaaagttagagttgatgcagattagtccc

SEQ ID NO: 20814 - DNA, 2891 bp, Cannabis sativa
ggcagcggcggcgccgcctaccacggcggtgccggggatgttttccgcggtcttgcaagtgtcgtggacgattagcatggcggaggcgtggccgacaagctccacgaggtggacggcaaaggcgtaaatgggagattgcttggtggggttggaggaggcgagaaggttgacgaggccaccggcgttgcgcgtggaatgcacgcaggcgagaattcgaaactcggagtttccttctatgcttcttatggttttgtatttgtattgactaagactacgctttcttgaataagtcaaagatagaattggtccaaccactgctgtcattatcaatagggcaaatactaatattgtaaatgtttgcatgtccagagcctgaaatttttatcattaattaaaaaattaataaattaatatttaacataaaaaagtaatattcttactgagtttatgtttattattgtaaacgattgtactttttaatgaagttattttcaactcaaaataaataaataaataaaaagaatatttaacataatattaaaacccttctaaaaattaatattaatgtgtttctaaataaaatttattatttattataacaagttttttgaatcgattttatattagtatattgataattaaaattttaaactgtttatgtagagttatattatagctatttaaaatattctaaatatattaatgtgacgaaaatagagttcaaatataaaattataattattgatatgttgaaagtaaaaatggttatgttgcatttttggatctgtataacttccttatatttatatggctatatatatttatatataaacttaccaacatgtctctcccagtgctgattataatgagtgcaagtaagcctttagtattcaacaaaagccctagagccaaactatcccttgccttcatcttattgagaaagtaagccacaataaaagtgctaatcactttagccgagaatgccaaaaatatcaccaacgacaccatccctaaccctactccccgtcgaaatatccaatggacatcggttctcaaccctatgcaatagaagaagagcggtatcaacaactccgaaacaaagtcctccatgatctccatcactgccctcttcaactccccttttggcaagatcacaccaaacatgaaggcaccgaagatggagtgagagccacaagagtctgtgatgtacgcgctgaggactacacccgccatgatgtacatgacatggtgttgcgtgtagttttcatccttcacgtacttactaataaggtacttgactgctggacgaagagcgaaaagcgagaatatgatgaagatggtagtggtggtgacagtgaatatgcgacctctactagaggtcgccataacaagaataaataggaaccaacaaatgatgtcagagatgacagacgaggttagggcagttcgacccacgtcagtgtggaggagtttgaggtcagcaagaaggccagcaaggtcaggaaagttagttgtggctagggctagcccccaaaagaggggcccaaattgatttggtgagtttctcgagatttctgcaaaattctcgagaagtaagtggtgtaaggcatagcctagtgggactgggagaatgatccctgccaccgcggtggtgacaggctttcgaccagcttttaggatgggctttaggtccacctctaaaccgaccatgaacatgaagtaaatgatgcctaaggccgctatgttttctagagtcataattgtaccaaatggagttaggtgttttacagcaaaatctgtgaagccaatgccagatggacccaacaatataccaccctgcccaaaaaaaaatttagaaaggttatgatatttttttgtcgtatataatagcataattatttttaaaattttacaaaaacacaaattactattataaaatatcgctaactaacagtatatcgatcaactaatcaatattttttttataaaaatacttacgatgatttcagcagctatacgaggaatatgaaaaggcctaacaagaagggttagaattcgattaacacaaagaataacaaaaagttgtgttataagagaaggaagagacaatgatgaagtattctcagatctccaaatccctgttaaatgtgttacaacttttctaaaacacaaattaatgtaattgaaatcttggctcataaaacatggttgcacaagaaataaatcctcatttggatccgtttcattacaatacaacaccattttttctttttattaaattaacaatttttcctaattaaatatatatagctaataatctttcttaatttctctcctatttttcgttggccgcaatcaccaccaccgacgcgtcgtgattgtcacccccatcaccccgccgccctcgatgaacagagatgagaatttagctataaaaaatatgagatttttttttctttgttttattttctattaggttttttttttcttataaatatttatataaaagaattgatggggttttagaaaatgtaggatggagcacctaaatagggtttattcacttctgtctttcttttctttcttcattgttaatttgttttggttgttttttgttttaacattatagttaacttaaacatatatattaggttagtttgttattgtcaatatggctaagttggattttaagttttatgttctgtgttattagctaattttatacaaccataatattaatacctatcatattttgtatatcagttattattagcttaattattatagagttttgagtggcatgcatatagtactaaaattttttataacttttttttgtagaaagaaatataatattttttttgatcataacaaaaaattaattactgtta

SEQ ID NO: 20815 - DNA, 7648 bp, Cannabis sativa
tgattggtattgagagctaggggtctagtggatggtgtgatatgcatttgatgcttgattttgtgattctttgtggtctctcaatttgtttatacattttaatactggtgatgagacatctttatttttacaaagctaaccatgtaggaattttattaaaccaagagattctttgatgttagttttttttttctactgggctttataagctcatcctctattttctcccattccaggaactcagtgtttgatagtggatgaggatgatggtattgttgaggaagaaagtcgttattagtttagtctttttctactctttaatcttctaatgaaactgattttgtatctaagctgaaatggatggtctgtattatttttcaaagtcctgttacaaatgtggttagggttatttatagcagttttaggagaggaaaaatgcctctattgtctcaagcgtccaccttggctatgcacaagttccaaaatttgtaaagtagggtatgtgcccctacctagtaggatgcatagggtttacgtgagaaaagaacttatccttgattgaaatgacattttattatgtagttgtgacttacatccttgattaacgcgtaatcgtcaatgaatgggtttaatgtgtctgacatgtcttttcatattcgtccgtagacgtttcctccatgttgcatttaatgtcggtgaatatttcatctccagtaccgtaggctcggtcaagctagatgttacctagcttccgaagatgaacaaaaggttgatccctccagacctagcatagttacacaaagaacctatagattatgtccacgaaaatcatgccttcttaagattttcttgagcaccttctggtctttaagctttagatgacacgtgtccagtcatggagttgccacgtatatagggatcaaaataaggcaatatttacccccaactcttatttaaaattttgtaaatgagacttgtatcttgtttctggtttcagggagtcacgtggaaaatatcctgcgtacacgtgggacatttattatttataatccttctgcctcatttttggcagggaacgattcaattcccacctatttgacaaaccctttcattaatgcagtggttagagaggtaatcaagcgtttcaatcgctcttttcctttcatgttgcaattttatcctgactgttggatcactgaaactcgaatcattttgaaccctcacaattagattgcacttgattagttctggcatttaccatgaaggacctataaacgcttatacctcatgtgactgggttttttactcactgtgtttccatttctaggctttaccaccccttttaacaaaattcctaactcctccaacttcctcttacttttcctccgccattgctaggcgaacttctatcgttgtacgacgacttccacttctgcattgccttcatcatgtaagtttctctttctcttgacttttctgtacgattaagcaaagtgtaatagtttgttgttaatttcttttttaaggaagattgcgcgtgcatgttaaatctagcaagcaaggattcatactcaacctcattgttggaggcaggaaatgcaaacctcacgccggccaagagtctcggtccgttaggggatatcatgctactctagctctagatccatgctcatttaatgccccatcgacataaactttccacgcaggggtatccagatctagcacaattgcaatattgggttctgtttcattgcagttgactataaaatcttcgcgggcatggcctttgatcgagacctggggtatgtaatgtatgttaaactggctgaagtccattgcccacttgagaagtctttcggaggcttctagtttctgtaggacctgccacagcgggtagtttgtgaaaactttgatcgaatctacctggaaatacgacctcaactttcttgatgcaatcaggaggcagaaggctaatttttttatcaaatggtatcgaatttctactcctatcatgcatttgctgacgtagtacaccgggtgctaaatcttttcctcttctcataccaatgctatgttaactgcattctcagagacagcgaggtacaagtacaagtcttccctgtgaaaaggtttggataaaatcggtggttcagccatgtgctctttcaatttcttgaatgcttcctcacactcttccgtgcactcaaatttttggcatttcttcaagatattgaaggaaggaatgcacttattagtggaatgggagatgaagcgactaaggtcaactaccttcgctgtcaggctttgcacgtctttatgttatttttgggaaggcatatctaataaggcttgtattttgttgggtttgactctattccttgttgacttactataaattccaaaaacttccttgatttgacgccaaaagtgaacttcttgggattaagcttcattttatactttctgacaacttcaaaacattccttgagatcttccgcatgatccacgcttgtcttagatttaaccagcatgttgtccacgtagacttccatattcctttccatgagatttttgaacattcagtttaccatacgctaataagtagctcttggattctttaatccgaagggcatgactaggtaatagtagacccttgtctgttctaaaggtagtacactcttggtttgtgacatgcatttcgatttggttatatcttgaatatgcattcatgaaggacaagagttctaaatttgaggtggcatccactatctggtcgatcttgggcagtgggaagcaatctttcggataagcttagttcaagtctgtgaagtcgatacatatatgccatgttttgtttggcttgggtaccaggacaagattagccaaccattctagataatatacatctaagataaagatgttcgagagcattttatccaccttcttttccaaagcgtctgatttcacctgattcagtggttgtcacttttgttgtaccagaggcatgattaggttgacgttgagaaatgagtaatgacatgtgggcttattctagtcaagtctccatgacaccatgcaaatacgtctgctgattctttaatggtagtgataattttgcttctctcgtctagacttaatccatttccttagtgtatatccttggtttggtcttgatcataaattcctacttccttgatgtcttccacgtgctccaatgcaattttagaaccaatgcgatgatccaactcatcttgactttgtgagaacgctatcacagtcccatggatcataaaaatggacagctacactaccacattataacactgtcttgcttccccttgatttccacggactgttcttatcctcattgtctgagtaggaaatttgagaaacaagtgcctgattgaagttactgctacaaagtcgactaaatttgggcggcttgaaatagcattgtaagttgtgggacaatataccaccacgaacgtacaatatttgaatgtgctttgtggggtgtccaaacatagggtaacggggaatctcactttccccataggaagaagggtagtcccgttaaaccgtgtgagttgtgaacttctcggggagaggtctcaattagtgagtccaattgccatgaaagcctctttgaatagaaggttcactgaccttccattgtctactaaaatttaggcaacaattttgtttgaaataggagttacaatgaccaaagaatcgtgatatgggaaacatacttgcttggcatcttcctccgtgaaggtgatgggttgatccatgagtcttggtctttggcctaagagctgactaacttccatatctctccgtcatgatctaaggccttggcataatgcttgaactcattccttgtggtccttcctatatgcgaaccccctgagatcatagctacctgtccatttggccttgaaggctgcccatgtgccttttgatgggggacaccacctaaacctacgtgggcgtttgacagttgcactggtactccctaaggcaccgaagctccaacttgcctagcatttaggtgcggtagtttatctttgatccactcataaagtggcctaatctaattaggtaggatattgtgtattcgcttggtgggttcgattactccctggcgccgtaaaactagattgagccaaagcgagagacaggttttgagtataccttggtattgcaaaaaattgtacctcacttgtttacggcgcaactgggagggtagctcgcgaaaactatgttcctggaatataccctggtccgtcggtcgaataatatcctccaaagtctattatctgcacttcttctaagtttatgtacttctgaaccctcttctaaaagtcatgaaagctagcgtctcctacctactggagtttcggtccttattctagcttagagtagagccaattgttgtccatcatcaacttttttggtcatggaggcttcttctttgaatctttctatgaagtttttcaaggtctcagtttgcagttgcttaatgttggtcaaagcacttacttcgaggttaattttcttggctgccactaactgtcttcgaaagctaacttatagcttattgtaacaatctacggatcttggttctagcttcttgaaaacataaacatttttgcgtcattgttgatcctcatgactatcattaccggtttaatcgagacgggtggtcattggcgtctgtatctcctgtgtacatcgtcatttcaggcacttaaaattattggtaggctctgcttgaagaatgtttctagagcagggctcccagttttcataatcagactcaaaatcatcaccctttttcctttgagaatctttagctatatctttccagaggataccgagttcagccaagattccctcatttaaagcgccctttaaaacttgtattgcttatttctttttctcttagtgattcctaagatcatcgtgcccatcattaaacttctttcgtaaatcaatatggggttttataacttttcttccctctttcccttggctattgatgtacggataaactcttttggtcttcccagtcctgagggccactgctctccctagggagcctgcccctgtacggaccttttccctttgggaaatcgtagttgacctttcgcggatcctgagccttgtttttctttcctaggaaagatcagggatttttctttggataaccttccaagggatatcaaatagggctcgactcccaatttttacgtcttaaagtacttggtgaagattcttatcttgtttcgtctggtccatgaggcatagcttttcggtgcacgtgaatgcctactgtttccatggccttctgcatggcgaccattatctcttgcatcttccagtttttctctttctagactaccagctcaacctcgtcatcagcaacttttcaccttagggccagtaactcagtgtaactacagtcctcataggcgtcatactcttcatggttttcttcatactctacatcattcattttgtcttgttcttttactttcacgtctacttgtgaagctgcttcttcatcccatggtcctctagaagcttggggggatgaggctggcgtgtatggtttctagtgtccactattgtactctgaatcttcttatattgttattttgtaagtgaaaccttctacaactctgaatgaaagcactaaaatgttgaccgagattttcagcaactaaatgattaatgtagtgaaaatgattagaagagagtaaatgcaagtatttttatgtggttggggcattaattaaccttagtccatgagtctctggtatttaatatagaggtgtttctttacagagaatattttgttctattttttatccacgttacaaatgtggttgggggtatttatagaagtcttaggagagcaaaaatgcctctattgtctcaagcgtccaccttggctatgcacaagttctcaaattggaaaagttgggtatgtgcctctacctagtaggatgcataggatttaaatgagagaagcccttatccttgattgatatgacagttcattatgtagtcgtcacttacatacttgattaacgcataatcgccaaagaattggtttaatgtgtctgacatgtcttttcatattcatccatagacgtttcctccatggtacatttaatgcagtgaatagttcatctccagtaccctagcctggtcgagctgaatgttacgcagctcctagagatcaacaaaaggttgatctctctggacctagtcatacctccaggaggacccttcagattatgtccacagaattcttgtctacttaagattttcttgagcacctccaggtctttaaggtttcgctgccacgtgtccagtcgtggagttaccacgtatattgggataaaaatagggcaacaagtatgtatacatattattatagtggtatacatattttttcggtatcaatttagtattgttatattttttcattgtatataactttattactacgatatattaattttcagtgatacaatatattaaatactattgtatatatttaataatttaatatatttcttcgtttttgttacaatataatactatacaatactaataaaaaattatataacttaatttaattattatatatatatttttaaaaataatatatagtaaatatatttttataatttttattaactaatttattatatttgatgattttcataatttttttaacaaatacatttactaacttaattcttaaactttgacaattttacatgtcagtccttttgatattttacactaaaattacccaaacaactatgtttaagaatgaaaaataaaaaacttaaaaaacatctaccatcctctactagtgtacatatatcccatatttgtatttaaattattgtgaaaggttgatcatttatgttagaaaggaagggatttggttatatttccttttctagagcgttaacgagggattgataaaagcaatccacaagaggaagacttcacgtcctattcatatttatttcttttttctaatcaaaccaagtcctattcatattaatgaagaatgttttgaactctgaaagttacaactctgcaaattcatggctaaaaagtatttgttgctcaattatttttcattttctctctcgaaatgtttactcgtctatcttctttacgcggcccaaaatccttattcacggattgttgcgctagcaagattaatttcaaaccaaaacaatgacttgggcaatttttaaacattttgacacgatgactgagagcctgagtctgcttcctatgaccacaaatgagttttcataccagctatatgcaaatttgtagagctcgattacaatctatatattaggctccacatatataatataaaatacaaccatttcctccttagcatttatggctcatctaacttcttttctgtcagtcacttgatcattattagcagaggagtgctaccgtcaaccttctgttacaacctctcagtcaatcttcacgcccgaaaacacatgtcaaaatattttttttcaattttttttgcatgggggtgtttgttatgtttacaacatcatcgctgtaaatttttgaaaaatttcga

SEQ ID NO: 20816 - DNA, 2204 bp, Cannabis sativa
agagagagagagaggtacagagaaaagagagagagattgagtttaggatatgtatgaataatttttttgtagatgaagaaaattcttgggtaagagtgtgagagataaacactttgagagaatccaaatagagaatcctcttgattgtaattgtaccctgttcctgctcaatcaataaagacgattttagtggtgttccagaactagagtagagtcatagatcacatcgatctagaagacttgaaccagtaaatatcttggtgttgattttattgttttattgcttaaatcgtttctggttgtggttactctgtttttccttgttttatcttcgattcttgttagtgaattattaatcttatcattaataatttgttcagttaatttgattttgcacgtattagttgtatttagttttattttgtttgagaagctatatttccttttgcatatgtgtccataaattcgaacaaaaaatttactatttccttttctttttataactataatcattaactgaaatccttcattaactctttacattcagtgaagggcttcatagaatcctttgttctgcttcacgcagataaagaactttacaacttatgcattcagatagaccaaggaaagaaagttcaaggacaaaaaaacaaaaatccaaagtctaccacgtcaaaggtaaataatattagcggagagaactttacatgaatggaagcttaactgaaaaaagcagcttctcaaacattagtatggaagcttctatgaagaaaatggcaaatattttgtggggagatctatatacccaacatactaaacataaaacaatgcatgtacaataaacctaggccatggtctgtgatgttgttatggacccagcagacatgtgaaattaattaccctccaaaggtagcacaagggtccttcaataataaaaaacgaatgaattaaatatagtttatgaggaagtgaaaaagaatacagagaaatttgtcatattagtttttgcttgtcttcaacttcttttgcgcttggtcagagtcattgacactagcaactctagaatgttttattccttgattgcttgatggaatctccttatcctatggaccacaaaagaagagaaatatttggtgagaatcccatacactaatgtttttttttgtaatcaagtccaaattttaaggaaatttatcaactagtggatgaaatgtcactttgttctatcatcccatcattatagtttatgattaggagaatagcataaacacaatctgtttaccttagtagtggatgttgacgcagtagttctactactagctcgcttaccgagctcaatttgcacagagatgctagcttgtgacaaatccacgcctgaatgctgcagtgcttgtgtcagtgtatctaacaacctgttttgacaccaaagatccaccatttgaaaaagaaaactagaatgatgtgatccaaaaatttaaacaatatttcttgcataactacttgcaaacatatagtcgaaagcaacaggagtatattattaaatctacaagttttagacatctgcacctaaaatatttaatagaaaacaaataagcgtaaagtatagaatgctcacccttgagaatatgcagtagagatgctaatcgtaccaccttcaatagtaagctcttcttccttcagcttatcacttgcaatagaaccatcaactgtggtacacgatctagtctggcataactgagactgaggttgaaatgatctattttccaaatcagatggcagcctaggtggacaatgagatgatgcaccaccatttggcaagaaaaaatttggctgcagtgacatgggaatagtcactcccttatttgttacagttgtagtactaatgtcggattctaccaggtgctgagcattccctggagcttttggaattgcagtggcatgcttctcatcgaactttgaagcgaaaactaatggaggaccagacacaccattcaaagcttgagaatgatcaaaagcttccccaagcctatgattgtttctctagttcaaatgataaaaaaacagttaatatgatgatgttgtgagtgtaaccaaccattacatataattaatgaagagaaacatcatacattcttcacttgatattttttcagtagcataagaatacataaatattactttagtatttttgacgaatggtaatt

SEQ ID NO: 20817 - DNA, 1707 bp, Cannabis sativa
taaagcacatgtttggatccttagtatacccttcccagccatggatgtcttattcaagacttacccgaccatgggtgctcaccatggggtctggccagccttagggggcaccctatgagctggccagcctattcttggaagtgaaattcctggccaaccttacgctaggtcatgacacctggccgtccctctaaggcttaggaaccctaaccgaccaaggccaaggttccaagtgagcagctagtcttttgtccttttttgttcccagctagggtctcttgacgaccttgtagggatatacaaatgtaatcatatcatggtttccttaggaactctgtataagacttgttagtgagtccattatagtcaattgcacaacttatgactcactaattgtctaagtagatgtacttgagacggtacttcactaatacccagccttgtataatgtgagttacctagaacgtacccttacgtacaattgactagaactttgtttatagctttgtcaggttactcacttccccttgtctcttttatgcaggtgatttagagtgttgatctggggaggttacaacagctatgtaataagtcctgtcaactttgcttttgagagatagccttcagtttgttcccttgctccctttgagtgattgtagactgatagtcatatactatgtccagaacaaaacaatcgtatcgtagtgcaccaccatatgaacctcatattgcaaggatggcaagaatgggcagagttagagctgtagaggaggccacacagccccgtgaagatgtagatctataggtcagctaggtggaggtgcctaatgttgaccaacaagctgagagttttgacactgagtctcaggtggaggaggtcgtgcttgttaggaggaggacatacaaaacttgtgttgtccttccccattggcctctaggttgacatgatgtcgatgggtagccattgaacagactaggccagctttcagtgatgggtatggaccatgtcttgattcaatcttcaaagccttaagttcttgatgttggatcatagggagacaagtgggtctctcctgtatttactattcttgcatagacttttgactggatattggccaatggattagtgagaggtgtccagtgtgagatacccacgagggattcgagagcacactggcttgccctcagttggatcgcatggttggagcgccatatttagtaggggcagtgttatcgctacacccatacttctaagagattgcggctcactttgagatgtgtccaactcaaatcaccctaaaaaatgtaaaatacctttcagcaatgttcattctatatgtggagctagatggcctcaacctactccgtatgagattagatactattttgatttatgatctgctccaaaccaactaaatggggtatttccacttcacttaggttggccatcagtggttgggtgacaccaatagcacatctctgttgaaagttcatggatatgcccaaaactacttcattgcctgggatatccatgagattcgacatcaccgcttccaacaagtaccaacatataactgctctcactactaaaaaatcccaaattcccgtcggttttacactgtcggccaaagaattcccgacagttcataaaaccgtcgcctatacgagcgtcgcgaaaactgagtaaaattaacgacggttgaaaac

SEQ ID NO: 20818 - DNA, 2133 bp, Cannabis sativa
aaaaaaaaagttaggactcaccgcttcataagtcaaggtcccagatcgagagacaattccaatgcgtccaggtttatgaatataaccaggcataattccaattttgcattcaccgggcttgatgataccagggcaatttggcccaatcaaccgagtcttagattgcctgttaatagcagcctttactcgtacctgatatttgtatattgtaatattagcttccaggctacatttacttgaaaaagaaattttaaaactaataggacatcaatgattttttaaatgagttcaaagttaataataatcacttcacactattaaacaaaacgagagtcaaaataactactgcactagaattagacacaacatccttaaaaacagtgacttgaaatgaattcataattaaatttaaatcagaattatgtaatgcacattaccatatcatgttgtgggatcccttcagtgatgcacacaacaagatctaactcagcttccaatgcctccataatagctgcggcagcaaatggtgggggaacataaataactgaggcattagcctttgtttcggcttttgcttctgcaacactgttgaaaacaggaagtcccaaatgttctgttccacccttctttggtgttacaccacccacctaattgagcaaaaccaaagcaactaatcagatataagagtgtataaaagcatgaaaagaaattcaaacgcgtctctaacaccacatctcaatcactttttgaaaacatatgcatatttaagtggcaactcttagagacttaacagccttcaatgtcatccacatcgcatcttcttctagtttatttaaattactctttaagagcttcaacatcactactcctttttattttgtaagaaataaaggttatgattaataagatgcactccaatttacaaccatagaagggaagctactaccatcttattaagaaagaatagcttattattgacttaaaaccatactgagtattgaccaatcattaagtagcatgaaaaaacaaaaacaaaaactttaaatcccatatgttaaaaatccataaagtctcccatttaaaatccaagatcactacaactttctgtagaagtcaaatcatctgcagatataaccaaaattctgatcacatttctattccacctaaacatccagccattttgtaataattccttgacctccccctaacactagaatctttaagagacgagcatggctacttgacctaaccctcctcattgtgaggattttaaatcctacaaaactattccaaaatttccctatattcccctccttttcgctaagatccaagaccaaaggtttttttttttcaagctatcaaaacggacctatgtttgaattctacagcttccattctcatttctacatcaattcaaatttcagtttaccacagatcccgatacactaattgcagtagaacttcaaatacttttatataaaagtaaaaagattggaaatgatttgataccattttggttccgtattcgatggcttgctcggtgtggaaagttccattcttgccagtaataccttggcatatgacgcgagtgttcttgtcgacgaagacagcagggggtgggggaggagccgccgcataatggcgaagactgtgagctttggctggtgaagaaagtagggaagaagggcggcgcgaggcgatcgagccgattagcttggctacggcttggcgacccatagctcaatgaattgtattcttgtttagagccctttctgtcttccttcccaggatctcaggcagaagaaggaacctacgacttctctctcttctctctctctctctcttctctctctctcttctccgtatgtatatgggcttcttgacctaccataaaggtccattactcactcctggatcaagcctactcttttttatgtttcaacaaagaaaatggtttttttcaaaaaaaaaaaaaaattgggaaatttacaaatttatacattttgtatctaatttataataataaagttaaatttaatgcttctgactttttttgatatttttaattatttttctctatttttaaaaataattttttgatttattgataaaaaaactaattaattaccatag

SEQ ID NO: 20819 - DNA, 3405 bp, Cannabis sativa
tccctttacctcttctaattctaaaatagcttgtttagaatcgttaagaaggtttttcttcaaggtctccacctcggtcttcaagtctttctcaaactttattaataactcgacttccttcttaagataagaaacctctttgtcaccatcattcttttaggtggcaaatagctcgcgatgtttgttagtcttactcaactctacgtaaagatgagatgagctttgatgatgggcttggaggcccaggattgacaaaagggaggcatggataaagtattaagataaattctttaagaataagagagagagagagagagagagagagtaaaacaaaaggtgtgggagagagtgagaataaaataaaaggttagaatgctaactgattgtaaaattctgcggtccttgtcagaacgtcagaagttgtgccaatattaattaggttccaatcgtaagtcctaatgtggcgatgcggctgagttatataccaagaacaaaccttcgatccttcaatactggcttcctaaggcaagagacatatgggatccattagaactaccgcggggtaagacaaggtaatttgatggacaaatcccaaggtttgattttccttgtctgtcacctcgaaagctggtataggaacttcaggggttgaattattatttttctccaaaataatgcttggagtaggggagcactcttcttagtattatttttcttcttacttagagcctttcgctacttctcgacggtgtcaacctcagacgcacctcccgttttagcctatttaataagcactacaaggctgttagggaggttttcaaagttaaagtccatatatgtaaaataagagaaaatgattggtaaaagagaagaaaaaagtataatatgttgggagagaatacataaatactctatgcaaaagcgtgaaaaaaaatattcaacctaagctatagttagaaaaattagaagatgcacgaggaggcataaaatcagtgtgaggagacttgataataggtgggtcgctaaatcccctaaactcagtgatatcataaagattaaatacatttagaggaggtaactcccaatcatcggctcgcaagttatttgtcccattttgataagcaataccataaaaagaactattgcacgaggtttgcacatgagacttagggtaccaactatcaaacctatgggttattaagttgacgcagatccaaatatgaacattatattgagtatctctaaactttactaagctcgctggcttggtcttatggacggtgggagaccatccataaaaacaagaagttttacctcgaggtgccccttctgcatctcggtagcttcctgagtggttgaattattttcataatgggttttagtgacatagtcatgatctttcttctcctcgagcattgggatttgtttccatgtgggtacatgggatccttaaaatccattatgcactggtcttttccaagacgatcatagaacattaaattttggtcatgaagaagaaaatctacctttcataggccataaggcaagttcaccaggatatcatgtcgcctttgaattacagctattgggattggtctctttgaaagagctaaaaaaacgaacaagagtttagtaaaaaaaacaatcataaaatcctagctcaaaactaaaaatttcagagacaatggatactataaaattctgaactggataatgttgattggatgaagccttatggtccaacagaagtcatgcttgaactccattttatttggaagtttaatgataattttattatcgaagtttaatgataaaatcctagctcaaaactaaaaatttctgagacaatggatactataaaattctaaactggatagtgatgattggatgaagccttatcgtccaacagaagtcatgcttgaactccattttatttgaaagtttaatgataattttattatcgctgtaatgagtacccaaataaaataagccaccctaaataaatcttcctcacagggcatgccttgagagcataaaagcacgtcatctcgaagggagagttggacactaccaccgtacgctatgatagagtgacttcaagcatgctaaagatcctataagtatttaggatgagtagaaaaggagcaaccccgaaataattacaaaaattcttaaagtattaccaaaggggaagattaacccctgccttaacatgctcgatgctctaagcaccaatccttgaagattcactagtgctgtaactttcatcatggacagctgagttaggaaaaacaattgaacttgcatggtgtgattgagcaaatatagaatttttcctcattcttgatactgtaggaccatagaaatggacccacatacgaagtaatttgatgagaacactaaggctaatgatacaagtaaagttccagttggcccagtgacgagggcgcgagtcaagagattcaaagaagaactcaacaacttagtcaacagagttttaaaacaagtggagactgcagtcaacactgaagtagaacaaagatttgtgcttctcatcgaagtagactcaatttagaccgaaattgagcttataacgtttttgacggcatttggcagctttccctttcaattttgtttcctttattttgtctttattttatttggaaaattatcttttttttagttttctttttttttttggttgtaagttggctatataaagccttgtaaacacattgaaaaataagaatattttggaataaaattttgagaggttttcttcttgagttcttgagagaattattagaacttatcaaggagtattccttgtggcattccacctaacttatcaaacggatttccaccaccatttgtggcagtcttccttcataccaaggtttatgcttaactaagcattgggtcgtggtttcacatccaaatttcgacaattcttagtggctaccataattggtattgggtttcatcacaactgttggtgttgttcgtatcacaattaacctaaccctagattcaatcaattgagccttgaattggactatgggctaagttctaaggtagtttggacttgttctctttcgaagacatgatgccaaagtttagtttacctagggaaacaacaatggtaacctcgaataaaattaaaggtctttccaacgaatattttgttaagctacaagactctggccaagccgtgtctctcaaaaagcaatgcttcccatcaataaccttatctataaaacgtttaaagcaagtaaatgttttttcatggtaaagtttctattgaataacctaattctctcgttgtttatttctaatattggttttcgatgtttcagctgcagtttgaagagtaaggcaggcagtcttagattttcttattctaga

SEQ ID NO: 20820 - DNA, 1326 bp, Cannabis sativa
  modified_base (1269)..(1276): a, c, t, g, unknown or other
tttgtatggtcagaaatggccccatacaatatcaaataataatgtatgaacacaaatggatctttctcatcagcatattgttttttgtcatgtgggccgggttttggttagtacatctataaatagggtaacaaagcttgagtttttaaatatcaaaccagaagatcgagctagtgtatacttttatttccaccaagcacagtatcacttagcttaactataatcaatggctcagcaaatcttaaccccaaaaactctgcacccaaaatttggaaactatgtgacagtcctcagtatcgatggaggaggtattagaggaatgatccctggagttattcttgctcatcttgaagctgagcttcaggtacacatattatttttaggctttttttactttatttttatcttttataacattactataacaaacattaattaatacatatataaattatatgtatatatgtacagagaatagatggagagcatgcaagaattgcggattactttgatgtaatttcaggaactagcacaggtggtcttatcacagccatgctaacagcaccaaacaaagagaataggcctatgtatgatgcaaaagaaattgtgcccttttaccatgaacactgccccaagattttcccacagccaaggtcaaatttataatagtaatagatattgtgtctcaagtctttgttatttaatttattaaatattaataatttgacatatacattatttattatttataatttgtactttggcctactgataatatttagtaaattattttacaaagaattatcaaaactatataggccaaagaaattcaaaataatttaagaaaatgagatcattttgctaattatttcttaataataatattaatatataatgaataattgcagaactttacttggttgggctatggacacagtgaaagatttgacagggccaaaatatgatggaaaatatttgcatcaattgctgaaaaagttactaggaacaacaaggttgcatgacactttgacaaatgttgtcattcctactttcgatatcaagaagcttcagccagctatctttaccagttatgaggtattattataatttatagggcaaataccattttggagtctgtgttttgcaaaagttatcaattggactctctgttttgttaaatgacaaaatggatcctgtattttctaaaatagtacaaataggatcatgaattcatttttttgtcaaaataaaatttaattataatccgannnnnnnntgttatgacaaaattgtttacattttctatagggaaatttacatggtata

SEQ ID NO: 20821 - DNA, 3584 bp, Cannabis sativa
  modified_base (38)..(48): a, c, t, g, unknown or other
  modified_base (3528)..(3538): a, c, t, g, unknown or other
ttttaaataaaaatattatataaaatacaatttaatannnnnnnnnnnaatacaatacggtgtaatacggcataccaaacgaaccctacttgatcacaagttcacaactcataaaagtttcgaaaagaaaatcaagaatacaaatacatcatctaatgattctcttttaacaatatttttattggtatcaaactgcatatatatatatattagtataattgctagcatattgttatattaattattaccaattatttaagtgctaactttcaataatgttgtaattaaatagtaaaattttgcatatggaaatagtatatatatatagaaataaataatttgataaaatcaaaaataataaattataaaaatttgtgattataacactaatatattagcattcaattttttagtataattacataaatttaatagtttgtttttttaaaaaaaaaaattaatgataaatttaaggggttttttttgtactttaaaagtttttttttttttttttgtacttttagaaaattcacataaaaattcacataacaactaacgaaataatcaaaattacaatcaaaattcacatagcaacccacataaaaactatcagaacaatcatgggaacaacaaaaactttaaataatttttaaaaaaaagttaaaagatgataaataaagtaattctcctatatttaatcactataaactttgttgtaattaacttttgtggtataaagttattacattagctaattaattatgtatatgtccacataaatctcccttttggttggtttatatcgtattcttaactcataatttgtcctaatttgtccttttttgtcctttcaaaaaaaaaaaaataataaatttgtcattttatttttatttatttatttggcaagtttagctatcatcatcaccatgagaggtgattttaggtgatcatgagatgatattatatatatcttttgcaaagtgatatgatcacccaccttttcttttaataaaaaaataataaatttaatatatatataagactaattaatagtactcacaaaaatatctaatgaagtagaatatataaaaataacatatataatgggtctttattctttaacatcaatttttaattgagaatttaagtaatcataaatctaaatattaacatatgattgaaaagaaaaaaagaaaaaattaaaaaaacatataaagacaagttcatacaccatccaataataccacaaaatcaatctaaacttaaaaattaataaaaatgaaattaaccattttaattaaatttatatatatataaataaatgattgaaatttgttaggtttagcttcttaatttcaattcaagtgatgttaagttgaatggactgcaaaaaataaattaatatatataagagtaaggattgggctttggttaaaaaaatatttttcttttaaaaaaaatgtatttgtttatggtctactcaatctcaaaatgggtcttgataggagtaaataaatttattgtattgtaaccctaaataaattaataaataaaaatcaggctagggaggcatgttaaatattattattaaagacataatatattttttttaaaaaaaaaagattattaattagtcaaatatggatagctaattattgaatgattctgtttggtgggcaggagaagtactaattaatctcacttttccaactcttctctatgaaattataacttgaattaccttgtttgttggagtagtacaatactctcatcatgattaattaattaattattatacattattaattgttttggcatttatatatatatatatatgtacactaattattaattatatataatataaaagtgttccactttatatagtggtgggattcctagtcagaaataactaattaatatgatccattaatttcttgattaccactacttccatgtttataagtgttacaaataattatataaatattatatgtgatataatatatacatttttgatatgatatatatatatatatgatcatggacattttcaagcaccactaagaagacatatgttaagtttaaagtcacgttttgtctctataattacaaacatatatttatataatatatatatatattatataatttgtagtagtaaattaattcattacacttttgtttataacacgatccatgcatcttttattattcacgtgaaaattcattaattaatatgtttttttttataactaccaaactctccccacaaaaaaatggcaaactccttttaattaaaaaataaataaataataattaacgaactatatatataataccatgactatatctctatgcacatagatatttgttatatgattgaagataataaattatttgactcatcaaaatcatatgatcattggtatttgtatgttttaaattgtctaattactatgattaattaccgagtttcactttaattcgattatcaattcatttaattaattcaagaattaattgataaactttaaatattgttgagttagcttgcaatgtttctttatttttttgttaatcggtctgcaaattaaactgcacattatgttgatagaaaattttgatggtttgctgatcgtatattttacaggagattcaataccgtttaatttattgtctatttttattgagtgattgctctacttaataaaaatatttgttaaaaaaaaaaaaacactatatttcaatagaagattttttttgtttttctttttatagatattacattttattcgtttttattactatattattcttcctcctattttcattcaatcaacaaaatagaacataatcaaacaaataatattgctataagtttataacactagtaatccccaacattatctagaagtgattattacaattagttagcaaaattttataaaaattattatattaatttatatgagacctgataattaattacactaataataatataatatcattaaagatattaggtatcactgtaccttttaacatttctcttaaagaaagtatccaaaaattaatttcttagatgatattctaaaagcggcagtttttaaagtattgtttggtacataataaataaatacgtatatagcttttgtcaaataaatacgtaaaggtacaaatgctgcctactgttaaatataagagtattgatactaggtatccgtagtactgttcaacactttttataggtggtactttacgattagtttacaatattttctaaaagttattttcttaaattatatgagactttatacttaattacactaatattgagtctcacataatttataataataacttttatgaaatgtcactaatcaatcctaaatactacctctaaatgctcaatatattataattgataaaagaaaaagaaagacataaaaaagaattaattagagaatatgaaacaaactaattgatagtggggttaactatgatccactacaagaaatgtcactnnnnnnnnnnnatttttgtgctggcaaaagttaatattgcgctggtaaaatagaatt

SEQ ID NO: 20822 - DNA, 2717 bp, Cannabis sativa
gggtgaggctactgggggcctttggaataatctagaatggtacgagctcttgcttattaagagtgtccaagtctgttgaatgcatggtttgctctatcctttatattttgtattcaataaactcttatcaattattatttctctcgatccctttggctgctatcctagcaggttgtttcaattggtatcatactttttgatttcatgtcaaacattattggagtccatgatgaattgaattccattgaggaggtagtgaaaagaataaaacgaaatagcattggtgtaatggagcgcttggaatttccttaacactcatcaaagcagctaaggtgaatttggtgttgataatttaccatttgatttgcctatgaaccaggaatgaaggctgactaattagccaagtagacaacaaatgagttaaatcatcaattttattgtgaacacattaaaaaaaatcttttacacaaagcatatataatgaattctttatcatgatgttctaagcttctttgaatttctaataaatcagttatttttggactaagttgaatattctcatagctggctacaatgacttcccacatgttgtgtacattatcttgctcttaaacaatcttgaacatgttttgttactttaacactgtgtttggtaagaaggaaagaaattgggagggatggaaaaatttggaagggaagaataggaaataattttatattatgttcggtaaccatgaaggagagaagttttaattttaataattattagtgagggtaatttagtaaatttatatgtacatttttatcttttcttattttctctccacttttagatgggtagattttggtggccccatccttatttttctcttccatctttttttctctcataccaaacactcatttttaccatctctccacttttctgtttttaacttttctatccttctatttttccactattccaaatatagagtaaagaagcatcattatattgttgaaacttaatcttgagtagacatgatgaggaaatcatgtctacttgatgtctatctagtctttcaagctaaagaatttggaatctgcttttcttttatgtaatctatcgtctgaagtttcattttcatgtgtttctagttattcactgctacaaatctgccatattctcaggttttgggtattcaagaatttttcaaagcaactacagatgcctcagaggtacgcgggaccgttggttgctaaaagaagttggaatttggaattgtatgaatggcaatgcatttgtagtcttctcactccaccaactgagcgttagtgtagaatctctgcattggccaaagcatttgcttgttttttacttgatagagctcacaagcttatattacaagccgagatgcatggaggtgatagttgctagctactcttcggttgaaggaattggacatttggctaatctgttaatagacgtggttaaaccttatgaagtgaaggtttctacgtatgacttctgaatgtcctatgtagttaaaggaaagttgtagataaaacttatacaggtcacaatcagtgttagtgaatcttgttgtgtagaaattttattaataacttaggtaatacttatattttttaatattttaaatcacaaaagttaaagtagagtttttgtttttgaaaaacaaaaatgtattctctaactatttatgttttttttttgctaattttaaaagcaaatatagtgtattttgtaactttaatttttatatttcttttatcggtttcatttaagtcggactcgggctttgggccctgacaaagacttgaacttcaaactcggacccaaaccttggccaaggctcaatctgggattcgggtttcagcctcgagccaagatccgggcttggggtttaggatcggggttcatgttcgggtctggaatccaggtcggggtttggagccgaggccagagtctggggttctaggtttgggtctttgtcagggtctaggtttagggttgaatcgaaaatattgatgaataaaaatacaaatagactataatcaagaaaaaaaaaatctatttaaaattttgttaaaagagactttttttttaatttcgaaaattttgattctcatttttaaaattaaaagtgaaacaattttataaaacatgttttttaacttttccaattagaaaaaaaataaaataaaaatgtgttacataactcaccgtatatgaaaattgtctggtaaatcctttcataatcatttaggacatatggtaagttcttttatcctaaaaaaattgaagtatttaaggtaacgaattagtatttgaacaaattattgcacaaatgaaccaaaaaataggcacactttcaatagattatttgtatattaattttttatatttaataatttagaatgtacagaaaatttacttgatgcccttaattgttagggttttatgccctaaataaaacttattctttgtaatcttattatttatcaataaaagaaatagaaatctttcttgacttagtcaattgcttggtttacatatttattttacatgattgtatatttaataattaaattctattaaattcaaaacgtatagttattcataattgtagtgatattatcacagtagaaaataattatgattacatgcttcgaatatttaaagtgctatcataattagtacactgaatttacactaa

SEQ ID NO: 20823 - DNA, 5873 bp, Cannabis sativa
  modified_base (901)..(924): a, c, t, g, unknown or other
  modified_base (4277)..(4292): a, c, t, g, unknown or other
  modified_base (4347)..(4355): a, c, t, g, unknown or other
  modified_base (4494)..(4495): a, c, t, g, unknown or other
  modified_base (5715)..(5717): a, c, t, g, unknown or other
aagttttcaaaatgtataagtttttaaaataattttttttttgcaccttttttgtaattatgttatttttgttgtacaattattaaatttcctttttataaagttaaaaagataatatagtgtgtataaagttatagctagccatgaagtagtgaagtactttcaataagtgaagagaaaatgttgtcccaaactttgttagccattttcctaatcaccgtcggaactctatgcttcattctcaaccgacgtggctcccaaagccaccacaaacatccaccaggtccatggcctctcccaatcatcggaaaccttcacatgctgacctcacttcctaaccgaggcctccaaaacctagcaaaaaagtacggaccaatcatgtccctcaggctaggccatgtcctaaccgtcgtcgtttcgagcccggaagcggcagagctgttcctaaagacgcacgacactgttttcgctagccgacccaaagtgcaggcctcggagtgcatgtggtacggcaccaagggcatggcgtttaacgcctacggttcgtactggcgcggcgtgaggaaaatttgcacgctccacctgctgagcgcgtcaaagattgactcgttcgctgcgctaaggaaggaggaggttgggtctatgatggcgagccttaagagggctgcggcggcgggtgaggtagttgatatcagtgaattggcggggaagaccatcgctgatatctcgtgtaggatcatactggggagagttagagatgaaagctgtgacttgaagggtcttgttagggaggctttatccttgttcggagctttcaatcttgctgattacgtaccataccttcggcaatttgatctccaggtttgtttgttattcttttatataattattattattattnnnnnnnnnnnnnnnnnnnnnnnnattattattattattatatgttaacattatggactttttacaccaagcaccttttaatcgatttattttgcaaaacgggattttcataaatattggaaaaaaaaattaaagtttactcttaagtggtataaaaaataatacaaaagaaaataaacaaaatttaaaatatggaaaaggaaacaaaaagtcataaataaaattgacagaattctaaggacaattattgctgaaaaagttgtcggagcaaacataattgtcaaaaaaattattggagtagacatttttatcaaaaaagttgtcggagtttttttcccaaattttagtacacactgctcacagaattctatctcttcgatttgatctgtcccaaacacacatttccttcttataatcttaagacctttttctccaatatgtgctaattcactataagaaatgaaacttttactagtacatttttacgtcagtaaaagttaggtattatgcttgtaaaacaatatttacttttgccagcacatttattaacagaaggagttggcaaatccgtattagtattaaaacttttgtcagcacaaaatgaaaaacgttggcaaaaatgaatgtgcttgtaaaagttaagactttttccagcaaaaatctacgttgggaaaagtcttacttttaccaacacattaacgagctggaagaagtcaaacttttgcgagcaaaaatgtgcgctgggaaaagtcttattttaccagcgcattaaaacactgagaaaaagtatttttgatagatggatatttgactgttaccattacaatagtaaactggtaaagttttgtaatttaattttttttttcatttagtattatttaattttaatttttatcaattatttttaaattaaaataaataaaaattaaaaaaaatatgaaactataaatattaaataattaaacaatgaaacataatttttaattgttctaattgtaatattgttcgcctttgtttattgagaatatattctaataagaaccgagcaagaaaaccacaaatagatatgaaattcctctttaaagtagtaagaaatgtcaagatttgagaacaacacagtacaaggggtagttgattcaagagcctccctcgaattttcgttctaattttccgccaaaaactctattgcacgcctcacctatttatacaatcaataaaatttaactaacatcaactaaatcatcagccgaaacaacctcttatggacaggctcttaacagattttaacttgaaaaataaatacatatcaaatttagatagagaaatttacaaaataatggaaaggaaccaaaaattgaacaattcctctccagttcaactaaggaataataatatgtaagaatttcataaattcaggtcctaaacttaggggtgagcaaaaaatgtaagaaaccgaccaaaccgagtacaccgaccgtccgaacaccgaaaaaattgataccgaaaaaattgaaaaccaaaaaaactgtcttcggttaaaaccgccttaatatggtcggtttcagtgtcaatagaaaaccgaccgtacatatatatattatatattatttttgtacacatttaatatacaattttattaaactagttttacttatatattttttatttaaagtctcaatcattcattggtttattttattataatctgatgcatttacgtattatatacacacattcataaaataatacgagtttttttttaatacaactcattactatattagtaagacaaataatttgaacaaatttttaaaaaaatatattacattatttatttaactaagaaagttttattcttaaattatatgatatttgatacaatactctaattttttttagttttaaaataattataaaaaatttaaaaactcattgtttttaaaaaacataaagttcggtttggtcgtttaaatcaaccaaaccgtggattaaaacggtcgacttttttacatttgtataatggtcggtcgattttcggattataaccatgaaaatcgaaaactgaatttcggaatttttgtgtgtaaaaaactgaccaaaccgaccgctgttcacccctacataaagtaataagtcaacaaagaaaatggtagacaagaaacattgttcttatttctattaaggtcgattacagttaactaagcataacccacttctagtggtatacaaaatcctagaactgagcatcgatcggtttggtcggtttttttctatataaaaataaaaaattcggtttgcagtctggattggtgcaatctgaaaaccgaccgttttgaacctcggtttggtcggtttaaaccgcctaaaccgaacttttttttaaaaaaaaattgatccaatttattctataaatacattattctacattttacaactacaaatatacaaattaattgttcaaaaactataatacatgaaaaaaaaaacttaataaattaatgtatatatgtatagttgtcggtttcggttttttcggtcggtttattacccaaaaaaaaccgaccgttcaatgacggttttttcggttttcagtttcgtcggtttcggttccaacggtgttcggtaggtcagtttaaacagtttttcggttatctggatttcatgctcacctctacaaaacccaaatacccaaacagtgaaactaattctcatttttaaaaaagtataaacaaatacaaagtcaaatagtttactgaaaatgccatcattttattttatttttttagggtatactctaaaattaatttatattattaatatcataaagaaaattataatattgattattcctataatactaaataattataaaatattacaaaattaaaaaagtatatattaaaattatttatgtaaaattattttttttattagcgcaatttgtgagatgtactggtaaaagtgacttttgccagcgtagtgtgcgattatgctgacaaaagttacttttaccagagcacttttctactggtaaaatatatcaaggaaaaagtatttacacgacttactatgctagcacaaatagagtggcactgataaaaataagttttgccagtggaaatatgtactggtaaaattatgacatttttactagcacagctcgcgaaatgtgctggtaaaagaaacttttgcaagcacaattgcaaactgtgttagcaaatgtgacatttgttgtagtgtaacccttctatgccacttcatggccccactcttagcaccttttgaagctacattcacttgatttctcattgtatttccttgcagaacataaaatcatggctaattgagatttttattccctgaactttgacatgtannnnnnnnnnnnnnnngaacttttaaggtcgttaaaaaataccatgtgaactattaagattgttggatttnnnnnnnnntgtctaatttcattcaattctactatttcagtgattgtttatatactaaaccatggtccccagattttgataactaccaaattatgtccctcgaactttgacatgtactaaattatgccccatgaactttcatccatgnnagacttttttactaaaattggacaaaagtccttaaattcaatagtctcaatagttcaggaggtatttttaatgactttaaaagttcatggagcatgatttggtacatgttaaagtttaggaggcaaaactcctaattagcctaaaaccattcacctttgtacctttcatgactatcatagcacacttagccactttcatgattccattttaaattctgaccaagtaaccctcttgatccaatattgccacaaatattaagttcctcttgatctcaggaacatgtctcacatgtttcaactctacaattgtccctccatcacatggttcctgatccaacaatatataggacatactcgatcatcaccaagtcttactgtactaccctctagtttctggtactcatgaaattgacttctatcaagacacatgtgaaaagaacacctagaattcatatccaaccatcactattgtacccctttgaaactacctgtacattatagtcctcacttcctttacaatcagaccacatctgttatgacatgtctttgattgtattcttttagtacaggacaatatctcttgagatgatcttgcttaaaatgaaacaccttcttatcttgacatttgatatcattactttacttgatctttagagcttccatgttgattataatttcccttctttaatatttttttttgaacatacaggccatcaccattagattcttcttttaactcttattttcttttcaattctttggtcattagggcgttctaaacttcctcaagagttaaagtctccttcctatacatcattgtatcaataaagtggtcataatttttaagtggggcaaggaattaagaactacaatagctttgtcttcatctttgattttaatatcaatattctttaaatcaagaataattttatttaatgaatcaataggacactacaagaaaattgagctttgccggcgagtttttgcgccaacaaagggtaactaataatcttcggtaaacttttgtcggtaggacatctcgtcggcaatagacaatcgagaaaaaatgtcggcgaatatagttagttccctgagaaaagtagtcgtcgacgtaacttttggaaaatacaggatcctatttttaccatttaaaaaaatacggggttcattttgtcatttaacaaaactgagggtttaatcagtaacttttgcaaaacacnnngtccaaaatggtatttaccttaatttataatattactaaagtcatatatataagaagaaaaaataatattgataatgctctatattacttcaccttgccctatcactgtgggagcaacattttttctgcttctatatgtatacatataatatttta

SEQ ID NO: 20824 - DNA, 6727 bp, Cannabis sativa
acatgttaacataaaccacttcaaaactcttaaattgataactaatcagattgtaatgggttttagttagggcacaaaacccaacactacacccttctctctcatttttggaaattttagattagttcaagcatgcaattttgagggttagattctgtccaaaccctagatgtttatggtttgaattctaggttaattttaggatatttgatgcctactgggttggttttgatggctggttgaggtgctgagcatgtttgtgttgaagaactcaaacttggctcaacaatggtgattttcatatttctgggttttagctactatttttgcttaatatatgtttgttggactcaaattaggtgtttggagagcttcatgaagtttgtgttagtttagagttgaaatgagatgtttggaaattatttagcagaaaatggtagattgttttctcaaaaatggcctaccatttttactggcagtggcccagaaaaatagtctggcatttttaaaaaaacggcctactgttttttaaggagttttcaaaagtcatatttttgttgttttctcgacatttaggatattgccacactatttatcaatagaaaaacttttgattttgagtttaagtctctgaaaaggttttaacaagaaacttacctatttgacataaatgtgacatatgacctccattcaacaagagatatttccattcactttgaccgacacacttgaatttggaaacgagataagattagcataagatatgtatatgtgtatgtgtatgtatgtaatatgcatgaaaaattatgtgatttgtacactacgaacacattacagttgttgtatggagtgcatcggtacaatataatattaagtggtatgacacaacgttaccaatactagtatgggacgagtagaacgtgtatgtggtataatattgctcagttgtgctcgaggtacggatcaaccataccaatacttgtatgggacgagtacttagtgcatctagtatagaggtcatacttctattaagaacattcttgatttatctgttaggccttgtaggtaggtatatggacacctagttgcaagtcggtaatatatttttttttatactttttttactgagtccgtcgactcacagttatgtttgcatgtgtaggtaaaggaaatgtgtaggttgagcatcagtgagtccagagcttgtgggtgattgtacatattgggatggttaagcttagagtgttcaattttgggacaacatgggctcatattttgtagtcgttggatatcacaccttttgtgaaaagaatattttgaatacttttataaacttttaatgggtttccaagtaaacatgtatttattaaagtataaattaaatcgaaaagttttaattataaaatcattgcagcgtgcctagtcaagtagggcgttagaattgtcaactaggaacaatttggtttggaatttgagaagattccacctttagcctccgcctgtcctcacatcattcatgaggaagggtgcaagcttccataacccctagagttctgaaagcttgagggataaatgttatccgtgtttccaaatgaggacacatgtaatttccaaagccagttacagtttaattacttcaggcccaacagtcggcccaactaagataatgggccacatccattagcgaagtcagctcttctggatgacagacatatgactcgtctagtcaagacaatcctccagcatagagtgaatcctaaagacattaggtggagtgttcgaagaagtatttggcaagcatctggacatttagctctgtatctcatccattaattaccagatcccactatataatgatttaactcacaggattttttccaaagatcatatcttcccaatatggaaagacagtaattggcgatcaagaatttaatgtgtctttattctccatgaaaatagaacacgattttggcaacaatcatcatgatgtggcatccacatcaggatacagtcggtgcgccatggcccgagctccaccagatgggcccaagtcaatatattatttgtatttgtcccatcagtgagcaaagttaatgaataagaaccctagcactatatatataagaagacacattcatgcaaagggttggaatatctttttctcaattgctcgggcaaaatctagggtttaaacacttatataaatcataaggcttttctagtcttattgtaataatattgactcgtggagtaaagctcgtcaacgcctcaatcacgtaaaaaatttcgtcgtatctctccattatttatcaatttcattagctttcacatatattttattggtttcaaaaatctaaataaatattttagtactttcattgaaagttgaaaaaagcagtgatatcatcaaatgttatatacaataatcatggtactcatctgaaacaaaactagcagccgcgatggagacactcctatggacgacatagatcctgtagctaaggcaaagaaaagagtcgatagagatccaacagaaacaaccagatgtcctgctaaaagactcaatgtaatgacaaatacgttgataaaaatcccatcaacaagaatcacttgtaagaatatatatactacaaagaagagactatagagataatattgtcctaagtaactatagaaaagataattaattgcaagcattgatggagagagtcatggagttaagggggatgtaactctctcaaaaaaaattatatatcactttatacatattaaaaatgtaatatatgtatatatatgtatagttaatgataaacaatcttccaaattaatttttctataattttccccctccattttacaaattcttccttcgtcggtaattgtaaggaggttctttatgcattaacggcggtgttaatagaaaatattttaaatgcagatgtaccattttaattaagttatctacatagacatggttgttacatgaattataacatattaatgggattgaaaatttggctccatatttgtgtacgtacgtatatgacacgtaatgttaattaaataattacatggaaaaagtactcaccgtcacctgccaaccaaatcttagagatctgccacgtcatcaataataattgtatttatatggccaacaccaatagcttaacatgcatggcatgacatgtgaacatggccttcctattatgttgctatttcttcaaacaatggactacatgctaagctcatgtgaccctttttcagtactttctttatttcataatatcatattcaaaattttggcagtagaggtaaagtgttattttggttgatttttttatttatttgggatcaaacaaaaaatttagtctattctttttataattatatacgctataattatttaaaattatttgcaaatttttagaaaattctttttaataaattagtataattttttttattgcatcaatcccctttacaacttatacaaacttttgatcaaaagtccaaaactatacttataatatttcaatccacctcttatcatctttaatcactctctttgtcaaaaagaatctatttctattcttaacatcattttttactttttgtacaattacattaactgtaaaacatttagagttccaccaaatttcatttcgatttttctagagctgatacactaatgatgcaatggcaacagccatcacatcctgcttgctctttgttagctttgcacgggttagccacctgaagaaatttgggatattttctgctcttgaattccatttcatccaagctttgatttctgttaaacatctcgagctaaagagacattcaaaaaataaatgttctagtgtttcatcatgcatctcacatactatacatcttgcatctgttacctcattgaatcttttcaatcttgtcctcgtttggagtcgctgtaacactagtaaccatagtataaaactatgttttgggacatttagtctattccaaatcatatcagtccaataagctcttggttgagcttctaacagcatttgataggctttctttttgctgtaggtacttgttaaaagtggttgataattggtagctagcagctttaagttggtctttaacagccacaatataataccaactccccgaaggtgcgactttgtaatcccacaaatctcttccttataagaatatactatggattcatctaattcatagattatcttgcttagagagattgcccaaatatattttccaatggcagcgaattccgaatagtttactgtgcttagaatcaagtttaaatacttacttacaacacgtataagaaaaaaatagtcgcgagtatagcacaatatgtaaattttatttttaatattgtaaaatacttagaattttttgaatatttacaagtgatcctaaataattatagcatacatgatcatgaaaaaaaaattcacttcaaaacttttttatataaccaaatagataaagatcaactgaaatatgtttttaaaagtgtattgtagacatgttatttatagtacatattatgcatgcaaaattaatctttaatttcactttcttatatgtattctattcatacattatatacactacacatgactcgtacagctatacgagtaagttgattctctaaccatgcaaagacgtaaattttaattagagtccttaattttccacgcacagtgatagtaataaacatataaattagggaaatttgcggcataaatactcaaattgtttgatttgttgctaataaatacccaaattcaaaaattggtggcataaatacctaaatcttcaaaataaactacttagttggtacccacttcataactctgttagtttttcatttaaatgccatgtgtcaatattatattagtcaaaataacaattgtaaaacaaaactaattttaaatgattatttttataaaagattattttttttttaaacaaataaaaattgattaaataatatatatatatatatatgtataattaaacgaatgagctgctcatcttcttgaactttgaaaaatctcaaacctagaaacttattcatcttcttcgatccaaaaaatttctaacccatgaaattattaatcttcctcaacccaacaatgccaagccccctcctcgtcattctagttgcacaagtctcgacgactgtttgaccagtcgaagaaccgtctgtaacgtactcgtcatcatcatctgtgtcaaagaagtctcgacggccttagctccgacgtcttccctagctcaattcagccaagatttgttgcgtctagcgagatcatttccttgccatcacaattttagagatctgggttttgaagatgttttttttatgagatggcaccatatcaaatgttcgtctaatactagaaactataatttgtttataggttttgattaataagtttactggaaacaaaaagaaagaagtatctgaataaatggttagagataatattattaagttatcattgaatattttaagtgttaggatctatagaagaagatggggagtgagctggatttgtagttcatgtgaaagaagatggtaaataaaagagaactgttttttttttctttttaaattctagtattaatcaatttttattttacaaatcattataaattagttttgttttgaaattattattttgactaatacaatagtgacacatggcatccaaatgaaaaattaacagagctgtgaagtgggtaccaacaaagcagttcgttttgaagatttaggtatttatactgctattttttgaatttgagtatttattagcaacaaatcaaacaatttgagtatttatgccacaaattttcctataaattaatataattctacaccatttaatatgatagaaatttaatttgggaaatactaacgtacgttgtcattaattaatgtggttctctgattaaatatatgcacttacatatataccatgtatatttatgcaacagaagggcttggaattattaacataagccatgtcttacaaaaaaaatcaccgcaacatcagttaattgtatcattttttttaattagtgtttgttctctggaattattaaaacctcaactatatcaattaaattttgaacaaatgtctagttagccatattatgggccgcaaaattacaaagtctaaacataaaaaagaaattacaaccaaaaataaattagagattctattacattaaagcaagtagttaccaatagtttccctttaaagaattgataactgtcttagaattgctctcaatcatcacaaaagggtgcttcaaaaaaaccgttgtttctagggctaatgtacaaacaagttgcaacttaaccaataaggagatcaaacaagttaagcctattggtagtggcccataaaactgttcgctaatgatctctagccaaagtcgccacacacatagcctcactccccactttaacatcacagtttatcttgatccaatcttttgggggagatgaccacaagcaagttacgatagctggaggatgtgaaaacaaacaggagccaaaatctgcataacaatgagtgacagagtcaatatatataatatttaatgatgtttagattaccttatcatttcgagcatgccataatcgtatccactacaattgaagcatagaggatcatggaatggagagcttcccccccccccc

SEQ ID NO: 20825 - DNA, 8509 bp, Cannabis sativa
ctctctctctctctccctctctccctctctctctctctctcacattgtacaaattgaacaatcaataaagataagtttttctctcattttagtgcatttaattttgttcagaattgttattatagtttcttgtttgcattgttgagtttttaattggattttattattgaattatggtgattatgatcacaataattagtatcagagccttaggccattgatccaagattgaagaacctgttatccacactatcaagaactcaaccaagatagatttagctaagtttgaaatggacaaattcaatggctccaacgatttaagtctctggagaatcaagatgaaagcactgttagtgcaccagggaattgtagaagcaattgatgaaaaattgcttgatggattgaaggatgagaagatcaagagagacacagaaacaaagactcacagtgcaattcttttgagccttagagatgaggtattgagggaggtatctaatgaagaaactgctctgggattgtagagaaagttggctgcaatctacttcaagaagtccttggctaacaagttgaatctgaagaagaagctctacaccctaagaatggatagctcgaaggaactcagaaaacatttagatgacttcaataggattgttcttgatctgaacaatattggagtaaaagtgaaagaagaagattaagcaattattttgctcagttcattaccaaaggtaaatgaacattttgtggataccattctttatggtaaagaaaccttgacaatggttgaagtcaaggctacactgaactcaaaagagattcagaaaagatcataagatggagctgacatcaatggtgaagggctttatgttaaaggaatatatgtaaagaaaaatcaaaaatgaagcaaaaacaaccatgggaagaacaccaatcatcagtcaaaaaccaagaacataaatattatagggaagacttgctaatactataagaaggagggtcatttcaaagatgattgtactttattacaaaagaaattggccatagaaagaaagaaaaaagagaggcagatttgccaatgatagttacgagtctaatggagtgcttactgtgtcaagcattgactcatatggtgattggatccttgattctggttgctattttcatatgacaccctgcaaagaaatgttatgtcagtatgaagttaagcctagaggaactgtgttgttgggaaataacaaagcttgtcaaattcaaggaattggatctattatgatccaattggatgatggtactgtgaaaaccatcagagaagtcaaatttactttctattggaatgtttgataagaatggcatgtttgttaaggtgaataatggagtattgacagtaacaaaaggttcaaagattgccttagaaggaagattgtacaatggtctttattatttcgatggaaagaccattcaaggcaatacattccctgtagtaagtcaagatgaaactaacatgatcaaactatggcatatcaaacttggccatgttagtgaaagaggattcctggagttgaacaagcaagggttgtttaagaaagggtcaagtggaaaactcaatttctgtgaggaatgtgtaattggtaaggcttgcagattgaagttcaacaaaagtcaacacacaagaaaacaaacttgcatacatacactcaaacttgaggggtgcctcaagagttgaaacactaggaggagaaagatactttctcaacatagttgatgattttacaagaaaggtttgggtgttcctgttgaaaaacaaaaatcactccttggagacctttgtcaactggaagaagctaattatgaatcaaacagactacaagatcaagaatttgaggactgacaatggccttgaatttttcttaaaggaattccaccaatactatgttgaacaaggtattacaaggcacaacacattaagggatacaccataacaaaatggactagctgaaggaatgaacatatctcttggaaagagtaagatgcatgctgcaaggtgctcatttagagagacatttttggggagaagctgtcaagatatcatgctatctcataaatagatgcccttcagtagcactcaatttcaaaacaccacaagaagcttggactggtaagcctcctagttatgagcatttaaagatttttggttgtactgtatatgctcatatcagacaggacaagttgcaaccaatggcacttaagtgcatgttcttaggataccctgatgatgtgaaagggtacaagttatggtgtctagaacctagtcataagaagtgcagaataagtagagatattgtgtttagagaggaccagatggccacgaaaagtgactcttaaagtgttgccagacctcaaacagatgggactgagaagctgaatcttgagatgaattcacaaatcaaggtgactcaagtttagaaacaaatgggacgtactagcttcaaggaagctatcagtgtaaagtttggaaaagaatgggcaaaatccatagatgaagaaatgagctccttgatagagaacaagacctggaaggttgtgaagaagccaaaaaaccagaaactagtgagatgcaaatggatcttcagacataaagatggcataccaggagttgaacaaactagatttaaagcaaggctagttgctaagggatacactcaaaaggaagggatagactacactgacattttccttccagtagtcaagcaagcatccataagggccatcatgtccatagctgcaagattcaaccttgaagttgaacaattggaatgggaaactaaaagaaaatatacacatgacacaaccagaagggtttgagaatggtgaccccaatcaggtttgtctttcgttgaaatccctttatggcctaaagaaagcacttagacaatgaaacatttgctttgatgtatttatgacaaaaattagctacaccaagagtagttatgatccttatgtctattttaacagatagattcatctattactatatgtagatgacatcttgattgttggaaagacaaagcagaaattgaagcactcaaagcaaagttaaaagaaagatttgagatgaaggatctaagtgcagctaagagaattttaggaatggacataatcagggagaggcctagttatatcaaactgtcccagaaaagttatctcaagaagatacttgagaaatttggaatggaggatgccaaaccagtaattgtccctttggcacaacatttcagattgacacaaaatcaaacacctcatacagatgagaaaagaaagaacatggagaaggccacatatataagctgtgttggaagcctcgcgtatgcaatggtctgcacaagacctgaccttgcatactcaatgagcattgtaagtagatttctaactgatccaggcaatgaacactggtcagctctaaaatggataatgaggtatgtaaaaggaactttagacactggaatagaattcaattcatagacaaatttagaagaagaagtgacatggtatattgattcagactatgttggtagcatagacaccaggaggtcactcacaggttatgtgttcacatttttaggtggttgcataagctggaaatccaacctgcagaaagttgtaattctgtcctccattgaagcagagtacatggctgcaacagaagccataaaagaagccatatggttgaaggggttggctaaggagtttggtctttatatagatggaatcacaatgtactgtgataaccaaagtgtcctacatcctatgaagaatcccatgttctatgagaggtctaaacacatagtcatcaagctacatttcataagggacatcatagctaaaaaggaagtgtttgttaagaaggtgcacacttatgagaatcctactgacctgttcaccaagagtgtcgccacactaattgactggtttaataatcaaggtggatttgtaatggtttgtgattgaaaaaccagctcgttagttagttatagtctcataggtatgctaacaagtgtgttagttatgttagttgtatagttagttagtttaattaatggttttcgctctatgcactcggaccacttaaatataaatagactaaactagcttatcgactaatgctttgggttcattcttgtaattgactctgagacagagagagaaggaaggtaacttgtgtttctgatcaagataatcccatttgtgagattttctgaggagttaaactctaacaatccacaagctctctctcggtcattcattgtataaattaaacaaccaataaagataagtttttctctcatattggtacattgaattctgtccagaattgttcttatagtttcttatttgcattgttcagtttttaattggcttttattcttgcataatggtgattgtgatcacaacagtatcagagttatttgtggggtcaaaggtaagctagcttaatagtgttcttttctaagccaagagggtcaattacatataaatccaaaagcaacgaaatcagattccatacagtgggtgcaacaagaaaaaaaatcaaacagtatgaatatcaaccactgaaaattctaatccaccaataaactccagtttttatttcaaatggccaaagaaagttctttaacacaagtatatacgataaaataaaccccttaaaatttactcaacagatttgagtaactcagcttctttacgaggaagagcttttagcgatagcaccagcttcagtcagcaaagggaccagtttcccctgcttgttcaaggcttttgtgtctacaacaaaacaataaaatacagcaaaatcaaattcaagaacagcccaaaatatgcgtgtgtgtataaatatatatatatagatagatatttctcatatataaatttttgaaaagcaaagcttaccatcacatccaccgatgtggtttccaccaatgaacacattgggcacagtacgctgtccagtccactcagccagagctgattgaatctgagctccatcacctttaaaataccaccaaaccaacacagattatcttaaaagaaaaacaatagccagtagtgaaatttcagacacattatccgaactttatacgtctactgatccaatatgagatatttgttttttaatcaaaccccagaattcacaatagcaaagtttagaatcaaatatcctaggcttaaaaaacaatcacaaaattgacctctagaatcacaaattaaaattaaaagaacaagaaattgaaagaaaaaaaaaatactaactctcattgtccaattcaatggctttgaaagtggctcccaattgagttaaaagctgcttcacggtcacgcaaaacggacaatacgacttgctgcaaaccataaccacacaaaaaccatttttaatgttatttttttccagattagacataaaatttgtgtgtcataatataatataaattgaaaacagagcaggaatcctttgaaaagaaaaagaaataaaaataacgaaagaacctgaagacgacaactggattggatgaaacaagttccttagctttagccaacgccatttttctttgatctttttttttttctttctttcttttttgatctttaggacccctatttattctacttttcttgcgtctgtaagtacttcggttggaccgagtgattgtcggctctgaagttcggaagaaacgatcagagccgtccatcatcagtagacaaatgctgtccgcaagcttttcgttttgggcctgccctttttctttatctggacccatcttaactttttggcccaaatggtgtattcggtgaatcggtgtggcaaactgtgaaaattacttttcttttggataaatgtgtgtaatttccattcaaggcgaactgctaaaagcattagaaagccataccacacactgagattgatccaaggatttggcaaaaagaaaaataggagaagttgaagaataccttcttgttttatacaataattaaatttatttttaaataaaatttaatttaaatatatctcattttatgagtattgtactcaaattatcctcacacacataatttcaaatatgatagatttgtattctttgtagatagatgtgtaggtttgtgaaaaagttgagacaaaattttaattagaaaaaaataaaaactatcggtgaagtgataggttaatattagtaaaatgattaaaaaagagataaacataataaatttgaaaaaaaaaaaaggtaaaaattaaagacatcaagttaaaagatgtatgtagtacaatttcctcaaaaaaaaaaaaaattagtagtttatccatggaatggggcagtgtggcactagaaatcgagataagtttaagaatacttcttttttaaatctattaatcaaaaatatccttatattaaatttcattaaaatgcacctactttcatgaattggttatctcatatagtctcaccctcgacttaaagttaacacataatttacatcaatttaaggtatatattaaaaacatcatctataaaaatagataaatcttaaaaaatataaaaattaaaataaaaattaaagcaattaaagtaaaatgagtatagaatataatttgctcttgaaaatctcttattacaatctcatattagatcaatggatcaaatttgattttaaaaaataaatccaacctacatttagtaattatgtttcatttgtggcaatatacatactattaattataatttatatatatataaaaaaaaaaacatattttcttgcaatactcaggttaaatcatttgagcacattagaattagaattagaaactgcttcccatttctccaatgcaattagaagattcatatcgtttcgtgtttgacaattatcgctaaccataacttgattattttttatggtttttttttttggagagagattattttgatgttaaaccagtgtcgagtcacaactcacaagtaacaacattattccactagagtatgtattatcaaaaaagaaagacgaataaatgtggggaagataactttgccaaaaaaaaatgtggggaagataatgccgagcaaatttgtttatgaaattaaaaactctaaaaatgaaccacctttatgcaaccaaagtccaattattatgacatgaatcataattcctcaaaaagatactactcagactactgcaggttctttaagttttgctacaagattctgggctactgcatcgataaattcttcagtgttcaagtaaaactccctggttactctgcatacacacacatataataaatatacatataagcatgaagcatgtcatttattgggcttttagcataaataccttatggagcgtttggtatggggttagacttggtgggaacgagaataccaaactcaacccatattttttaaaattttaatgaccaaggagtttatgtttccaatggtcccactttgtgagtttaatcgatgataatattaaacgtccttccaacacttgagtttcatatttccttaattttaaaaaggagcaattaagtccttttagttaaccttttcacaactttttcagttttttaatgaatgtttttatattattcaatgcaatatgatgtgtaagtagttgaagatgtatagcatctaaacattttctaaattatctatcaaaaaaagttttcataaattttgttaaaagttaactaaaaagacttaattgctattatttttaaaactcaagtacttggttgcttaaagaaattcaactgaatttccaaacagagaatatctcaggaacatttatgctagaaatccttggacaattaaaagtttaatcaagcagattaagagatggtgaattgaaggtcccacttacttgggtccatgggtcaaaatggcaagatccttggtcattttccctgcttccacagtgtcaatgcaggaagcctccaacttgtgagcaaaatccagcaatctgtcattgttatctaatttggccctgaaatcagtccaaatttttagatgtgtcaggttctcgattgtgctgacatgttttactaaggcaacaaagagtacctatgctgtagtcctcgtgtccaggcaaatattgaagcaatactatttgtactggtttcttgtcccttctgatgtagccggaaatgccgagtgacagtcccatgagctgcctcagcttctaatgtcttaccgtcagaggataactgcacaactacttgttatgactttgtgtgatataaagaaaagtaagatatcaagggtgacacaatagtggatatagtacaaaccagtacagaagtcatgaggcccagagagccaaatcctgcaaattatacaaaaaaaacaagcttttagacatggggaccacaacctaatatttgatcttgttggaaatattgtgaatattttaacaaaatatataagtgtcttagtgtgtgtgagttggaaagagtcccaca

SEQ ID NO: 20826 - DNA, 5340 bp, Cannabis sativa
  modified_base (294)..(294): a, c, t, g, unknown or other
  modified_base (2826)..(2839): a, c, t, g, unknown or other
gattggattggatcgtgcggattagattggattgactattttatgaacacccttactaacaacgatataagatatgacaaaagtgttagacactaataacaccttttaacatttctccttttatgtttttaatatttttaattagttagtaaagatatggaattattgaaaagttcttcgaaaatagaatttaaataaattattttacacgcatataaaataaatatatatgttcatgtagtaaattatttaaatattatttttcacacatgtaaattattttgaattttttanaattttataaaatatcttaaatatataggatgcacattattatatttttatatataaattagaatatttatactatatatgtggatgctagaaaaaaatgcatcaaacatcaatatatattctattaaagaaaaagaaaagcatgtttgtaaggttgcaattaatgctatggcgtataatgtgtgggagacccgcaataatgcttgttagaatgctcatcaagttggtaagattaaaccctcttgcgatttacgtcaaggtgaccctatgtctctttatctattcatctgggctgcagaagttttatctaggcttctagaggatgcccttaacaagggtactattcagggtataagactcaacagaagaggtccggtgctctcctatatcttcttcacagatgacttaattcttattggtaaagcaaatttaaatgaagttaaagggtactggcaatgtcttgagcggtaatgttcttgatctagccaacaaattaatatgctcaaaatttctatatttttcagtaaaaatacttccaatggcatgaaacgagggattaatgaagctttggggattgactctcctgaggacaatattaaatacttaaggctgcccctatttagagttagacaaaaggatgctgacttcaattttattttggataaccttacttctaagttgcaggggtggaaggccaaaaccttatctaaggcgggtcgtgctaccctcattaaatcagtggagttgtatttgcccatgtatgctatgcaaactaccaaactctctaatcgccttgtgaccagaattgatcagtattattaatatttataagaatattattaatttagtatgtttattatgataatattttaatagaaaaaatataatttctttttactaaaaattcataacaaattcaaattgaggtgtgtaattagacaaatctaaatgtttgacagaatgatctagtccattgttataggaagacaaagtgtagaagagaggcctatattgctattttgaatgcaaatatttgtgaggcaagaaataatactttatggtaaggatattgattcgttcaagagtttgggcataatcttgtaaattttgcctataattgtacataatgtaaattgttttcgcagtaatacaattttcctcatttactaaaaaaagaagaacataataattttaaaaataaaatatttatgcttatagtttttttaaaaatgtgtgtatttttttttaaaagaaactatacttataattgaacatgacattatgtataaaaaatatatttatattattattgagataatgttaattaattattaatttaatatatttattataataatatttgtgattatgttgttgatataatgtgtttattaaaataatatatgtgtttattatttatttttatataatatttatttgtttattattaatttttattatatataaaattaaaaatatgtttcccataattaataaaatatataaaattataaataaatttgtatgtatatatcatataattaaccaatataaaattaaagttatttgtcttgatttgatatatacttaacctttaataattaattaccaaatcatttgatacattaaaccatatatcaatatacatacaaattaatttaggtatatatacttaacctttaataaaacatatatcaatattttcaaaaaaaaaaaatattttaaaatgtgatttttttaagttgattttttttttttttttgctaaaaaattataagttggatttaatttaggtatactagggtgtgtactagtagtggacccaattcccctactttgacactttcaaaccattttttttatttaatattaatttgtcttattaagcaataatatctagaaacaatacaacctttttttttttttttttttaatttaatctaaatagtcaactaaattaattaattaagaattgtaggtttaggccacgtgtatatgtttcttttttatttttgttctggatacagactatttgatcttgatttctaaataaaatgtctatttttatatttctggccattattatttgacatggctttttttattataaattagttaataaataataacaatataaattgaagatcttaattctttttgactgctttatcatattttattaagagcttctagctaagctgccacgttttgtggggtagaacatttatcctataatccaccaaataatcatattaatttgtctttattcatttttaataaattaattggtcaacaaattgatttggggccaacaaaatatataaaatgaacaataataataaatataaatttaattttttattgcaaataaatatatatttaaatttaatttttaacgataaaaatatttaagttatatttttagaatttttgtaagaatctaagcccttaaatgccaagtctgtaacgaccatgcttcaagcttctattgtgtttttacacccacagaatgatgactcttatacacgagtnnnnnnnnnnnnnngcttcatggactgacgactggcctacaaatcaacacgagtattttcagcatgctttgtcctcactcgcacgcttcctggaaaaattttccaggaggtcacctatcctaaaattaccccaggtcaagcacgcttaaccatggagttctttcatgatgagctaccaaaaacaagatgcaccttgttgatattttgtaacgtccctgcttcaagcctctattgggcccttacacccacagaatggcagctcttatacacgagtacgtcactctggctgcttcctggattgatgactaaccctacagaccaacacgagtgtttttagcatgctttgtcctcacccacatgcttcttggaaaaactttccaggaggtcacctcatggagttctttcgtgatgggctaccaaaaaacaagatgcaccttgttgatataagtagtaccaatcaatcaatttaagtattcttcaactgtgtagtcccatacatacatagtctcagaatcattctacttgaccttccccaagcagtgtgcgattacacaacttacccggtatttccctctacggatcacgggactaatgactgtcacaaagtcagtatctacatgttattttcttattgatatatttacataaatttttaaataaaagataaaaatttaataatcttgactagtccggaactgccatgtggcttttaattgacacttaacatttagatatttatcaaaatataatttaagtataattatcgtaataaattaaatttaaatatttatttgtaattaaaaattaaacttaattatttaatgccgtaaattactaatattaatagttataatatatgaattacaatttacaccacagttcctttgaattgcttaaagagttcccacgtactttactttttttttttttttttttttttttttatactcattttataaagaaattactctacttattttcttcttgtttttatactcattttataaattttttattcttccatttattttttaattaaaaaaatattagacaacccgacaaaaaatatatagctttattgctcacctttgaataataataactagaaaatatgataaatcacgagtgataataaatatttcttaatgatctttccattttatttctcgtaataagctacattattattccatacaaataattattaattatgtatcaatgaaaataaaattagttcaaaattcggatcaaattaagtactagaactactagtcatttgcaaccatcaattttaattttttttttttgaaaatatcaattttaattttttaattagtgtcaaattaagaaattatctaaatgttaataagccatgtaattttagtttggttttttaaaggaaaaaaaatgaagttaattttgcatgcaatatatacttatagcattaaattaaattaaattcattatacatatataattgttctgcaaaagttctaaagcaaaaattagaacaaagaaattataatgattagtacatatacattatcattaattaatattatgattgtaaatagcatgtgattattgtcttattttctttgaaaattattattattattatggatccgacccgctatcaaatcccacattcactcagaaatatatacatagggcgaccgattttaaattttagtgagcctaaagaaaatttggcttcttattttaaaaaaatatagtattttcaaaatcaataaaaaaattatgtaaattttaaaatattttttagaactttaatttaagatcggaccttatatataggatcaaagattaaatttcaattatacaaaagaaattaattcaaaaaaattaattattgatgggattattaattataccaatatttaccaatttgtgttccttttccaattttctttttaacttaataataattagttttttttgttaatatattttaagaaaaaagggagagaaaattagttgataagtgttataaacccctagacttgtataaaattatataaatatatttatagatcttacatgtgtagtcagagtatgcttgatcatgatatagatttagatgaaattagttattaattaataaattatatatatttatatgattttaagttgcaataatcgatgatcactccaagaaaataaatcttcaccttattacacaaatgatctaataatattaatatttataatatatattctggtcaaaatatcattctagtcaaatctatgactattttaaagcactatatatacttctacaattgactagctagaattaaatattttaaaataatcgatcgatttcttattcatcaacaatattatatatattaaacaaaaattaattataatatagtatagtatatgatatcctttgaaatatatgctagctgtatatatacggtttatgattttagattagaaaaaacattgaaatgtttaaaaggattaaataattattatatattttaaa

SEQ ID NO: 20827 - DNA, 6930 bp, Cannabis sativa
aaaaaaaaaattataaaaatgaaaaagcccctatatataaatataggggttagttgtagttttttaggagactttatcaagtgtatattcaaagtacacaaatgaaatattgaaattatgttgtataaagattaccaatacgaactacttgaggatagctcaagtggccataggagcgtgtgtgtgttggaggtcctgggttcgaatctcaagttatgcattgtaatatataaacgctttattcaaaaaaaaaaagattatcaatacaaggagaatacttctatactagtctaaagttaaaaattataacttcttaggtctaatatttgataattaatgaatccaattggaaatatattaaatattattaattctttaaaaatagagggttggtcgtgggcttttttaaaaaaaagtcagacaagcgttaatttaaagtatgcaatgaaatatttaaattatgttctatgaagactatttatataggcaatgaaatatttaaattgtgttctatgaatattacttatgtaatgagattgcttcctatagagatctaaagttgcacaattatgtttttgtagtcatatcttccaagtgaaacacctgaaacactacgtcagtacagaggacaagagcttctcaacttgagaggaaatggaacaggagagctccaagtgtgggatagagtatatgattatgcttactacaatgatttgggtaatcctgataagagtccaaaattagctcgtcaaacccttggagggtctagtaactttccttacccacgtagaggaagaactggcagaccacctacccaaacaggttagatatttctttctacatgttagttgtgtcaaatgttagatatttttctttatctcccctatcattttttcatttatttcaacaaagaattggaattttgtatcttttgttcatgttcttaacactttaattcatatttttttttacagatcccaactgtgaaagtaggttggatattaagaagagtttgaccatttatgttccacgggatgaacaatttaaccatgtgaagatgtctgactttcttgcttatggactgttgtcaatagctcaggccattaaacctgcactggagtcttattttgatgagacaccaggtgaatttgatagctttcaggatgtgcttgacttgtataaagggggacttaagctaccgaaggaagtagttgacaacatcaagaaagatgtcccttctgaaatgcttgaggaaatttttcatattgaggctggacaattcatcaaatatcctctgcctcatgtgattaaaggtgtttcacctatcttgatggttcaacgaatcttgttctgatgatgatacttcagcaattcttaagattgcacattactttttcatttgctaacttgtttcttctatttcgtcttacttggtttagaggatacatctgcatggaggactgatgaagaatttggaagagaaatggtggctggagtcaatcctcttgtcattcgccgcctcgaagtaattttatttttcataatgaaaatagtcataagttcaccaattattgcatgtgtgcaagttattaattgtttgttgattctaatttaacatcaggaatttccaccaacaagcaagttaaatcctcaagtttatggtaatcaaactagtaaaattactgaagaacacatactaaatcacttggacgggcttgttgtacatgaggtaatgtctgtagtgatttttttgccaaaattttctaactattgaaacttgcagttataattatttgaatgtattatttctactaatattgatgcattttcaacatgacataactgaattaggcacttaaaagtaagagattatttatattagatctccatgatgcattcatgccatatcttagaaggataaacacaacaccgacaaagacttacgccactagaacactcttgtttctgaaagatgatggtactttgaagcccttggccatcgaattaagcttaccacatccaaagggagacatatatggctcagttagtaaagtatataccccaactgaaaatggtgttgaaaataccatttggcaacttgctaaagcttatgtagctgtaaatgactcaggctatcatcagttgatcagtcactggtatgactttggaagaaattttgcatatacacttctttcagtatacagtcaatttttaatgttttataatttttatttgtggtctatacaggttgcatacacatgccgtgattgagccatttgtgatcgttacaaataggcagctaagtgtggtccacccaatttataaacttttacagcctcattttcgagacactatgaatataaattcacttgctaggcaggctctcattaatgctgatggtcctctggaattgacagtctttccaagaaagtattccatggagatgtcagcagtaatctataaggattgggtctttcctgagcaagcactccctgctgatctcttaaagaggtttgtctttcaagcctaagacgtcattatgaatttgtcttatgatttgttataagtaaaagtcaaaaaaaaatcatatttgattagaaaagaatgttaagaaattactttcaagtataaaatatagctaaaactttagaaaacatcttttgaagtagaaatattgtatttgacattatcgtgcctttacagaggagtggcaatcaaggatccaaattctccacatggtctacgcttacttatagaggactacccatatgctgttgatgggcttgagatatggtctgcaattcattcatgggttgaagagtattgctcctactactacaagactgatgatattatccaaaaggactcagaacttcaagcatggtggaaggaactcgtagaggtgggtcatggtgacaagaaaaatgagccttggtggcctaaaatgcaaacccgtggagagctagtagaatcatgtgccacagtgatatggattgcttctgctctccatgcagcagtaaactttggacagtacccttacgcaggatactctccaaatcgccctacagtaagtcgtcagttcatgcctgttcaaggtactgcagaatatgagttacttcgaactgaccctgaaaagggtttcttggagacaattactgcggagctgcaaacccttattgggatttccctcattgagattttgtcgagacatacttcagatgaggtgtatcttgggcagacagacactcctgagtggacagctgaagttgataccctggaagcctttgagaggtttggaaagaaacttgatgtaattggaaacagaattatgagtcggaacactgatccaaatttgaagaaccgggttggacctgtcaagtttccatacactctattgtatcctacaagtgggaaagggctcacttctaaagggattcccaacagcgtctcaatctaaatgtatttctcctagccatactatggattgctcttattatctgtctgttatttctttattagaaattatatttactttttttttatgcaagagcttgtggcaccacaaacacctccaagtcttggttgtttgctgaataatttgtgttgaccacaatacttcaagatgtaagaattttccaaactgaataaatattttgagtgcatttgtaatggaaaaactgacttaaactttggaacttcggtatttttattcataaattcttcaatttttaatcatttattttgtcataagatacaaagaaaattaattattcgtattagtgttggatcattctggtaaccacatgggctaaacttcttaattttaggaatagtttagagctttgagttctgccttcatagctaagagagcaactcaatcgaaccttatttgtttctaatataaaattttcaattgcaagtgtatagtgtattgcaatatagttttaatttaatagatgtcaaactcacagggattaaatacttaaattttgctaaatactatactttaaatctagaattttgattagaaaattcaacatgtaactcaaacaaaataataaaaatgaaataacaaaataatggaaaagaatgatcttaaaaatttattagataaatgatgaatatattagagtaacaatttcactactttaaattataaatataaaatttttttaatatcttaatcaatttttcgcatttgtaaaaataccagcaattatctcaattaattaatataatatctctattttctattaattaattaagaagtcattaagcaattaattcttttaaatgaaattcataaccttcaaggaatatctcaatctcacaatcactctatgtcaaatcttcctatgtccaatctaagtgtatctttctcaatcataaaccctagatctaaattcacaataatgatggccaaataaaaagatcaacttcatagaaataataataaaagtcttaattcataattcaaaatacattagtactctatcacaaaagaaatatagttctccattacaaacttaaacataatagcaatgtaattgttcatgattaaaaaaaaaacctaaaacaaaaaggagaaagaaagaaactagatgtaatattggtgagatgatgaattttagcctcattctccctttccatgcatgtaattgtcagttctaatcccctctaaaacgtaattagaaccctaattatgtttttcgttttattttcctacaaaagacctcttttcccccttgaaaattcatcacttactatttttgtatggacatgggcactgcaacccttcgaactatagtgttttaacgctatcgcgagactaaaaagctactctccatatcaaatgggcgttgcagtcttgatggtggcgttgtgtccccaattcaagacacaaaaattacgttgtagcccttctcttgggtactgcatctcctaggtgaattattgggatgtttttttgaaaataaaatcatcattttattaaacgattaattcagttaccaaacaaggcaacaactcaacaggaacactgtccaagttgaaacgatgatcagggtgggatatagcagctctagcaaaagagtgagcaactatatttgatgatcgctttacaaaataaaaagaaacattacacaaagcatgaaataaggttttacattcactaatcactttgccaaacatcaaaccatggacatagaacttcgcatagcttgaacaaccgagagacagtcggtttccaatgtgacattggtccacggatggtctgtgatccaacttaaggcctctcgaacaccaatagcttcagctacttcaggcgtagttgaaccatggaaaagctttataccaccttccacaaggaggccaccacgatctctagccacaaagccgactccataagatgaggaatcactaaacaccgctgcatcaacattaaccttaatactactatcaattggggcattccattgctcagcaccgtctcccgggatgtacccagagaaaagcaattcattgcttaatttttgagcaatatgccattgattaaggtagtttgtagccgaaacaacaatgctctcgactcctacagatttgttttgccagaccttgtcattcctagcattccaaagtgcccaacataccgccacaagcacgcaagattggtctgtattcaacattgtaaaccgctccatacaccagtcaaggaaggacatttgttgatgcaacaaagttcctatccccacgtggttccatacagcagcagcaattggacaagaaacaagggcatgaagagtggtttcggcatccatactggaaataggacaggtcgaaataacgttcactttcttttacaacagttgagacattgtaggaaggcaacctttagctgcacgccacaccagatttttcattttcggaggagttttaagttgccataactttttccaaaacttgtcttcagctgaggcatcaagagtgaagtcaccactaagttgctgaagtaacttgtaagcgctcctaactgtgtatatcccataagagtcattcaaccaagtaagaacatcttcaccaggctgagattgaaagggaatactctgtaccagcttgacgtcccgagcaccaacaagtcctctaagatagtagtttcccacccagaaccatccatagagagcaaattacaaactttagcattatggagactaggatggttagaaataatcagggggttttctacatcagacagccacggttcccccaaaacagaaatgttttttccatcaccaacaacccatctcgagccttgtttcactagtgattgagcttccaaaatactacgccaaattaagcttgggtttggaccaatagtagccgtgaggaacgaaccatgtggaaaatatcttgctttaaatacacgggaaacaagagaatcctaatttgccataagccgccacccttgtttacccaaaagagaaagattaaaatctcgaaggttacggaaacacataccacccttacttttgtgaccataaaaacgcttccaggacatccaatgaatacttgaaggagaattactagaggactgccaccaatactttgccatcatgcttttcatgtctctaataatctcaagaggaagtaagaagacactcatggcatagctaggaagggcttgagccaccgttttaataagaatctccttacccgctctggcaagaaatttagtgccccaggcttgaagccgtttccttagcttttcctttaagtaacccaaagtcgttgctttgttccgccccatagaacttggaacaccaagatacaaactctcctcgggggcaatgcacatgcctaagaacatagtcaatctatccttcgtttcagtactagagttggagctgaagaagatcgtgttgggttttatgccct

SEQ ID NO: 20828 - DNA, 8768 bp, Cannabis sativa
  modified_base (3190)..(3196): a, c, t, g, unknown or other
aaaaaaattgtatttacattgtgagatttacaaagacaagagatcaaaattaacctcaaagtatccaaataaaatgaagggatcatgtaacacataacaaaacagtaacagaaaaaactactaaatgcagaaaatttaggggtcatatattttgtcagactgttttttcttctgtttttatgtttgggtttaattttttcaaaccaaaaaacatatattttacagggatggacttatgggttggatggaccacttgttaaagctactagaatggcaggaattcagaactttaatgaaaatgtatgtggtgttattgtcattgcaataatttcttatgaaaattatctaattttagtgacaatatctagcttgtctatttggcaatggtgagcaggaatttgggctaattccaataagagtagctatatggggaccatttgttcttcttaatatggatcaaaaagttgacagtaatataaacgtgggagaagaatggcttgggagttgctcagaactactgactaataatggagttgattcctcactaagttatatttgcagacgagaatataccctccaatgtaactggaaggtatttataaacttggttctcatgaatttatgtggtatgataatgttcttctttgcaagccccattgctctattttgtatggtagttcatcaaaaatgtttctagagaaaaaagaagtgttggaccatatagtctaacgaataaataggatatgtccctcataaactattttgtttgttgcaaaaatttcccctaaactataaatttcgttacaaatatcttctgcagttgtattatgctcatttctttaaacaatcgattgatgtagcacgagcgtgttgttaatagtccaatttaagagtctaggcaaaaaatacatgcataatagtaatttgatgatgaattatggggaatatgtatatgtattcttagaactaatatttatatgtttaatgtcaaaaaactgaatttcggattgcttaaagttgttaaatagactttcatactgcaactgtactagtaactcatagtcacataagtaaattgttttgacaatgagttgaatgtaattgaaggggaatgtttgcaacgattcgtatagtttggagggattttcgcagcataaaaaaattaggaggcaaaactctataatggttataatttaggggaaaaaatctatttattttatttaataatttatttatttatttattatcttctttgtttggaagattctcatgagtgatgatgctttctttcttttgaattgctgcaggtgttttgtgacaattatttagatggaggatatcatgtgccatatgcacacaagggccttgcaaatggtcttaagcttgattcttactctaccacagtatgtcttgctatccttttattatctggaaatatcgttaaggtactgcggagtaaggttgtgtttggttggaggtaatgaaatagaatgaaagtgaatcgttttttattccattgttttgtttggttgtattttaaatttaaagtattcgaatgaaatactttttctactattttggtagaataactattctattttaaaatgaaaggaaaaactatatcaatgcaagatgaaaagcaaaattattaaattttttatgcattttaaatttcatttcattttattcctatttttattcccatctcatttatattcttgtgttttcactttttttttaaccaaatacaacctagggtagagtttggttaggaggaatgaaaacatataaatagtaatgagaatgagaataagaataacatggaatcaaatttaaaacataaaaataattgatgaaaaaattattaaaaattttgtcatattgcattggaatggtcattctttccattttaaaatggaataatcatttcactaaaatgatgaaaaaatcattctaccggaatgacattccaatactttaaaatgcaaccaaacaaatgaatagaataaaaattatttcttttccattttattctatttcattacctctaatcaaatgcgacctaactgtatttcctacttgtatttattggcaaaattgttgtttggtcctctctgtgcttaaatttcagtttagtttggtgacatttgtgatatagatatttgaaaaggttagcatccagaaatgtgaaagtggctcagtaaatggcaaagatgataatgatagacttggatccacagctgtatacgcatttgtatatcccaatttcatgattaataggtaatttaacttataatttcttacttctaaagtttgttattttattttatattatggaagagttatgagtaaaatggtgtttattgtagatatggtccatggatggatacaaatcttgtactcccattaggacccaacagatgtcaagttgtttttgactattttcttgaaccttctcttaaggtaaaatctctacttattcatacattacttgtaacaatcttttattaattattgttatttttttgtatttaaaagttgacttgaattataaataatatacaaatgttattactaaattatataatgatgttaggacatatattttgtacctgaaattaagatataaataaatgttagttaattttctttcaacttttttatggggacaggatgataaagcttttatagagaaaagtttacacgacagtgaaaaagtccaggtaggtgcttacttttgtagtttagtattataaatatttatgaaaaaaaaattacattttgtacctttttttgaaaaaaaaaatgcattttgccggaaagataattaattacaaatatattttttgtataagatgtttacaaacatgtaaaagcttttcattaacttgtaagaattgtttgaaatatgtgtttacaaacttaaaccgtaattttgtaaataaattgagaaatttttatttttatgatttttaaaatataagttagcaaaaatatagctttctctaaaaaaatgattttattagaaaaaattaaaaaatatatatatggaaaaaacagtaaaaggtaactagttatcctggttacccaaccacttgaggctagctcaagtggccatagtgggtgtgtgtcttggaggtcctggattcgagtcccagataaaatatcattgtaatatataaacgcttannnnnnnaaaaaaaaaaaaaaaattatgctggttacccttactcggtcttctcaaattttttttaactttttcttaaatttttctaataaaataacactttttgaaagaaaaaaaaaaaacctcataattttgcacatatagtataaaaactcataaaatttataatttgtggaataaaatttgtattttttgtaatatgccatgtaaattcctgaatatttattggattgggttgatgattgtagatggaagatataattttgtgtgaaggtgttcaaaggggtctggagtctcctgcttattcagttggtagatatgttccaagtgttgaaattgctatgcaccattatcattgcttgcttcataaacacataaacaattaacaaaatgatggtctcatctcatactcttcacttcattatctcacatccttgatgtttctgaaattccatctcatgtcaatggtgaataaatattgtacagaattgaaatgtaaataaaataagaaatgaaaatacacaagaatttttaagaactcaatagacgaatcaatagtttaagttcaaaacatatcaaaattttaatctaaatcattatataaccctcataacttatgtataataataataatacttatcgttgaaaaatctttatttctttaactatgagaattttgaatgacaaaatagtaacaaaaaaataaattggtggtgagaagaaagaaagataagcaaaaaactggtggtgagaagaaagatacttgaaatttttgtgaaaaactttagggaaaaagaaagattattagttttattatttgatcgttttttaacattttcacaaatgacaacaagaataatatatgatgcaaacaatcaacatgataagacaattgaacaacttctccccaacatgttcaatacagcatcaaatttttggtcagtctgactcagcaactcttatcttaagatatcaaataccacaagaagaagtgacatattactattagtgtaatttaatattgtgtttcacacattttaaatgctaaccactcacaaagcaatacattaaatctataaatgagtagtagagtatattacaactaactttattttgtatattaatagagtcaccttcaagattcaagtaaatattacattgattgggctcccttgaatggttgagcttgaagaagacctcacactaaggaccacaatggtacttttttcatgtaaagctactttgtcttcactcttcagtagaatagagacttagacatgtcactgaaaatgacataaatataaaaattagaaataaacccaaaaatactcttaacaatgtatatatgtatttttaatatcatttacaaatatgtgtacaaggtaaatgattccttattatatctctacaattttctaacccaacaaaacctaccaagaatacccatggaagaaggagtgccaaacatttccatgatttcggggaggggacagcaacatcatcagtatcttcacttcgagggaccaacaccggtatcattttcgggaacaaatatctgtataagtatatacatttgttaagatttggttctactcgaacatgcaccacatttacaaataaagggtgcctcaccgccatgctaatccggcggagttttaaacattaaatttcaaatgtattccaatagaatggtttttctactatagaaattgtttaaagaactacaacccaaagcatcgtggatgtgaagaagaccattatctcaataatgatgagccaaactagtatttgtagtgatgttttacgattgattaataatttttgataatgattattaaattaaaatgtgtatcaggttgataattagttacaggatgacatcgtagatggcataacaatccaaaaacatagaaaatgtcaattcaattcattcaattcctattcttatttctatgtttttattagttccttccaaactatatggttgaatttactcaattaagcaagcaaaacaatgtcataccttgtgaaattatcaaccaagttagagcatcaagtaacttcaaatagaccaatgtgtgtctcaatagaccattgtctcatcattttgaagtttttgaagaaactagagcagacaaatctctatggaacacctgaatgcaaagcaagcagagcatatgttttgtttatttaatttaaagtacactaaacataagataacaagaacaagaaaacaaatgaggtgataacctttacctttttgaagtgtcccaactctttctttagttcttcagtgttgttctcaaactcatttaaaggaagaatcgtgtcgagtgtctgaaacaaaaacaaaaaaaacaactttaaagttactttccattaacagcatagagtacattcaatgttatcttgagggagaaatgagtaaaatttgtcaaactaacaatgtaaaatattaaaatttgcaaaataacttcactaaatttacactatgcgatagtcgcagagtgtaaatctatggtcgttttgcaaccataatggtcgtttatggtcgcacaatataattcatggttgttattgcgaccatacaaggttattttgctaataaaaaatttcatgctatttttacagaacacttggaaaaaatcattgagaaaattacaaatatgtagctgttaatcaaaggtaaaaatgaaaaatacataaataataatagatgtcatggatattatgtctaagagtaaaagagaaacagactttggattgcataccagtttgaaaacttcttgagaatctgaagagcctatctcttgattgtacatgcaactgtgttgacataatgcaacggaaacccgtataatcgcacatagacaattgaacttcttcttcagctgaaaataataacgcaagaataaacataacaaataattgtttccttaatgtcatttaaacaaatccataaagaaaatgtgttgaatattctacctcttttggaaaatccttgaaggatgcatgatcaagtttcggtaacttcttcctgtgatatcttgcaagtagggctattaactgtgaattcgaatttgagaatcagaacaaagcaccttgagaataagcatcaaggaatagcacatcaacaagaaaatggcttaccttagtttcctctgtgctgtaaccatgaagatgatcactgttctgcaaggaaagaataaactcaaggtcaacaaattcaaaggcttccacctttcagatgattctgtaagcatatgtatttaccaatattattgaatatttgaatttacattctacaatttcaatcaaaaagggcactcattgaatgtttagcaatttatctccacaaaaactattgcttagctactatgcatcttctaaaagaattttattaaaaaataaactacacatacaaggaaatgaggatataccatgataatgcggcaagactgcttatgaaatccttttttaccagtgaaaatcccaatgttgtgaagcatacaagcagcttcaacatactcaagttccttgtcgtctaaacagacagcaacttcgttatcaaaaagttcgttacatttcctcaactcttcaaaaatttcctgcaaaaatcatttaactcaaatattgggtgttgtaacaaaagtatgtagcctgaaattattaatttcagattaagactcctactaattagtgaaactttctttcctcaatataacacaaaaaactaattaagctcaataaaacattataaaattcatgcatacatttgcaatacaagcacactgtgcagcacctatcatcctcttcttcccattgaaccttgaagcaagctgaagaacagaccgccttctattgttcgcattcatatcataaccctcaccacaaaccttacctaaaacctcagcaacaacaccttctgctaatgcaaacccagaaacctccattttctcaatgccaagagcctcaaatatctcctccagtaaaacagctccagccacaataaactcacaccgccttttaaatagcttttctctcattccattctcttcctctcctacaccaccaccacataatctcttaacaacactcctaatttcttctttactcaatctccaatcccttttaccttccccattaaccactacagtatgatccagaacacagcttccattcgagtaaccataaaaaacagccttctccacagcctgaattgtaccagaagacccaacaaccacctcaaaaccaaaccttttgatattctcaatcaacccagattttccaataactaatctaatatactctctcattttggacacttgttcttctacactctccccaaacttttgggtcaatgtaacatgacccaaatttaaagaagcagcaaatataacattcccttttttcccaaccacaaattcagtagacccacctccaatatcaacacaaagaaccaatttttcatataaagggaaaaattgaagcgtacccagataagcaagcctagcttcctcttcaccaggaagtatatcgatcctcaatccaatcttttcccttacgttcttagtaaactcccacttgttcacagcttcccgaaccgccgaggtggccacgcagcgagtctgggcggaggcaatgccgtacgatttgaggagttgctggaactttcgaagggcgtcgagagctcgaagctcggaatccacggaaatggcgaaaggggttgttgtggaattggaagcctggcgaccgagtacgacgggctctttgcggtgatcgattatgaagaacttattaccattgttggggtagactcggaccagaagcatcttgaaagagttggtgcccatgtcgattgcagcgaaaaggtacgatggggaaagtgagattgacggggcggaagccatggttggatgatggatcacataatttggagaagcaaagattgaaattgttttccaattttttaacgcaaacataaattgattcgaagtttaaagaggacattattaatttattactcacaataacaaaaagggtacgatttgtacgattttcatgaaagttaagtttgctctctcatcacctacacatcatgcataatataactaatcgtccatcttgatgagtgtatttattttaagttttgtaaatgtgtttttatgtagttgtgcagttttaagctttaaacacgataataatatgaatttagtgaaaataataataataataataatcgagatatatgtcaaagtcaaaaaacgaaacgtcttgattgaaaaaaagttgaaactagaaaatattgttaacatgtcgcctaacatatgaaacttaaatattaggtatcctaataatgaggtttaggcaatatgtcgccacattttatgaaaggttaattaagatttttgcttgacatgtaacaaattatgctccctgaacttttaaagttgttaaaaatgttcgtgaactattataattgttggatttaagaatttttatctaatttcattgaatttactatttcagtggttgtttatgtactaaaccatgctctcgaatcatgcccttcgaactttga

SEQ ID NO: 20829 - DNA, 2042 bp, Cannabis sativa
agttagttagagttagttaatgtgactattggattatatgtttggtcatgttcaatacaaagacagctactccactattttgcataagtttggttgttatgaataagtgattacctcagcttgatcaccaacattaaccagaagagcctcaggaatgataggagctttgaaccactggttgtctttcaaaatctgcagaccctcaaccgatttgtcgggcaagagaagagtgatcgccgacccatctgcatgtggtttgcaaccaacaataaggtcgggccttggacatctcgggtatagggtgaacctttcataaagttttgatcttttcccatactgctccacaaaacaattctcttccaagttcagtgaccttgccatggccttaaggataacctggcttattgattgaatcttcacagaatattcatgtgtcatagacctgtaaattcaattaatatgcctcaatacttgacatgtcaaaacatctttatagctagaaggaataaggtgaacttgtattgaaactcatctcttatgcactaactggtgtgtgccactttatcatctcagaaattttggctaagatgactacttagtttttgcaagtataaatactaaaatcactctcaagatcaaatcaaacaataatattgtgcccaaatcaaaaggggtttcagtgataacaacatttaacatgtcaaagaaactttttagctagatggatagtaaaactagtattgagacttccatagcaatgttcttaccgaaaatttttgggattttcaggccaatgtttgagcttcctctgatcttcagggtatataacaaggtagagacggtcgctccaatcaattttttgttgatctgaaagaaccatgtcattcccatacccttcaatatcgttttcttctctcaagtatttctgcttctcttccaatggaagatggaaaaattcttttgtgatttcacgcacttgattcaaatattcaagtgacataccatggtttattccctaaaaaaacccacgataaacaaaccttgagctttgattaaccatggttagagtcatagccagccagaaatacttaaagggcagtcccataagattttatttcttaacatatcagtttcaattattgatctttggataatttatgacatgggttgttagatttcatacctgaaagcaaccaaagttggtgagagctgagttgagcttctgaagctcttgtgcagaagtagcaagaagaccaatatcaacaactggaatatccatgactgggacatctgtagatccaccatgaccatctttgtacaaaaagttttcaggtacttgttctccttggagagccaattcttgtacagattttggaagagaccccattggaaatggttagtgaaggatgagttttcacgttcagctagctgctttctccttaatttggaagtttgtttttggtaaggctatttgaacttttataatctgctttcgaaaatggtttggttgattgtgactttttgaaaaggttgttcttcagatactactagctcaaggaggaagtcacaaaaatggaaatcgcaattggatttggaattttacttttatggtatataaatatttttgtggatcctgtatgtactgttttctagaattcaagttgggatatcatattcaattatcgcccaaaaaacgctgataatatatatatcaattcttgcacatgtttccaaaacaaatctaaagagtccattcaaaatctacagaggccattacaaaaaaaaaaatgtaatattagtttttctcacaaattccagctaccattacttataaacggacaaatatataatatatgtccattaaattatttaatcataccaacaattaatgcgttacgtatctttcacattataaataaataaataaacttgttaaaatgtttttcaaagaaaaaatatcctcgtaaaccacaaaatgtactttgtctttttgattaaaccacaaaatgtactttgtcgtttattctttttttttttttttt

SEQ ID NO: 20830 - DNA, 8063 bp, Cannabis sativa
actgctgctagaagatgggtcgggaaacgagcacctgaaattgatgcagggtttgatcaagaggcagcagcatctgtgatggccagactcgccattgatcgagcagaggggcattttgctcgagatgtcataagatggctggatgatgcattgatccgttttgcctcaaagtttggagattacgtgccagaagatccatcttcatttcgcttgtcatccaacttctctctttatccccagttcatgtactacttaaggaggtctcagtttattgatgtttttaacagtaccccagacgagactgctttctttcgcctaatgctgaatcgtgaaggggtagtcagctcacttatcatgatccagcctacactttttgagtactcctttgatggtccaccagttccagtcctcctagacgttcgctctatcttaccagatgtaatcttgctcttcgattcatacttctacgtagttatccattatggatcgaaaatcgctcaatggaggaagcttggttatgacaaggatccaaaccatgagaacttaagaaagctgttggaagccccagagctcgacgcagagcaattggtggttgaacgagttccagctcctaagctaataaggtgtgaccaacatagtagccaggcaagatttcttctggccaagctgaatccttctgttactcaaaattcaacctacacaaacgggtcagatattattttcacagatgatttgagtttgcaagtctttttagatcacttgcaggtcctggcagtgcaggattgataaggtggagctctgtatataaccatatatatgtttctccacagtacaatttttatataaagagaatttttgtgtatagcttttgagggaaatagatgccttattttctataccgactataggtttcatacgttgctttgattgagtgggaatatattttttttttcaatttctttaattatcttatgttttactgtgagtgtgaccagactataattgtttgctccacttccttgaaattgcactcaactcaattggggatttcaaacaaatgtttgataaatatgccataattttgtttgtacatttttttggcatttttatttcttatctttatttttttttattattttttttttaacaaaagaagattttgttcaaaggaaccaacaaggatacaaacaccaaacagcagctacaaaactggccgaatccagcaacactaccagctagctataactttacataaatggacatcaaacttgcttttgctagtacctataaaactcatacatctgtatttgacaaccttcttaatatccatgctaatacaagagacagttttgtaactaagatcaaaaatacaattatttctatgcacccaaatgttatagacaatagtcaagcaaataacattgagtaatttttcctgcaagtttttgagaggtttagaaagccaatcataccaatctttgaagctctttggccagtctaatctccctaacttcagacacaaccttcaaattatacgggtaatccatgaagatgtgagcatgagtctctttgtcaactatacaaactagataaagatcatatggaattagcatgatcctgctgatgtgttctcttgtcaagagttgattattgattgcttgccaacctatgaatctatgtttcgggatacacatcttatgccagattcggttagcataatcaactttttgcatgggattaactgatctgtataacatattggctttgaacttaccattcttactagcattaacaatatctaaccgtcaatagagattctcagtcgtaataatttcttgaaataccagctcgcatcaagtttaaactcaacttgccaaaagtcctttccctttaagcagatggcatttatccacctaacccacaagttatcgtgtttactcgagatggctcaaacaaattttgccatcaaggttgtgttccattttctaccctcatgaaagccaacgcctccatacttctttggaagacaaaccttttcccaaaaggacaagtgcatcttgcgacggttaccttttaacccccaaagaaagtccctataacacttgtcaatagctgcagtgattttctagggaagaataaacaagctcatccagaagttcctaattcccaacagaactgagtgaatcaattgcgcccttccaacaaaggacaagcttctactagcccagatgtgcagcttcttgtggatcttatcaataataattctgcaattagaggcacgccacttagtcagcctaagttggactcccaaatagttgagggggaagttgccctcttctatttgcatcatcctcaagattctttctctgtgtatctcattcacaccaccaaagtaagccaaagatttatttttgttagctgtaaggcccgtagtttcactaaaagtcttaaaagcttcatgaacaagcctgaccgagctttcatttcctttacaaaaaataatcaagtcattcacaaagcaaagattcacaagttttaaggacttacagagagggtgaaacccaaagcctttcaagcaggatctctaaatcagcagtcttgtcaagtattccatggtcagcacaaaaagaagcggagacattggatctccttggcgaagacctttctcccttttaaaggacccatggatgcgaccattcatcattagggaataggaagcaccatggaggcaacctaaaacccaatcaatgaacttagcaggaaaacgaaggccctttaaaagattagaaataaatttccaatcaacaatgtcatacgccttgctgagatcaatcttgaagatacttctacctgaaacagtcttcctagtgtaacctttaagaagatcttgaaagatcaagatattatgggccagctgcctattcttaataaaggctcactggttatcatgaattaggctaggaagcacttctgagagccgagcatagatcatcttagagatacacttgtaaagggtattgcagcaggcgatcgtcctatagtcactcgcattcttaggattgtcaatcttggggataagggaaatagacattgagttctcttggcaggtttccagattgaaagaatcccagaacggcttgagaaacatcctttccaatttcattccacaaccctttgaaaaaacctgaaccaaaaccatccggactcggtctcttggtggagtagatatcgaataatgctttcttgatatctgacttactgaaaggccgaatcaaatggatttgttgaggaaggtctagcttgttcccaaaccccagactttcctcatctatccagtagctgagcttttcttccccataaaattacagaaatgttggagaaagtgatcaaccactttgggatagtcctcaacaatagagtcccccttccagtacgatacaatcctgttttctgcttttctcttcttcatgatggcatgaaagtagctagagttctcatattttacttcttttttattttatttgatttgtcatatttttaaaatatttaatttaaaaattcatatttatattttttaaactttgtgtaccctaaattttcatctacacctttatatttacatttgtcttttcctattaattttttccttctattttttaatcttttttattatttttttttacctcatgcaccttatttctcttttaattttctatcattttgtttaatttcttcttgttttctctttccatttactttttgtttatctcattttcgtacttcatttttttttttctttgttagtgtttcttttgcttcattttttgtctctattttttctaacataatggtaatatctatttgttaataacttaaggattttaggttcaaacttatattttttcccacccttccctcatcactgagctaatctaggagcttttttctttataacttttattctttttctttcgcattttcttttctttttttgatttccagttatttttttcttcttttttcacttattctatttatattccaccctccaaataggtatatataaagtcacataattcattttgaagtacccacattgggaccacaataaggagtacattagttattcacaatcaaagtacaaaaatttaaacttccacctactcacatttcaacgttataacattcatttgatcaatatcataaatatacaaaaataaaatcacgaagacttctagtactactaacaaaaaaaaaataataaatgtactttaaaaattgataataattatattattattgttgatcgagatttttgtcaaccaattaaacatatgattaagagcaataaaatgagtttagagagtgaattttttacgtaatttaggcgttaatgaattttagtttacgagttacttgtattaatgttgaatgttacgataatggcagaaagcttagagtatttgacagtatttttgcttaatctttcattctcccatccctttttaccatggaaatagtgctcctatttataggaaaaatcctatgggccttactgatgaagggccctctcctgaagataaccctaaaggtagtatctttaaggtatttttttgggataagttgaggaatacctcttttttatattcattaatcaaatataccctcatatttcattaaaatataccctcttttgtgagtgggttgcccaatataccctcaccctccacttaagtctagcacctaattttcattaacttaaggggtataatggggacatcatctataaaagtgggtatatctcaaaatatagaaataaaggtgataattaaaacatgtaaagtaaagtgggtatacaatgtagttttctcatttctttccttgttttgagggggggtttttttttccctttgttgggccttgaatccaagcccaagttgagtggtaggtgtatgtggacaagacttgttcactgatggtgacatgcgagggtatgagctgcccatgagagcatgagaaaactgtatgttagagaagtagtggagaaattcccacgattattggtgaaaatgtatttttggcaagaaatctcatccccttccttcatggccgattactgccactcattgtgccacaaagatggcagtggtcggctaggcttgttccttggtgagaaatggtttcattcacttgtattgcactccttggtgttgagggaacacatttggacaattttcccttgatgctttgtaggtggcgaccactgtcatctccttgtggcagtgttctccgaaaattggagagcacttccatttccatatggcagtgggcgcataggctctattccatggggtgttttatgccattttgactttatgcacaaatctatgtcttttcatgcccaaatgagtcaagtccttgttagtttccttgttggattgaggtctctacggtaaaaacactcacacgggcccatgaatcctagtttgggcatacttggatgtgtgagtcttgacacctggttaatgttttcgagttctttagaggtgccattgggccctcaaaaagcatgtcttaactcatttgatatttataagtctgggtcaaagtcgcaaaatttacttttttaattctttgaaaattgggtataataatgcgcttataataatatgtaatatgtttatctataaaattaaatcttattattgcatattttatgattaataaagaatttcaacaaaaaaaaaaaaaaagaaaagccttttaagtagtgttttcgcaattagtcattctttttttttttttttttgaaagagaaacactttattaagcaacactaggcttatctgctagtaaattagcagcaacacacataggtaaacaatcagtccaaatagcagacttctgaggcaaacggctccacttagctagactattagctacattattacaatttctagcagcaaataaaaactctaaacactgaaaagaatcacgcatgtgaatagctttttgaaccaattgacccccactccgtatagttggtagattcttgttgaatagcatggataatggtgtgactgtctgagcaaactttgctttgaaaatagaccaacggattgctaacttcaggctaagaaggattgcagcagcttcggccagcagaaccgtgctgcaaccaggagtgaactcaaattccgccaccacaagcgagcccttcgagtctcttattactgcacttaaactgaacccaggctgacctaccaccagagaagcgtcagcgtttataagatagaaatctattggaggaggaagccagtgcaggacctgttttggtgcaatagtcgggggagatttctggtttgatcccaggtgtaactctagtaaatcggaagcccaactgatccacatttgatcattcaaggctttgtgttggaagataaaagaattccttctttgccaaaccagccaagagaacccaatgaacttgagaaaaacatcttttggaatgtgatccttgagccaccaaataaaatctgcagcattagtaataagagagggaaaatgctgcaaagatccgaggtgcttccaaagctttagagtcttcggacacaaccaaagggcatggcaaatgtcttcttcctgctggttacaaagatcacaacgagtatctagcgccatacctcgtcttgtaagctcaatcttcgttgggagccaatgatggaacatcctccataaaaaattcttcattttcgaagtaaggatggatccccaaacgaatttccaccaagctttaattgaggatttattcgaacattcagcagtaatgggattagtaaaccgaagcttgtatccactagcgaccgagtagataccattaggagtggagtgccaagtgatccaatccggtttgttcatgggaggcttgatgcctaagacccaaggaatatcatcttggtggaaccaactaaccacttcattaactttccaacttccattaggatagagcaaagaactaattgtcacttcttttggaatttgaattttggtgtggaggttgaaaggaggacttctaggcatccataagtcctcattaactcgaatcgcatgaccatctccaacacaccatctagagcctttaataagaagttctcttccccatattataccactccacattgaggacccataatgccccaatttagcttcaaagaagctctctgagggaaaataaagagcttttaagattctagacagcaaacaatccggattagtaattagcttccaaccttgcttagccaagatagcttggttgaagtcttctaaatttcggaatctcatccctccttgctccttcaatctacaaagtttccgccaattaccccaatgtaacttgtgtttattcttggttgatccccaccaaaaccaagctattaaactttctatatcatggagaatccttttggtggttctaaagcaactcataacatagtaaggtaaagcttgaataaccgctttaaataagatttctttcccagcttgagagaaaagacccatcttccaaccttggagcttagcttcgactttgtcccttatcttcccaaaaacttgttttttgtttcttcccacaaaggttggcatgcccaaatacttggtatggttttgaacaagggtaacacccaagttagaggctaaggcaaccgctttagaattgtcgatcttacaacccacacacatctcagttttctcaaagttgatacattgaccggacaatttctcatatgttgccagcacctctttcagagtagaactttcctccacagttgcatcaaggaaaacaaggttgtcatctgcaaagaggaggtgagacaatctttgttccaaatcaccaaaccgtaacccatggattttcctagctctttcggcttcaaatatcaaacaagaaagccttcagaacataaaagaaataggaaaggagataatggatcaccttggcgaagtcctcgttcgggaataaaaaatcctttgattgagccgttgatgaggatggagaaggaaaccga

SEQ ID NO: 20831 - DNA, 6544 bp, Cannabis sativa
aggcaagcagatatagagactgaagaccttatttcacatattcattatagcatactaataaaataggagggaaacagccatacacgcatatacatacatatatatatatatatatgtataaagggttctaaagccaaaaggagcaaaaaaaacaagaaaaactggaacagagcattcttctagccattcattgttgccaatcgcacaatggctttaaacagagcaacactatggctatcatcattcatcaatataagtattaaaaaacgttatcaagtaatcaagaaaaaagacacttacccacataggtgttaaataagatgacagctcatcaaagaaaggcaagaaagaggctttaaatgttttgatcaaagtccccaatatctcacccacctgaacatggaaaaagatgtggttaaaaaaaaggagcaatagttattattgtgatacacttggagatagcattaagttactaacttggtcaaaaacttcttcctcttgttcattttcctccttaatcagctctatttcttcggcatcaaaatcttctgctttggccctctctgccctctccctctttcgacttgaactagcagtgatgacctgctttatctcatcaacaatggatctgacctgactttcatccaatagtggtccagaaatctaaaaaagaaacagaaaacaacattacaaatcattctacaaatttacaagagcattgaaaagattctcaactcgagctaatcttcacaatattcatttagttgtatttcataataactggtaaacagactatcacccttcaaatgaaacattaaagaaaaatcataacacaataatgaaaaaagttgtgcatttgaattgcatgcgtggaagagagaaaactccgtgtctgagtccctttttgaaaatacattgaagatactcctcccatcgatttttttatcattattattatttattagcgctattaaaggaactcccttcctgaaaatcctctttccttgttaatgagaaatcggagagacattttggaattgtttcctctcagttgtgtttaatctgctgtctctcttcttcctgattactacattaaagtcccattcaaatttttatttccatttaaacaccgactaaaagtgcaattgcactagttagatgtattttaattcagacaaagagcatatttattttttacaaaagagaaggaggccattgtcttagacaaagaacatattgaaggtacagggttttagaaagtatgtacatacataaaatatagtttgaacacaactaacctgcaagcattcatttaaagcgtccaacatacttgcacaaatctccgtatcaggttcctgcatacagattcaacgtaagtatttcaacaactgcataatggcatcacaaaaaatacataatataagtttgagtgagactaaatgggcaataataccaccttgtgcaatgcttccaccagagccggaactatgtaatcagataattgttttatataggtctcatttcgaccttgagccagccccttctctatagctaattttgctgaacgcagtagctccggcatggctagaaccaaaagaaaatcataactacaagcttctaagctaaatggggcaaaaagagtgataaaagccatcaaaagtaaaagtggaatgaaaacatgtattgcttgttattggtattacctgatacagctgctttcctaacttcttcgtgaaaatagaatttcaaaagcggaactaaagtaggagcaacctaaaaaaattatcgaaaccttatttagtaatcaaataataaaaaacttagctacaaaaaagaggtatgaatcacaacaactaacctggtcaatccatggaaagaatccttccttcaactcgtcggcatagcaacacagcatattacaagctgtagctttttcctccaacacgctagtcttgattccaattcgtttgtccccaagagtaattgtttccatactgtaataaaacaaaataaatagaaaaaaagaatttaggaaatgcatctaaagaaaaatagaaagaaaataaaagttacaagagagaaacatatcacattatcacaatactacatcatcacatgatattcacaatacaaaatgttaacagtgccttaaaaacagggagtctagctccatatactaagtcgaaaaactaagtaaacaatcctcccctcattttgaccacaccaccaaagctaaaaccctagataaaggcaggcctaaaaagaggtgagttttaaagactcttcatttcccaaacacatgaaagacagacaagtctgacacaaaaaaatcatgtttccattaataaatgtttaagataggccaagctgaagtgaagacaacgtgaatttatttcagcgaagacctgacaccctaataacctaccagaaagaatttcccacctgttgaagccccgtgcagcattatacaaaagcccctaaaattcagaagtatttcctaatccctccctatgttacgggttctccaaactgtacaggcctcataaagaattgccaatactcgcttgagaaaaaacaaagcatgcaaggatgtacagaactttggtaagccaacacaaacacattagactcaatgataaagtctactgtgacacaaaccttggactgtttacttagtgcaccccaaatgtgagcctaaaattgctttcgactataaggtacaagaccatcaacttggatgtagacacaaatatccatgaaatacaaataatccacatcccactacaatgtaacaggagagttggaatgtcaaaaagcaagacccgagtagggtgagaatcgacgagggaaaggagagaatcaagagaaacatatcattgcatggcaatgtggcaaaaattaaggacatattaacaattagaaatttcatttatgagtaatatcaggaaaaaaaaaaagtgagaaaacagagcagaaaattgtgagtgacctaattaagataattcactaacaaagaaaaaaaaaaactgatgaaaaaatgacataaagtaagacctttcatcatcagagtctgcagcatcatcatccgaatctgcagaagtaatggttacatctggcttaagttgagcagactggagcaatggtggcattacgacagacatgtaagggaggaaatcttgtcctaagcacttgcagagtctagcccatgcctgtatcattatagtgataaatattatcgcacataataaattgatatgcaatgtttctcacagtttgaaagataaagaacatacttgtagcatataacttgtggttggatcatcagtctccagttgagaaccttgcaaagacatcagcacgtccataaccttgcacaacagaatacatcaggcttccaataattaaaaggtagcaaggaatcaaattcgggtgccccaaaattgttgccagtcactctaaagtagaacataaggtaaataaaactctgaaaattgactttaaagtataattgaaattatgttatccattaatgcggaaattttataaatttcaaaaacttatacagtacaagaaagaaaaatggtgactatggcatataaatgtaatggtgatgttatgagaaataataatacctgctttgcgtcatccctgaacttatcttttccaacagccataccaaccaaactaatgcactccatggatttggctcgtagcatgcggttggatttgtcagttgcattcaacagaatagttttcaggtaaggcataaccgcatcgtagtatttttggaaatgctcctagagattacataaacaattcaatattgagtaatccatcataaagaatttaatattgtagaattgtctgtaaaattacctgtgatgaatcagcaactgatgccaaagctgtcaaagctccctcttgcaccatttgtttcccattctatacaagacatacagtgttaagaattgcatattatattttaactttttatagggtaaaaaatactaagtatttctgtcgaagacccacctggagaagtacaagcagcttgcttacgattccatccaagtagggggttaagatatctggagtgcagttctcactgaagttgagcactgctgaagcagcatgagcctgtagatatacaaaatgcaaatttaacattgaaaatattcaacttgtttatattaacagaatcaaataaatgctcaaaattctcataaaaaaatgatacttaacttgtgtgcaaagttcatacagaaatgaaatcacatagaaaagacaacaaacaaagcaggtagaaaactaaagccaagaatgagtctctattttgactagcataataggacatggtcatgaacatctgaataaccatctaagcaacttagtactaacatgataacatcactaatgttcataagtaaaataaagtgcaatatgccattaactaaagcagaagctataagagcaaataaacatgagatttaaaccaaattcagcaagtcttgcgtaagtgtaacaaatgcacaggatggtgaatgacctgcactctaggattctgaaaatcgtccatggctgcagcaagtgctggcaacacctggggatgatatttaacttgcaaatctgggcccaaatcagtagataactgcccaatggcattgatggctgcccacctaacccggggatggggatcttggaacgagttcaagaccattgcaaccacttgctccaagttcttgatcattacctgaaacaacaaaaacatatatcagttaccaaaaaaatgctattgggcaaaaccttagctatacacaaacaaactaaatagcacaaaaaaaacccaataccttttgacatccctcagcaatttgggccagcgcaatcaacgcagcatggtgattttgccactcaggagcggccaaataagcagacaactgctcggaagcaacagggacaatagtatttccacccaaagaaatcgaaagccggtccaaacactcctgtccaacactgtaattactagtttcaccagcatcctcatcctcagtctcagcactatgccaagccgggtcatcctcaatatccaaaagcattctcatcagaatggcaaacaatctgctaatgaactgaggcaacttcctcatcattccaggcgccctctccctagcctcggccaaagtaatgacaaattcaatagccaaatgtctagtcccttcctcaagggtgtcagcctcagcaatttgcaacatggacccaaccacatcagtaatctgcctcctcaaaaatctgggttcggttccagccaactcaatcaacaattcaagagcttcctgagctgtagcctcattgccattattcaaagcctcagtcaaagtcctcatcatagcaggcaacaaatcctgaaacctatcacggtcaccagaattcgacaaacactgaatgaaattaatcacagcattcaaagcagcaatcttcacatcagaactcgaagaagaattcaaacagtgaagaaaaacagcgtgcaattccttaatatgagggacaagagagtctcctatgtactgagacaactgagcaaaaatcaaaaaggcagattcttgaagcttaggagaatcagacgaaacacattgaaacataaacggcaaaagttcaggccaaccattatctggcaaaatcccagaagcaagttccgaaaccgtatcacaaagcttcttagaaatcgacttagcctcctctcgctgaatacaagacaagagaatcgatttaagagaagcctgagtcgccggagtgagtcgaggccatagataagaatcatccctagtgagttgttttcggagcaaaatagcagacatagccctaccctctggatgaggagaaaactgaagaaggtgagcaagcttaagagaaagagaatcgggatcggtctgcttacagagattgaaaagaagctcagcctgagaacgttgctcgttggaagaagacatgagatgtgagatcagggtttcgaaaggggctgtgtcaggacccagaatcgccgccagttgggcttgttggagttgattcgactcgggttgtgccatctcgagtaatgggtggatatggcggcgaagagaagaaaacacagagagagagaaagaaagaaagggttttgattaaggtttttggctatggctgctaaaaggtttggactttctctctctcttttcttcttcttcttcttcgaatcgactctgtgaatttatatatgaaatttttcttactgaaagagaatgagaaaaaggggatattgattgattgattcaattcggctgtaaaagaaaataagggttttgattttttgattttgggtatttagggcaacctaaaaaatttccccttttttatttttttcccctaatttttgccaaatttgaagattttatcactttttattaatatttttaaattttagagaattacttcatatattataggctaattaggattttttcccccaaactttgatatgtaccaaatcatgcccctgaacttttttggctgt

SEQ ID NO: 20832 - DNA, 4199 bp, Cannabis sativa
atatatattgtagccctagtccaataatttcattttacacactttgagatgatcactgcatcatcatcatcataatattattatataaccaaaatcattggaccctccaccaattctctcattggtttctttcaataaatttatatagattgttgtttggaaaagcagcaaaatgattgtaagaggttcaaccaaagctgattggaaaaaagcctaactttgaccctaccagatctaaggatcatgcattacaagataactatgaatatatgtaataatattaatcatttttattcatgttatacatatatataccccttttcaccttcaattatatagaccaatattttacaactttgttctatggaaaccatgtctttagccttcttctcgtttagttattacttaaatttttcacaagtatatatcttctctttaattttgttactttatctaaggtcttagagaccaacacgagtgttttcagcatattttgtcctcactcgcatgttttttgagaaaaattccaggagatcgcccatcttataaaattaatctaggtcaaacacgcttaagtgtagagttctttcgtgattgactaccaaaaaacaagatgcaccttgttgatataagtagtaccaatcaatccatttaaatcattttcaactgtgtagtctagtcgcatactacacagtacagtcttatcttagttagaatcatcacacttgaccttccccaggcaatgtgaaattacacagcttatacgatattttctcttacggatcatagaattactgactatcacactttatagtggaccaatactgtattcattggattatatagggtaatactagatacatactcaaattacacacactaattatacacaatgatgtgtattaaatattagtcatttttatatttttaagtaagaaccacatcacttttaattatatggttaagattaaatacacattattgtgtgtaattagtgtgtgcaataagtgtatttctagcattactctattttgtaaatacataaaaagataaaacatttacaaattttaaggatttacaattttttttttttggaaattatcccatatactatgtttttaacttttttttttttttcaaatttacggtttagatttctaaagtggttgcagcgttagttgcaataggagtttctgtataattttttgttgtaattgagattgtagcgctaattgcaataggggtttctacgtaaaatgaagatgaagtctccaacatctgaaaatgaaatgacattattttctttatattaagatgataaaagcttcagcaaaaagcaaatcagagtcagtatctgtatctgtatcagtactatattaataaatgtttttttttttttttttttaattgaattcagagctatatacatttatagctaatcttatagatatgctgtagttgaaatgatgcaagctatgggcctaagcctaattaaggcctatggctagtttttgggtccggcccatgtggtcctgaaagtcaattctaggaccacctttaaatttattatgttggtccagatcctaagccttattaaaagcccagtacaggtaccttgtgtcagtggatctgatcaatgggctcttgcttgtgtagtttttcttaggaattatttcacaaatatacaaaaacaacaaaaaataaattacaaaaatacaattgtacggtttaaatattttacgggttttaagattttatttacagaaaatacagacttttgatgtattttaatgttgtactcttgttaactttttattaattttttgttatttgtatgctatttatttaagatgttattttcttgatacttttagtaattttcttattgttttcgtgtaatttttgtagaacactgtaaaaatattataaaaaattttgaatgtaaaaatataaaatttttacaaataatgctttatataattattcatttttttttgatatcatgggttttattatgtaatttgcatggcccaaatttaattcttagataggcttgtttcttgaatttcaattcacaaatacttaaattgtggacctattatattatatagaaagcccatgaattaagagtaaatgtctctttttctattgctcaattggatttcatttgatttttgctcattttcttttataaacttactaattagagtttaagcaatttcttttttttctttcgtttattatttggggtgcatatttatttaagcaattgacttatgatatgattttacaatctttatgcttccatctaaaattaattgtgtttgtgttgaaatgacattaatttgttattatgaatagggaaaataataagacttgtatagattttgtgtttgtgtgtttgaatagggaaaataataacacaatattttaaaaaaaaattctatgtatttttgtaaaaattaacccaaattctagtatttttataagtttcccttgtttaaataacttttatcgtcgcgagtaaaattggaaaaatatccaactatcaaaggccaaccatgacaaacctataccaattgtcaatgtggattttacaaaattataacttttatactattagtttataaaaatatgagtttttctcctttttcaatagtttttctatttagaagttaatttttatgggtttttcatttcttaaaagataatgttcttttcagcatccagtggcaacataagtggggtctaacaacataatttctggcatggccgcagaaaaaatagcttgtggacagaccccgtggtttgcttgtccgtgcttgcagatacaggggtaggagtagaatcagtcggggaaacattatccttttaaataacaatgctagaggaagtagtgttctctttgccacttccattcttcttcttgggaaccttgggttgcttctcaaaagtatctgcctcggaggcacttcgctttttgcctcgcttaactgagacaccaaggccgcataggagatttttcaagtcatccatgtctacaaagataaaacaaaaagaggttaaaatttgtaaagtaaggataagcataaagtggcgagatcagaactcccacctaagtaattaccataagtgctaggcgaggaggagttgctattataagtactaaactctgtagaactagtgatcataaagagatcaagggaattaaatggagacatatcccaatcccaactagcaaccctatgagtatttgtaccatattggggatcaatttcataataagaactattgttagtcagcttcatggaacttagggtaccaactatcaaacttatgggctattaggtcaacacaatttcagataaaaaagttgtattgactatcttcaaatttcaataaagttgttggcttggccctaaagacggtaggagaccatctgtaaatgtaagaagttttacctcggagagccccctcttcagtctcaatggtttcccgagtggttacattatttaagttgtgagtgcaggcgacgtagtcgcggtcctcttcttcctcaggcactagtatctgctgccaagtaggatacttattgtcttaacgccataagaccttagaaatggaccaacgtaaggggcaattgatctaacttttgattcaatcaattctgcatagaaagtaatgtcaagtgttgtagccaaaatggtatacatattacatttatcaactcgcaagtgcacaaatctttattgtagtataggttataaagaatgagattgaactcatagaaattgcgtgagatcgaagaaaatacttatttaatgacagtaataaatattttcagtgatatttgggtcgattgggcatttacttcttgggttgtttcagcttcaaaaaaactatttttcatgttttgggccatctttttaccatatatatattttttttctttcttttacaaatgctatttttctcaataaaacacaaacaaaattaaatctaaacaaaatatttccaacataaactatatcacgttaattttaataaaaatattcatttaaaatctaattaattcgtaattcttttaataaaaataaagcattttcttaactttttattttttttttctccatatgccataaatactaattattatttataaacaaagataaaattaattttaaataaaatattttcaa

SEQ ID NO: 20833 - DNA, 2222 bp, Cannabis sativa
  modified_base (48)..(49): a, c, t, g, unknown or other
tgatggtatctcgtttgtatttcgtgaggccaatagagtagctcatgnnttagccaattatgctttggttaacaaagctagtgccatgtggattggggtggaactctcttgtgcaagtcaagaactttctcttgacatgcctaatcctgtttgattgtgttattaatgaatatttctttttcaaaaaaataaaaaagtaattttttttatattaattttatcaaattgagtaaaaaaaattgcttttttattttattatttgtgaatcaaggcatgacaaaatatgcatttatatcctacaattacgtgtatttctctaattgcatgagatcgatttgtcaactccaagaagtaaatataataattaatttaaagagcgattgctttcgtataacttattattgtgcgtgtaaaatcagacctcgtttcattctcaactgaactttccgtggcaataaaaaaaacttcaggaaaaaaaaataaacttcttttttattttattttttcttaagaggaaaataatttatttattgaacttttaaaattaaataaggctttaaaataaataaataaaaaaaaaggctgaattatattttctgggcgaataaataattcattccattaagttgttaaatatgaaccagaagtgtatttagtaaaaataaaaaataaaaaagcaataagagaaaatgtagaaaaaaacatggggaaagtgaatggaaaaagaaattgaaaaattctgtatttttttgtatgacagaaattaattagatgcaaacaaaaacttgcagacccgacccaattgcatgtttttgttgccttcttcaatcgttttgctataatgggttttcctttctgaaactccacaagtcaaaacctatacgacccagaattactcacccgccatggaaggtattgatgcttttatttttaataactatttccagatcaatttgtgggatttgggttttcagttttgagggttttaaatcacttgcatgcatgaccagattttgggtaattatgggaaaataaaatctgggtttctgtattttgggtgtttggtttctcagaaaagtaggaattgggttttgattttttgtgatattatttcgcttagcattcctacttattggttccaaattccaaaatttggtgaggtgtgattgttttaccaatctaacttattgtttttacttttgagaatcttattgggcataatatctgtaattcacttcattactagtaagcatttcaattctcttgttgcttttccgacatgcctttgggtattcatgttcctcttgatttgttggattttacccagatattgttctaaaatggtcaacggatatctctttgtaccgtttgttagtgtaatgttgttacgatcttgttgtgatttgctttttgtattatttatctgaagctgttgcgcgtagatgctgctttggatagtacgtttgccctggttttgaccttgacaaattgtgactatgaaatatgtgtaaagatgtaccattaaggatgaaaatgtttggatttatgtgactgaatacatgttcttgtgttttggcattgattacttgaagaactcagccttgtgctgatggtttctcatacaattctctgatcttttcttctgttggaggttcaagattttgttacttgcaatcatttacataggttaagccttcatttatagcatgctgattaccgctgtagttgttgattttggttttgcttttactgtggttgatattcttatatttctcttaactagagcctatactagaaacctaaagcatactttaagataggaaaggtttagaatctgccatgaataatataattggatggagatgtaaccattgaggtttacttggcaatgatttggtaatctgcttctcatttctgttactgatgtttgatgtatatgtgagggtttggtaattctacctattaactactgcatgtcatttttgtacttcattattagtaaacacagggcacatgcatctttgctggagaatcattataaataaacttgttcttttctttttcgaaactttggccttgacagtttgacctggagacctccctgtggccccaaggttttattgagcctgtggggaacggaaccttggaacaaatgcctaccagcattttccaaggctcctccttaccgctagaccacccccttggttttttttttttttttt

SEQ ID NO: 20834 - DNA, 6712 bp, Cannabis sativa
  modified_base (6670)..(6687): a, c, t, g, unknown or other
tatagccgtgatattatttctacgtacctgaaacagagattaaacattcttcacattcatgttacaacaactccaagattgttctttttttttttagctaaaatgatttaattttcttacacattcaatgttgctaattataaaagtttgagatttcactgtttacaattaacatccatgtgtgatgttactacactaacaatttatcactatactaaaatgttaattcagttacaacccattagaaaattttgttaaaattttagtcagatttgtgactaatttttcaattatatttatctatatattttctattatagtaacaataaaatctatggtaaacgattttatgaactctgtatttccacatggacctgggatgtcgtttcttttagttcttttctattatcttcacataatatgtacatgttttacatcttagccaataagagtactaactttttcttattggtgtatatattaaatattctcattgcattatcccagaaaattgtgagctagaacttctaaacagcaaactctatttaacaattggattcatgtgcaggttggtcactttatgttcacaaaccatatggaccctagtaattcagttatgcataaaacttgctttcaaagttcaatgactgcactgaaggaagttgtacatgcattccccgtggtggctataaatgacacgtggaccagattggctgtaggtgttgttattggcaagatcaaaagtgctagcattcgtcatttgtgtctatgacttgcagaggtattcagcaaatccttccagacttttgctgcaaaacttgatttcttacttgctggagctgttgaacctttctgccataaagaacctgtaacattaatcaagaatgaaagagagagatgaaagagttgtaaagaaatgaaatagaaagattaatctcatgtgtattgatgtcggtaatatgttacatttatatagagttacacaatcaagcaaatagtaacaaactatcaactaactgtaactaacataaggacagtacactaactgtcataacagaaaaccaacaccttaggttccctaatactacttcataatgtaaataatctcaatgtgcctcttttgattggggttttttcacttactaaccttgccatcatatactagcaaaattgaaatcatttccttttaatcaattaacttcatcactcgatgtagtgtgctcatgatagcaggggcagcatcagaaacagttgtagctgctgccgtttcagccttgagctttttgcttggagaggtatatatagcttgttagattcccatactttttagtgtaatactggttcttgaatcttgatttttcatcaacttctgtgttacattttgcatgtaagtatttcatactgtcttgctggttaatatcatgttttgtttgttctagttctgttatggtgcaatcatatggtgcaagaatttggagtaaaaggaattggtcaaaacagagaagatggatgtcccaggtgctaatacatttggtgttgagtgttaatacacataatttaattgtataataattaattgtttaaaatttgtaatatttcataattatgtgtgattatattcaattctcatggaatacatcataatacaacccaaacttaataaatatcaaatacatatattcaatagtaatttaaacagacactccaaacttaataatcattttgaattaaagactatttgttttgctactgacataatttttttccataaggtaaatactttcaaaagtgatgattactttccaaacgtaaattaattaaagttagtttagtgtttcctccaaccaagaactggtcttaattattaattaatacctttctagcttttagcgttgtgaaattaccatcttcttttggcattttgatggcttccattattataatatatatatatatatatatataaaagaaaatagaggttgatttgaccttataaaagaattaaacagtagaggttgacttagctccaaccaagaactggtcttaatgattatcttatctgtatactgaactccacaaagtggtaaagatttcttggtcaagagaaaaaaaaaagaaaaacccatagattatcttcaaacttgatcagatcagtgttgtgttaacaatggctgaagcagtgatttcagtggtggtagacttgttgggttctcttcctcttgagaagctaatacaagaagtgagtttgctcaacaaagttcaacaaagggtggaaaatttgaagagaaatctgaggtcaattcaagctgttcttcatgatgctgagaacaaaagatggactacaagtagtcaaagtgtcaaagtttggttggagacacttgctgatgatgctcatgagatgggaactgtgctcgatcgatggaacactctcattctcaaatctcaaattgagactcagtttcgaatcagaaattcggttagtttcttcaggccttcttgttcttattctagtttttgttttttcaaactgaataagctaatttctcaccgtgagatctctcaaaaaattgaagaactcgatgagaaagtaaccagaacagctaatcaaataggtcaattggggttaatagaaaccatgactagagttgattcttatggggtacaaaaagttttggggagattagaaactacctcttttattgatgaagctgaaattcatggtagagatcaagataagaaggtgttgttagatatgttaatgtgtgaggagagaggccatggaattgaccagggattctttgaggtcatttctcttgtggggatgggtggacttggtaaaaccactatggcacaattgacattcaataatgaaactgttaagaaccatttttctaaaaggatttgggtttgtgtttctgagccttttgatttactcaaaattgcttcagcaattactgaaatccttcataagggtaataatcaaacttatacccaagaagaagatgatttgagtcaaacccaatgtaggaatccaccaacatttcaaaccttagaagcagcttttaattggatttctgttcgcctaagtaaatgtcgttttcttctagttctagacgatgtatggaacgaagagtatagtaagtgggagcctttagagattatgctgaagaagttagattgtgtagggagtaaagttttggtcactacaagaaaggagagtgttgcacttgtgatgggatctagtacttctcgtgtaattaagttaaaagagttgaatcagaacgagtgtcaattgatattcgaaagacgggcttttagaggtagaaacagcgaagaaatcgaagaattaagagatgtttcggtgcaaattgtgaaaaaatgcaagggattacctttagctgcaaaaactttaggtggtcttatgcatttcaagaaaagtaaacaagaatgggaaggtgttttgggtagtaaattgtgggagttaaatgttcgcgaagttgaacaatatcttttcggtccattgctattaagttatcttgatttgtcatcttatgagaaaccttgtttgttacattgttctgtatatccaaaagattatttgatcaacaagagacaactagttgaattgtggatgtcagaaggttatctgaattcggaggaagaaggggcaagagtttttcaaaatctaacaatgaggtctttttttcaagattttcaagaagcaaatgacatatatgatgatagtaatgtgatttgtaagatgcatgacatattacatgacttcatccaatatttgacaaaaagagaatgtgagatcatagaagctcttaatatcaactcagatgttatgaagaagtggagccttggtgatcaaagtactaggcatttaaccatagcaatggagtctaaagctgagtttcctaatttggaattgagttatgggaacaaaaggtttcttcacacccttctaattttaaggcaggaaaagaatacctctgttgataattccactttcttgactctaaagcatcttaggacattgaatttgtccaaatgtggggtcaagagattgccagagaatattggtgagttgatacatttgagatatcttgagttgtctaacaatcctttggttaaactaccaaaatcgatttgcaacttgtgcaaccttcaaactttcaaattagagtcctgtcgaacattagtagaggtcccgaaaaggatgggaatgcttatcaacttgaggtctttgtattgttacaaaaatggtgctttcacaagactaccaaaagggatttcgagcctaacttcgttgcgatttgtagattggattgaacttttcggagataaaactaagtacttgactcttggagagttaacgaagatgaatcgcaagctcaaaatcgattacttgactattcatttgaaaagtcttgtaaatatagaacatgcaaatgaaactaacaaggtggatcttacttcttgggaacttgtcaatgaactcgtcgtcatataccaaggaaatcgacatgaattcgatgttgcaattgatttcttcgaaccccatccaaagttgaaagttttgaaagtaagacattcttgttgccgcacattctcaccaaaatggataatgtccttatatcttttgaaagagattgagttttatcattgctatagcataagttcattacctgcagcattaggaaaactaccatctctcgagtcacttcgattttggcatttcgataccagaaaacttggccccgaattattaggaatagttgaagaacatggtgatgaaagtattaccctattccctaagcttaaactactcacattcagaaatggagattacttggaagagtggaaaacagaagtaccttgtaatgtaaagcttatgccatgtctcaaaaccttgcaatttatgtgttgtcctagtcttaaagtgttacctgaatttctacaaatggttcctttggaatttgtatacatatactatgatagtgttcttatggaacattgtagaacgagggaagggaatgaatggcccaagatttctcatgccaaaaacattcttcttgatgatgttcatgtgcaaaaagatggtcgttacatcgagtaaacaatgtgataattagtgttggtttccaatccatgaatgcacaggtaactttttttttttaataattttgtttcttggtttgattcttataagtatgcatgttaaataatcattgttatgtgaaaaaattaagttttgtgaatttttccatatatagagagagttgtaggggccaaagtgtaaatttatttttttatgtaaggggtctaattaatgaattttgagaagaaaaaaaaactatatagtagagatggtagtaaatttaacacttttcttagtaatattataatatgatgaaattatctatttgggctagggatgaaaattgagtgggtaataagtgggttatgccccacttattcttaatctcccataagtttggggtaggagaattttcattgggcataaagacttattgggtacccattaaaattaaaacaaattttgttgcttaatttacttgttatcaatggttttttatgagacaagtgtacaaaataaattttgcatgctttaaattggttaataaattaaattttgattaaacatttaaaattatctttatatgagaatatttagtttttacttaatttaggttttttctttttgttggttgtgtgtcaaaatcaaaagaatccccagcagcctgtggcctactcatcaagtgggatctctttcatatctagccgagcaatgcacaaagcaggcctaatgggcttccattctcaaggcacggcctcaaaactaagcccagcagcaatgggcagcaaatcttcggcggcagcccacctacttctccccattccatttaggtatatttcaccgaaaaaaaaaaaattacaaaaatacaattgtacgaaattttaaatattttttcgttttttatgattttacttacaaaaaatacggtcttttaatgtatttttatgctgtattttgttaatttattattgactttttgttattattttgatgttattttacagttacttttatgtaattttttatgttgtgttcgtattattttataaaatatcgtaaaaatataaaaaaaaaattataaaaaatagtacattcatcaaagagaaagatattaaatatttggagtttctttttgtatattatatggatgatccaatctgcaaggatcataattgagaattgtttgattgtctttttctaaggaagaggcgaaacataatcaacttaattattccttctatttaagacaacaagtagctaggctcaacttagttcagcagcccatctttcacaatgcatcctatcacatatttgtaaagtacgtagctcatgtataaatgtgaacctttctaacaggattgaacaattttatatatattttttgtgattaattaacatcttctatgttaattgatggttttttttttatttaaataataatttttggatttgagagtcccacataaactgtgaatgaaaatttaatatttacaaatgagaaatgctaagttaggttcggtactaaagtataggggtgttcacaaagtatccgatccaatccaatcnnnnnnnnnnnnnnnnnnccaatccgcaaaatgcggatatccg

SEQ ID NO: 20835 - DNA, 2775 bp, Cannabis sativa
  modified_base (1403)..(1418): a, c, t, g, unknown or other
tttttcctcttttaaattttcaaattactatttggaaatgttttttattgggtctaaattattatatatatatatctatatatatatatattgcagataaaagagaatgggaccaacttttatatgatttttactcaaagcaacactttaagggtcaatattgttcaattatgaaaaatatgtgtctaatataatcaagttaatataattgttgtgtagatcttatgatggctgggctgaccccaacattatatttatatatttatatatatatatattatacaatattattatgatcgattatgatcatctttatcacaattttattttgttttattgttattgaaagaaaaaagcaatagcaatcaagagagggatgactagctagctagggtttaataacgttcatgcatgtggttcttccctactttttaagttccgcgccatcttttccttctgtaggtcttttcaatattggcaacactattaatttatttatatatataattaaaagatacttaaaataataatagtaatgtaaattaatattctaactcttacatgagattattgaataataggtcaactttgctcaataatatattaatttagctgagagatgtacgtagttcatctaaaaactattatatacatataataaaattagattttatacatcacatgataattattgtcctcatgttggggccgacttaattattaattaactacaagttttatattttcttgaataaaaaacatgtataagttaaataataagttaattagatttatattttatccaaatccagataattaataattttaaaatttaaaaaaaaaagtttctttacgacgtcggacaaaaccatgacagcgttctaattaacgagctgtattaatttagcatggactcacatgaatgggaagggaaaaagaaaacaatcattaacaaaattacaaaaacgtttgatgagttacgtattaagatggcttaacggtatataataacattaattcattatctatgtaataccactaataatatttcaatatttcttcttattttttattttcttacttttttgtcagataagaaaaaactattatcttcgtgactacttttatagttctcttcttttcaatcataatttgaatttgtttttattattatgttttcaactcttgataattaagtttgaaaacgaacgagagggaatatatatttatataattaaatatattgatttatattaggggaattaccccatatattatttttttaattttttttttttttcaaatttacggtttgagtttcttaagtggttacagtgctagttgcaataggagtttctataagattatttgttgcaaattaggttgcagcgctagttgcaatnnnnnnnnnnnnnnnnaattccgtaaaaatacaaaaaaacaaaaaaacaaaaaactattttgaagtgtaaaaatgaaaagcctctttatattattactagtttatacgttgtaagtgctatattttgtagtgtggtaaattatgtgctatagtattatttatttatttggtagatgaatttagattttttgagtttatacatttactttgcaaggttatttagcatttaagttgaaagtatctttgccaattgttatgagctgacaccagaccatttgtcaacttgggcgctgggtaccctaatcccgagttctcaagatctcgttttgatacttattccaaggtctttgaacctgaggatgaggtctcctatcttgttttgaccattccagattcattaatggtcaaattagatttgatatttgagcaattgagcatcccaggttgattgtcaacctaggcgctgggcctagcaccaggtcaacttgggtgctgggccccatttcaaagggctcgtttttttgtagttttctccctgatttttcttaaatcttcattttttctaataacgaaaaaaatactagaaacactttttggtgaacttgatcaaaaacagcccaggttgataatatgttaacctgagcgttgagtcccagttttggttctccgaaaattctatttgattcttggaaatagttgaatctcaatattttctgaatatggtgaagatgctttgaagagttcttggaaaataccattaaaatggcccaatttgacaaaatgtcaacctaggcgctgggtcccatttttggcacccagaaagtcatgtttcttcttcaaaaggacatattccccatttttatgaagatgaagaagataaaaaagttagatatttgatttgatacttggaaggtgccaaattgacaaattgtcaacctggacgatgggtgctcgggaccccagtgctcaaaaatgaacttgctctgattctgatgccttacatatgtctgtggtatgtttagttgatgtcctaatgaaatttttgacccatttgcactaagacagtataaaaaattgaagccttagttgagaacatcaatgtaggcgccaagtgaaaccctaggtgcccaggttggctttcgagttgcaggttcgtgtaatttcaactcccaaagcttagattattaggttgctccatgtctttatggtacagaatactgaatgatagtggattcaagttattaaagttccaacttccatcccgaagatccaaagtcaacttgggcgcaaggctagggtcactacaaaaaaaaatcattttagtgataactttttagtcataacaaaaaaaatttgtgactaaatgtaacttt

SEQ ID NO: 20836 - DNA, 1785 bp, Cannabis sativa
ccgtcccccgcccgtttaatatttcagggacaaaaagtatttccccgttccccgctccgttccccatttagacggaaaatccccactccattagaggcgggtccccgcgggggccatctccgtgggggaaagatgcattcctactcaccgatatatgtactataacaataatataattattaagacatatgagatcatcagagtgatctcattcgtataataatttggtgttgtatcttctatttaatttaatttattgtgtgatctatgatgaattaatttatatatagaaaatattttttaatagttacattaaatattaattatgattgttaaatattaaataataactaaattacttataatttaattttatttattttctcataaatgaaaaaataaaaaaatatttataaatgttagttgtaaatttttttattaaatattttaatttaaaaaattaatttattttaactatataattaattataaataatttaaatataaaaatagaatttttatttgttagtactttattatagcatgtcattacaaaaaatataaccatcctaattacaattttaatgtataaattaataatattaatttggagctatatacaaattaataattttaataaatattaaatgtgctatatgtattggtataggtaggtcctcttgcaataaaatatatattgtactctcaatgtcactaatgtgtgtacaatatattatttgtgtgtaaacatgttggttctctctcttcattttcaaactcacgagttttgaatttatatatacatatttatattgataatgatattgaaggaacactaaaatttctatgtatttttttttgtctacatatatagcatacaaccattattataaaatattatgttatttgtatgtatataaatacaattaggatgaaggtagaaataaaatataggtgaggtaatttatctatttttatagtaaaatgttaatttattatattgctattggtaaaatttaatattgaatcacatttattgtatttttgattgagtgatgtatatgtttttgacacccataaaaaatattactattagaaatgctcttactattagattattttaaaacaaaaagtataaaagtgatgtgaataaaatattatatttttaagtaatataaatttaacaccaataaaaaaatatccctattgaaaatactctaattgtggtgttagtacaataatatttaataacaatacttattttaatattatgtagacttaaacatttaaaaaattatagtatatgaagtttttaacttgtaatctctttaaattttaagaatactttactagtgtcactacaccaaaattttttatttagatattaaccccaattaactttgaaccaagctaaattctagtgtagtggaggatcggatgagtacaaataattttattgttaagaaatgcaataattaattaacaatatcactatgagtcttttttgtatgtagttggttttttagaaattaatgcatcctgaaattaaagagatgagtatagagtgtcactaagtcaacacgcggctaattttgagatgttcctttcaaatttaacacacatataatatatatcataaatcatgatataatcaatggaatcttaatttgataagctggataaaaaaaaaattaagaacagccatgggtctcttttttttttgctattttttggaattgtggttttattgtcagagaaaaataaacaataccgaaaactgcgagt

SEQ ID NO: 20837 - DNA, 1796 bp, Cannabis sativa
tcattaaagttgatacttctagcaatatagattcgaccagttgagtgtagacatctataacctttatgaaaagggttgtagccaagaaaaacaaacttggaagttttgaactcaaatttatgtgtgttatagggtctaagaaaaggaaagcctgcacatccaaaaacttttagaatttgataatctgggacagatttgtataggctttcatagggcgatttgtattgattgacaattgtaggaagcctattaataagaaaaataactgagaaaaaggcatcccaccaaattttagaggcattttggcttgtgctagcatagttaaacccatttctgtgacatgtttatgtttcctttctactctttcttgttgtggatgagtatgtgggcatggatgtctaaatagaatacctagtttttgtaagattggttgtaaatttctatactctcctccccaatcaatttttatacatttgaatttaaggttaaattggttctcaacaaatgttttgaaggttagaaagataggaacaacttctgttttggtttacattgggtaaatccagttgtatttggtgaaatcatctacaaacaagatgtagtacttataaccttcatgtgttggatatggtgaaggtccccaaacaccagagtgaatgagttaaagaaattgtgttgtttttagaggaacgcttaaaaaatgcattaaatgattttcaccatattaacatgcatcacaaaaaggcgaatcagattttgaatattttttattcatggagtgtaaaactttatttacaattatatgagatggatgtccaagtcaattatgtcataaagcaacaatttaagtggactccttatagtgtttagaactgatatgatagctagaaacattataagactgatttgaattgaaagttacatcacttttatttacgattaagtgaatagagggagaaggcaaattccatgaatctaaagaagggaaagaaagttgatatagaccttgattaagtgttcctttaagaagaaccttccttgtaatcttatccaacacaaaacagtgagaagagttaaacaagatatcaatatcattatcaagagtaaattcagaaacactgatgatttttatgtgtatgtatggaacacctaagactttgtgtaaatgcaatgatttatatgtaaaaattgagcaagaaccaatagcaagaaatgtgagagaatcaccattacctattaccaattttccttttcctttgtagtccactgcctcactcaatgttgcagcaccaaacacaacatgatgagatactccactgtcaaggtaccattgaggatcaaccattatggttgtagatgcaagaagtgcctaaggtttctctgaagtaggttcagatggagtggagttgccttctccttgataactcaaatcaaatctgtgatgacatttgattgcagtatgaccagacctgccacaaacttgacaaattggtttgtttccacctcgattgttgtggtttgtcctaccacctctgccacggtaagcacctcaaccacgattggaattgctagagttagaggatgtaaaggagcctttcttggaggcataattggctattggattgtgaagatccaaggcaataggggaatgttgttgctcaagtcgccgttcttgagtttgaagcaataattgaccatcctgcaagataatgaattcttttgaggtaagagtgataatagcaaagtcatattcattacataaacctccaagaatgtagaagataagctcatcatca

SEQ ID NO: 20838 - DNA, 2830 bp, Cannabis sativa
atatatatatttatatataaaaatccacatataaatacatgcacatggattgattctagttaggagtttttttttattattatgctaagaagacttaattaattagttgagtttaattaattgtttttataggtttataaatataaacagaagacactaaccataggagattcatcaaaaataatataataattacaaacaatacgtacctatataagctcaattatgattaataaaaatgtcaaagcaaaactaagtcaactctaataacataaattatgtaccgaataaaataagagtgtatgtgttccttggagttgaaggaaaacaatatcaaaaaaattgacaaacatatatgtggaacttggacaccacgtcttaaatttgttatacattaagttcaattccataatcaaatacattattattacaagttatacaacaaacaatgaagaccaagaaaaaaggtatatctcctaacaaaaatgaccccaataaccaaaactactccaaatattcatggccaaatcttccacaacgtctcatcaaacacttacaaaagcactcatctatgatgccaaccatcaacttcaattgcgtaataaagtcatggagatctcattcgaacaaaaggcactgcagtattaatccatatgattggcttatcgaatccgatcaagattacaattttccagacgaaaacactcaaaaccatgtcaattcaggatactgtaaaatgtcatttcctcgagatccattctattgggttcaatggaggcaagcaccgaaacaatatccatggcaacactttttgggttgttgccatggtcatttggtggtgcgacgagtggttggtttgacaactgaactaaatattttcaaccctgttgatacgtataattattcccaaggttggactcttccaagtttggaggacgacattcctgttaaatgtgttgctatttcgtcacctccttctgaatacgatttgaatagatcctgcatggtgatggttgtgacggcgatttcatcgccggctttcatcattcttaccagtgaagcaggtaacggatggattaaacaagattgtactattgttgatccacatgatgaaacatttcgagacaaaaaatgttatcgtagagaaaaatacatgcgattcacaaatgtaattggcgtcaatggaaagttcttcgctttgagctcacaaggaactcttgcggttattgagcgtgtggatgaacacggtttctttaccaataatgaacaatatcgttttgaaatcacatgttttggaaaaacacgagcgattccttcgataatttgcaagggttttagagagtgtttgatagaatatgaaggtgatatcttgttagtttttcttgtatttggaaaagaagatagagttgtggatgatgttgaggtttataagctttgtttggatgatttatgttggatcaaaatgaagagtcttgatgagaagacattgtttgtgggaagtgattgttgtattttggtttcggctgaaaaagtgggttgtaaaggtaattgtgtctattttacacaacaaaagataggaggcattgtggaagattggtttgaatatgatatgcatgttggtcaaatctcttctagatggactcatacaattccatctagtaacactaaatatatggagtgggatgaacctattgctgaagaagatgatctggatcttataagaaatagagaaataatagggtacccacgtaaatactactattaataagatcttcatgtatgccttaaataagatacaatcttgttatcacaaattacaaaataaaacttacacaaaaggttgtgaatatatagttaatagtgttaataaactatatattttcttgaccgagccctaatttgtagtatattgataatttagatggtgttaaagatcatattttgactccttactcataacctgatctattaactgatctattaaatactaataacatgtcgtgtcaattttttattggtccagatcataattttttaaaaattttaaaataaaaaactaaaaaaatatttaaaatttttttttttcttcatcgtcttcttcacccacctcagccatgaccctcaccctgttagtactggtgttagttaggtgtgtttagttgtttgttatttctgttacagctgtatatagttatttataattgtaattagttattttatgttgctctttccttcctttctcgcattgtatatatactgagccattggctccattaatgaacagagttcattctattcatttcattctgtttctctctctcaatccaacatggtatctaagtagcctcgttttttttcgcttctgcaatcggttttctctcttcttagattcgttttcagctcaaatctgttattctcaatcgtttgcttcttgatcaatgacgactccttcatcttctccggccacgtccgacgttccaggagttgcagctcatccgtttcaaccagtggtgttctcccacaaacactctatcaagcttgacaacaacaatttcttactctggcatcctcaagttttgtcagtgattcgtggccatcaactcgtcaattacatctccggtgaaactgctcctccagaccaccaaagtttctaactaaactggatcaacatgctcgacgaatcaaccctttgtatctccaatgagagcagcaaaaccagcttctctactcatggcttctttcttccatgatagaaggcgtcttgactcgtgttgttggcaatgagacatctgctcaagtctggaaaacacttgaggtatatttctccact

SEQ ID NO: 20839 - DNA, 4574 bp, Cannabis sativa
  modified_base (44)..(59): a, c, t, g, unknown or other
cctgaactatcatccatgttagaaattttttactaaaattagannnnnnnnnnnnnnnntaacaatcttaatagttcagggaatttttaacggcaaaaaacaatttaagaggcatgatttaatatatgtcaaaattcgggggaaaaattactaattagctttaaattgtatctactctatagctaacaataaatcgttatttcttttcacgcagttttttttagctcaataatcatcaattttatcccaaataaagtcatcggcacataatcaaatttaaaccatataaataaacaaaaaaatatgcaatatgggatccaaaccatattatttgttcaaaataaatattcaactgtaacattaaaattaatgtaatccacacttaataattgtgaaaaagtgtgcataattttctttttgaaatggaaaattgtgcataatttaagtagcattatatatgataagaaatatacaaggcatattcaataaataaatataaataatattaaactaatgtcagtcttatataggagaaggatccgtacgggttctacagactattataaaatataaaatacaagaaaagagagagagggaaagggaattgaaaggtttcatttttatatttggtgtttatgtgtttgaaaagtataaaaagatacagaagaaatggggtaagtgggagagagggagactcttcgttgatagcagaagaagaaaccacattaggaaacttcaaaggttaaataatgcattaaatggaatagaaagcagtgtaaaaatggtggtgggtagtgagaataggaggactaaacagaagaggagagttggtttattgtatgatgatagaatgtgtaagcatgcacctcctaacaaaacagattggccagaaatccctgatcgcatcaaatccatttggaacaaacttcaaacagctggtataccccaaaggtatcatcttttttcagttttcatatcatcattgaaatttaatgcttgagaaatgggaatttctgttggattttttaggggtaattttgtttttgtttgcttcttgtaatttatgtttcagatgtgttctactggatgccaaagaggtagaagataaccaagtattgttagttcactcccaaaatcatttgaaattgatgaaagacataagttccaaaaaatttagttctcgaagaaagaaaattgcatcaaaatatgactctatttatttcaatgaaggatcatctcaagctgcttctcttgcggcaggctctgtcgtacaggtactgttttttgtatgagtcagcataactgatgatatcttactaaaagttcagaagaaactatatataatgtgaagattacacagaatttgttttcatactataacttttaagtaaaataaaatattttattactctaagctacttttccaaagctcaaatcagtgtatgttatgctgatatatgctaccttataaactcatagaactttattgttgatgttttttgacacaggttattgaacaagttgccaaaggggaactaagttctggtgtggctattgttaggcctccaggacatcatgctgaacatgataaaccaataggattttgtctttacaataatgtggctattgcagcgaaattcatattgaatgaaaaagtgaatcaccttcccttctctactaaaggattttatttcctccttttacttctttactaagtcactacatattatttctttttaaaaaagctatcctttcatatggaaagttacttctgcttactttcaactgaccatttgctttacttgacagccagaactgggtattaaaagaattttaattgttgattgggatgtccatcatggtaacggtactcaaaagatgttttgggaggatccacgtgtattatttttctcagttcataggtatgttacaattatatctaatgaactctttatcttaattcatctcaagcatcattgaataattaataattacatccccaaactataactataaatactttctagattacaattttttgataagatagattttgtgttatcaagggtatgcaagtgacattacagtaatttgtattttgtaaagacatccttcccataacaatgttaaattatatgtaggcatgagtttggaaacttttttccatttaatgatgatggtttttacacgatggtgggcaatggaccgggtgctggatataatataaatgtcccatgggagaataatcaatgtggggatgctgattacattgcggtttgggatcatattttgattcctgttgctaaggaatttaatcctgacatgattatagtgtctgccgggtttgatgcaggttggtcatttatcttaatttgatgtattctatcttccttctcttacctttttcatttttatgtatcacttcaaactatgttgatgaaccaatatgttgcttggtgcagctgttaatgatcccttaggagaatgccttgtcacgccatttggatactcagtcatgttgaagaaggttatacatacatatattgatcttattcatattttcagtttatttcagttatctatattgtggcacttgttgggtgtttaatttgggaaatgcaatctctgttttttatttttctatgttacattctacttttattttgggaactaagtctaggatgattcagtattgccttttccttgtccttgtcaaatcttttgtttattcagttgatggatttcgcccatgggaaagttgtattggctttagaaggaggttacaatcttgaatctacagcgagttcaatgcttgcttgtgttgaagttctgctagatgataaaccaaatgatggatcttcagatgtatacccgttagagtctacatggcgtgtaataaaagcggtaacataactttttaatgtactgtcattttctttgtgttttgtcattttcaggaatgaaggagtgtgtttgagggagttggtgctacaaatcatcaacaatatttcttttgctgtggctaattagtgtcttacttgaatctttcatttttaattaatgtttgcatatcatctattttgcaggttcgccatgaattacatatgttttggccagtacttgcagaggaattgccaaaaacaataactaatcaaaaagtacctctaattccggtagccttttttctcctttttctctttcagttagatatatatacatgctagtctaaattttgaataggataaactaattttattccttcaaccagttgaaagcatgtatgctgtgtctcttatttttaaacatatagtactttaataaatttagtattcttttagcatgtttataatcggccatctcacctttatttttagaactttttgcattaataactagtatttgaattattgcattgattcatcaaatctacaggaagtttgatgtgtgatgtgtgttgttttttttttttttgagaaaaaagtacaattgatgcattagattcaaataataaattgtaaatttaaaaaagtgacataattatacataatattaagcaaactcatatccttttaaattaggttgagtaattttttcattagtaactaaattttatactgattgcagttcaaaaaaaaagaaaaatttatagtaattgtgtcgtggtaggttcttacatatgttgtttaccaagttagcttcttctaagcaagcccttaccaacattgcaacctagtctctcctctttcttatctctgagttggtgaatgacttgctaatattgacataactgttttctccactgtaatcatctttagaatagctaataggtttggttccttgctagcaatcattacttatcttaaaatttatgtacaaaactaatataatttatctttcccaactagtatgtgacatcttcaagctctgattctgaagtagactctctggacaacctcccaaccaacaaaagttctttcgaagatcaattcttgacaaccatggctactgaggttgacaatttcatctctcatcagtttggtaagaacctctagctttcttactttatcatttttatttcttttaaaccttctcatacaaatatcattgtaatccttgaaattgataacataggctgtttattgagtttttaggaaaccagataaatttagagcttaaagaaataagaaataataaataataaataaatagatttttacgtggttcagacgttaatgatttttagttcacgagtccattttattaatcttttcgggcaaatgtttttgagattacaaagaggttacagtaaaagttaatctgcttcttttgctccacttgagagagagagagagagagctctcttggaatttttgctgagtgtctgtaagtaagcttgttctttttttttttttcgcctgaagataaataaggttatttataggcgcacaaggggtaaaaggcataccctttaccctcctaggtgtcgtactccatacgttactaaggctagtactgctaaaggacgatctggctattggctggatgagaaccttcttcatcatgtggtgtatagc

SEQ ID NO: 20840 - DNA, 5695 bp, Cannabis sativa
cgttgttgattgactaaccaaaaatatttgattggattgttgacatgaatttttaacaaacctacataattgtgtggacatgcatgatttagtgttaataataaatttgagacaaatttctaataaagttttttatttttttaattattatttaagcactgagattaatagcaaagtagtcattctcagtttactttaatttattaaacttaaaaaagggaaacttgattaaataataaatagaagaaaggaaaatatcactaattttttaaggaatgccactattttgtagtgacttctatttatttttattttattttttaaaattaaatatataataacaattttttccttaaaatatggcttatatcagcaagtgcaactcttgatcattggagaaaagttcaggataaaactactctatcatctttatatctcgaaaacattgatgataaaattgagttttggataaaatcgaacagtaataacatcaagattgatgctgccttatttgataagaaaacttcctatggatttgagattatagctcgaaatagttctgatagacttctgaacatcaaggtcgagtatcatggaagtctttatctagtgaaagttattgaagtcgtgcatgggtataaaaggtcttacttgggccaaacacaagaagagatcggaatgtagagattgaaactgatagcatgttcattgcaaatcgactaacggtttggtcggtttgatcgggttaaaccggccaaaccttttagcaattttagatttctaaaaaaatagatttgtagctttcttcaattgtagacttcagagtcaattgaccttcagataataccatttatgacgtcataatccacgtcatattgtctttttcttcatctaaactggatacacatgtaataacttatttgttttatgttggaaacagtggaattttatttgtcttgtccaatgaaaagtgtacacgtcattagctaaatgaacggaaattagtagaatactagaacgtgttattcgattcgtaattgttttgtaattaattaaggttattttttataaaaattattatattaaattatataaaatttgatattgtatttatagaagtattcttatttttctttcaaaagaaaaagtattcttatttttatttgaaaaatactaaaggcaaagtatcacatttctatagtattgattacacatcttaaaatagtaatagtgcttaacattatcataagataagagcaaagtagttttgtggtaaatttacattagattttagttttgtgttctaatacacaattgtaaaattttaatgtaaaatttaatatttaattaatgtttttttaagaaaaataaaacctaataactttataattaattttattattattttattatgtaagataataaaaaataatataagtatttcataatttaatgtgataggtaaatatactaataaaataataaaaataacataaatgtaaatgaaaaaatagtacatttattgtggggatttttttaataatatacttaaaatataaattatttacaaaaataccttaataaatctcaattacaataataccttgccacgtcattaaagaataccttaattttaaaataatatgcctgaaacgaaattaatcccaaatttcgttttttattattttcctgagttttcaaatgtaaccttttagttatgctgataaaaaactaattagttacttttacataaaaaatttcatttttatactaaaaacaaaaacaagatcaatttgcagagaaagattttcctctctcgactctctcgactctctctcgtttcgaaggttctcatgctctcttcggaagagcctaacctcaggatgagtgctccccaagcctagaccaaatgaaagatcggatcaaattcgatccgaataagtcgggtaggctttgatctgattcgagtatttgatctaacggggcagggcggggcagatccttacatgatctggatcaggttgaatcatagtcggatccgacctgacccgttgacactcctaaatggaaggaggcacagaaaggcgagagagttagttgtctcctaagaaatgaaaagaaaaatatgtttattttagttagttattatttatatttgtaattaaatgtgatatttattaataaagtataaattttagtaatgggataaataatatttgtgagattaaaatctatccaaaagaaaactattggttttggtttaagacttttatgaaactatacaacttaaatattatcagaaattaacatatttatttgcatacatataatggaattacaagcaacattttgtaatgtaaaataatcagatgacaacatacggagcttagttttgtaaactatttctcaaactcggcggcacacatcaccttcacaaacaatcccctcttgtccattctgaacatcatcaccattttgaccctcttcttctaccttctccaaagcacattttgggtgaagatcaaagtcacattcctcgcagtagaatgaccatccctttccaatttcttcacattcatcacaacaatatcctgcacgacgagtaagcttaagctcatgttcagcatgaagatgatgttttaatttctcaggccacccctttactatttcttcttcttgttcctcacaatgttttaactgctcttcagtaaatggataagcatttgtcccatgattccttacgagttccaccacatcttttgtcactgttcgaccagaagggccaatggctactgctgttggaatgccctcgattttgaatgttcgactcaaaagtttcttccttgaatctccgtatggaagggctaaccaaggcatgatggagaagtattcctcgaatgaggattgatcagaatcgctagagatgaagattacttcaaatgcatcatctttctttttgatgtcattgtatgtcttgataagcttaggtgtgaatccacgacatggtggacaccaatgagctgagaaatagagaacaatgttctttccaactagtttagaaattggtacctaaaaaacaaaatgagagttataataatctatggagaaaatctagaaaacttgatacataatctaaaatgatctaaccttggaaccattcttgccaattacaaaattatcatctctagaaaccaataatgactctagtgtttgtgattcctgttttgctttctcaatctcagcaagagcataaatcttctcttgtgtaaaagggtaggcatcaattccatgttcttcaaccatttcaactacatttgagttcacagtcttcccatccggacctagaataactagtgtaggaaggtttaaaacatcaaagtaacgcactagtttcttagtcatgatcttatccttgtttggcaagaccaaccatggaattgtttccaatcctttcttgaactcatcctcttcataattcagagatattaagacaacttcaaacttctcacctatatccttgagcttattgtaaacctcaacaagtgtattagtaaattcaacacatggttcatgagaacttactgagaataatagtccaactgttttaccttcaagctcagaaacaagaacctgtcaatgcataaattagaatcattgttaacaatctctcatgtaaatatgaaaatgaagcaccaaagcaaagttagcacaataataatatgaaaataaaatgcttttagtgacatttatatacaatcttacataactattacaccaaacctagtgtattatatttataaatatcattttttattataaatatatgtcgtaactaactaaaatatatgacgactacccctctccgcttctatgtaaatctatgtgattcatataaactacaaagataggaaaaaaaagaaaagatctaaccttggaaccatttttgtcgattacaaaatcatcatcatcactagaaaccaataacgactgcagtgtttgtgattccagtttcgctttctcaatctcagcaagcacatcaagcctctcttgtgtaaaagggtaagcatcgatgccaaactcttcaaccatttcaactacattggagttcacagtcttaccatctggacctattataactagtgtaggaagagttgtaacatcaaagtaacaagcaagtttcacagtggtactatccttgtatggcaaggccaaccatggaattatttccaatcctttcttgaattcttcctcttcaaaattcagagatattaacacaacttcaaacttctcacctttattcttgagcttattgtaaatctccacaagtgtattagtgaattcaacacatggtttagaaaattcagcacgtggttcaacaaattcaacacatggttcttgagaactcaagaataagagtccaactgttttaccttcaagctcagaggcaggaacctatccatacataaattagaatcataattaacaatcaaaagtttacactagaatgtagcaaggaaagtttacctgtttcccatctttcgaaagcagataatttcgagagctagatactagaatagaactcaaagtttggttcatcttagcttcttcttcttgttctttcaaaaattcaattttttcacgagagaaagggtatgcatcaacaccatatgccaacacaaccgagatcccattctctgtcaaaatcttcccatctgaatcaataatgattaggtcaggaatccccatgatgtcaaaagaatcattcaatctgtctatggtgtcagtatcagaaaaggggattgcaagccatggcatttcagagaagtatccattaaatgactcctcatctcgatcagaagacacaaacactagttcaaactcttctttcgaagcaacctcgttgtagagttccactaatttaggagtaaaacgataactcggaccaaaccatgatccagaaaaatacaatccaacaatcttcccattcaagctactaatgttaacctatgaacacaaaagtcacaaaaatctttgtcagccaaaatgcttactgaactttaaactttaatatcaacaccattcgagtaaatgggattctatgaaaccaaatttcatcactattcttaaagcaaggaaagaattctgatgtttgcagcttgtgtatttaaaacgacacaatttttttacttacacaaatttgtttttatataatatatcaacatgaaaataatgttattttaaaaataaaataaaaataagtatctgtatttttgtaaaaaacaatttaaatttgtaaaaatattaaaaaaactgtaaatttgtattttttttgtaattttttagtctatttatgtatttttattagttaaatatatatattttaatgattaaaggacaaaaacatcttttttttaataatactagttttatttattttattttttaaaaaaaaacctgtcaacttaattaatcaaatactaatccttagttgatgttattacacttcacatttctttgatgttagtatgttagtatacttcatatttctctattcctgaccgatttggtagcttataattagacccttaattaaagttgatagagttcttttctgtaaacagcctagtatgattttgttttataaactatatcttcatgtactggtctttgtttgattttcttattaatagatatt

SEQ ID NO: 20841 - DNA, 5897 bp, Cannabis sativa
  modified_base (3939)..(3942): a, c, t, g, unknown or other
cagttaaagggaggaaaaagggttaatcataggaaaggtaaatgatatgtggagactaacaacaaacattcaagaaagaagaaagcattttaaagttctcttggcttgcactcactgctgaataagcttgctaatgctgtagtttattattgaacgaggttcgcctgacattgcgatttcgccagtcattgaaacactatgtaaaacattccatataagaatacttgtgtaccttcagaaatggtatgcacaagcacaattctcaatatacaagctacagagtattgcttcacttgtatgtttttcaatatgattaactagtgatttttctagtaagtgaccctcaacattggacttgacaaggatgaaaaaagaaagatgggaatttgaagtggaaaattcacttccattcccaaaatttaatattcaacattatggtccacagatgcagctgaagtctgatcaaatcgtttctcatatatgttattgatttattttcctaaaacttcttcatagtctttcgaagattatcaatagacaccaaaatcccacataacatagttaaaaacaaatacttttaaccatgatttgttgacacattggcccactagcttaaagatgtctatttcatcctttatttatattatagagtggaccttattgtactcttcaatggctatgcagctttaattcaaactcaacctccctagtggaaacggtaatatatttgatcattatcctacttatactcaggggaccactctttctctaaatttcttggacctgttacctatgtagtatgctccttcattctctagtgtgttccagcttccagccaaaacagaaaaaacaaaaaaactcactgtagtgtgtcaagtccaggcatactttggtaaaagatttaatttttcctagaaaagagagagagagggaaagaaacaacaatacccaccaagctaactaaccaaccatagaagtgaaaatgtccaactcagtataccttatcttctccattgttctcatctccgccgtttcgacccttcctcctatttttgccacagatcatattgttggagctaataagggttggaatcctggtctaaactacactctttgggccaaaaaccatacattttatgttggtgactttatctgtaagtgttttccttttttttttctgtacttatatataggtttggcttatatttgaagattttgttaacccaattcttgtttaaagaaaagattgaattttgagctaaaaagacttcatctttaggctttatgctatgttagtttgaaaatgaaccaagtaaactttaccttgttgtttaaactttttggctttcattttcctttggtcctgaaaatgcactgtttgtcacagcatttaggtatcaaaagaaccagtacaatgtgtttgaggtgaacaaaactggatatgacaactgcacaattgaaggtgcagtggggaactggagcagtggcaaagacttcatactcctcaaagaggccaaaagatactacttcatttgtggaaatggacagtgcttcagtggcatgaaggtatctgtggttgtccaccatttgccaccacctccatcttcttctcccatgcacttatcccagaactccacagctgcagaaattccaagacctggattccgggctttgacagtgtcgttggcattgatctggtttggttcttggggtttttagtgatttgttgtagcttcaagctttaaatcagggaagttgtataattgaatcatttcattgttggggttcttctgtttttgtgtgtgccaaactcttaggaggcagtcctttttcaaagtgatttttttttccttctctcccctacttctgtgaggttagttctcatttttttgccttggctgcatttcttttcttaatggcaaagtccacatttatggcaaggtttagtttggtatttattggattttggatttaatgtaccatttttagattattatagaggtttatgttatcttctaattaccggttatgacacttattaatgcattcaatgttctctttctctctctctggacaaaaatatttagttcttttcccaagtcccatatgaaccttacatttattttatacaaaataaaccagaaaaggatccaggttacttgccaagctttgtatattttatgtacataattttctcaatttttctgttagatagttgtgtttttaattatatcaatcgttagtttgccaaaagggttagtatataatggagcaaggctatgagtcctttaaattcagttgataaaaaatctgtgggaaatgtagtttatagatttgatatggaagaaaactggttctgctttgactgattgcaagattcagctacttcttgttcttgttcttctttcaattatgttttcattctacacacgaaaagaaaaatatgacactacacagctccattccattcttcaaaacaaaccattttctactggatatggagagatttggtttccaaatttcaatgaacatactatattgattctgactttaattcaaaacaggtgaaataaaaacagacgtttacagctaaaataatgaaaacaaaagttggggattattaacaaagtcatatcaaaataagatatggtaacaatattaacaagacaagagacacaatatatatttaaggtaaaagggttttgttggttttgataaagatgagagctttagcaacttccaccatgtctggtctctcatccacattctctttgatacacatttctactagcttggcacattccattatttgaagtcttgtttcttcttctccttcttctctcaatgtattgaccttcaactcatttttccaagcatcaaaccagtaggcacagggaccatcgatccaagtagcaggatcagccatatatagccaactctttccagtcaataactcagacaatagaaccccaaaggcatagacatcactcctttctgtaaaacgcccatgaacacctgcctccggagagataaaccccaaaaccccaaaaatacgatcaacgtctacatgagtttccccttcaggaattggaattgaaccatagaaagtatagagtttgggaccatagtctttgtctaacaatacttgtgtactatgtatgagtctattaatgaatgtctttgagtgaccatgatgcagataagcaactgcattggctactccaatcccaattcttaacttggtctcgaatggcagccgtggtggcggttctttatttctttggaggagaaaacgagagagtttaccttgaatagggaagtgatcatataccagcataggcaactctgtgtcaagacagtatcccaagagcttcaacacattgttgtggttgctcatctgtgatcccactgcaacttcagttgcaatcatttctaaatctacaaaatcatggtacgttttcacacaaatttcacaatcctcctcatcatcatcatggtcaattactcccctatacattttgtagcctctactctggtttatgattctgctaacatggaagttgtttgttgctctcttgagttgttgagaagagtatgaacggagttgattagattttccattgaacaaacgaatggtttgctctaacacagcacctccgttcttaataaagaaaccattcatttcttcttctgtagtattctttttagtgttcttgtagcatgaaaacataatgaattaaagaagattaatattgatcaaggagatgaagaagaagacatggattatggatggtctctttctcatctttatttacaatcttctttattgacataatgtgaatatgatatcttatttattgactgagtccaactacttgggaaacaagtggtaactagtactaatcaatatcaaccacttatatatatataaatatatannnntatatatatatatatattcttggctaatatacgtggaaatttcttcaaagaatagtagattgaagtgaatttaattacagtgatgatttgggtcacagggaacaaaagtcaccacatgctgatgggtaatgcttgtttttcaaccatgtgaaagtgtgtttgtgtttttcaaccatgtgaaaagttacaatagtaatttttgacttgaggtatatgtacacatttacatttaaattttgaattgatttttatgtcttgttcatacatctaaaatagagctccatccctttcatttgttcatcccatcacaaccatcacaagctatttcaaaaggaaagagtgaagctctttagagaaaaatagtgagaatatctcttagagagaaatctaaaagagtaagaaatagagagttcctacaaaattgtgagaaatattttgtagagagatggtgagattaccacattagtgagtatgagaatttttgagtgtattccttaagtatttgtcaaaacttgagagtataatattatgtatccattattattgttatagattagtggaaggtttaccgtaatttttatttgtcacgagataatttcttgatgtgcatttaatgctttgattattatttgtaaagtactatttatattggaagatatttgaaaattttgaatatgctctatgattgcagctgtgactgctctttcacataagaaaggaatttcagagtctccattgaattttcctgcaaatattgatcctgaaaaggaactgaaatattttccattattaccaacacatacaccttggtgaaggttctgttctgtgtctcaactctcaatcaatatataatttgttcattgaaattattaacaaatctctctatatcctcaaaaccaatctttaattcatttcttatttcattgtgtttttatgctacaaaggaaaaaaaaaaagactaaaagtactagagcggaagatggtttgtttttgaagaatggaggtgcagtgttagagcaaaccattcttcggctatactcttcccaggaactgaagaaagcaactaataacttccatccaacccaaatcaaacactcctgcttgaactacacactctacaaacgatcaataatagttaatgatgatgaagaagaaatttcagtgaaaaagttctttccaacgtttaacaacgaaatacacttgaaaatgactgcaaatgaagttgcagtggcatcatagatgagcaaccacagaaatctttagactttatgttgtgttagtttgaagattgaacagaatcaacttcactttgttgtttaaacgttatgatcatgagagtacatgagcctttctttctacaatcatctcatcttaataacaatataacaaggcaagacaagacacaatatatatttaagctaaagggttttgttggttttgataaagattcgagctttagctacttccaccatgtctgatctcccatccacattctctttgatacacctttccactagcttggcacattcctttattacctctccttcaactctcaatgtattgaccttcaactcatgtttccaatcatcaaaccagtaggcatacgaatcattgtagatgaggaaatgatagaaattcacaaaacatagacaattagaaatgataagcatatatgtagaattctcagaaatccataaacttaacataacaaccataaacaaggaaaacaatattgttggggtatttatcaaatcaaagggtattgttggttttgatcaaaatgagagcttttgcaacttccaccatgttaggtctctcttcaacactttcattagtacacctctcaaccagcttagcacattccattatttgacctcttatttcttcattttcttcttcttcctcttccaccaacgcattggtctccaactcatgtttcaatttaccattccaat

SEQ ID NO: 20842 - DNA, 2366 bp, Cannabis sativa
  modified_base (1352)..(1367): a, c, t, g, unknown or other
ttaagtatttatttacaactgggaattaaacttaggtatttatgtcgcaaattactcttttagttaatactctttttcagaaaactgatctttagtcagagtaagtaaatagttaagtgtcaaagggtctttcttagaaaatgaataatggccaatcaagcacctcttcaactgcaatttctagacaaatacatgtccaccttaagaccatatctttttctgaatgtgcaatacaagtaaaactgtatgctctttttgtttttttaaaaagctttattgcatttctcatgtagggaacattatgaaaacctgattaagcagtgccaaatgatgcattcaagcattggaactggttcccttgcttatgctgtgggatctaaagttatggatatgagggccccatcaaaagatgatggaataagagattcaaatgtggaaacaagacaagcttccattgataatgctaacaaagtagagggtaactgttataggaataatgatactaaattgtcttcttcataccacagtgaaacttctagtgattcaggtgaccttgtcagtgtgaggagaagctctgaaaatgctgcaaatgactcttctcttttcatggctacttctggttcccaaaactacaaggtcgggactgaggcaaatggatcaccgcctgtaaatgaaaattgctttgattttcctcctttgcctgttactgatttgtttggcaagagtgacaaagaaaaggaagaagttgacatgcaagacagcaaattttctcaacaaaaattgagattgaaggataacaaaatgcacagtttccaaataaacaataacatagatttagttatagagtcaaacaccccatcatctaacaatgtatcacatcccataaacgctgaaattgaaatggctcgtgctgatgtctgtgaaccagaaccagtactgcagtccaatattagtgataagaagaaagacatagtaaagagaatgaggatatcagatgtaccagatactgaatttgttgatggaactttgcctcaagtagaggctgtgaataaagatagagtatctgaatggctttggactcttcaccgcataggtaactttatttcattttttcgttccacttttttctttcctaatttaaatgtgctctggtgatagcattgttgaagttattctttaagctgataaattaattatggtctcagtggttgatgtggtgagaacggatagtcatcttgaattctacgagaacacaaaaaatttagctaggatgtcagatattcttgctgtttatgcttgggttgatcctgcaactggttactgtcaaggttgttctctctctctctctctcnnnnnnnnnnnnnnnntatatatataaatatttgtatatatattatttttatttattttattagttaagaaatacagaaaaaaaggaaatgtacaaaaatcaaggtgcctttacattaaataactttactatacttcctgcaatcatctgctgaccaattgattcaaaatgttattaggtatgagtgacttgctgtctccattcattgttctctttgaagatgacgctgatgcattttggtgctttgaaatgcttttaagaagagtggtatgtcaaacttgataaatattttcacttttagtccttataagattacaactatatattttcttaacgtaaaaatctgcagcgtgaaaattttctaatggaaggaccaactggagtgatgaagcagttggaatcattgtggcatatcttggaattaactgacagagaaatctttgcacatctgtcacatataggtgctgaaagccttcattttgcattccgaatgttgctggtactcttcaggcgggagttatcatttaacgatgctctctgtatgtgggaggtttgtctaattttcttgtttggactataatagaatggaatgctggatttcttttgcttttactttctcgtgtgttgaatgttggaattttgtttttatccccaagcagtgaattaaaagaaagcacagttcttgaacttggctgttaaaatgaatttgtattgatgttgaatagtctgatgggtatcaagaaaatgcaaatatgtgttgagtataagcatcttgtcttgctgtttttacgtaaacgaatctcaaagtacagaatttcttccatttgttttaatgttgatgtttaataaaacatgcagatgatgtgggcagctgattttgatgaatccatggtcaatgatttagaggagagtcgtctagaagcattgatggttcagctgccaagagattctgaagcagaaatgagggatgaaactgaagaaaatggtagcggtactacaaaaggatgcttagagt

SEQ ID NO: 20843 - DNA, 4153 bp, Cannabis sativa
  modified_base (39)..(51): a, c, t, g, unknown or other
ctgctattacaggttaaaaaaaaatgtaaccatatggtnnnnnnnnnnnnntaaccattgaatagtcacccattcttgaatgggtctatttctaaaccccctatcactgatcacattctttacaatgcttggattcgtaataacaacattgttatttcttggattattaactctgtttcaaaaaaaatttcatctagcatattgtatgatgagtctgctgtagcaatctggaacgatttgagggttcgttaacagcaaaataatggagcacacatctacaatctaaggaaggacttaatgaatctcagactagaaaaccaaacagcgagtatgtattttaccaagctgaaaactgtttgggaacaattgtccaatttcaggctaaactgtacttgcaatgggtgttcttgtggaggagtcaagaaattgcaagaacatcacaacatggagtacatcatgtcctttctcatgggactatccgatctttatgctcaagtgcgaggtaatatccttgttatggatacactccctgaaattaatagagtttttcatctagttacgcaggaagaaaaccaaagaggaggacaaaacaacaccacggatccaaactccaatatggcttttgccttccaaggagaaaagaattcaggcaaacgtgaatcacaaggaccacccaagactcaacaaccaaaacgtggcagacctttttgtactcattgtaacatgcatggacacaccatcgagaagcgttacaagatacatggatatccactgggatacaacaaaggagggaaatcaaaggatgctgctgcaaaccagttccaaacctccaatgaaaccagtttgggtcccagtgaaagcaacactttgttgccacaactcacaccaaatcaatatcagcagctcttgaatcttcttgctgcacaaaccatcaatctgcccactacaaatccgagtacatctaatgggaactcaggtattatcttaactaactatgttatgctgtccaaagacaagtcttggatcattgattcgggtgccactaggcacatttgttcagacttgaatcttttttcaaagctttcattttattgctgaaactaaattaattctgcctaataataattgtcttctggcatatcgaagtggtaccgttagaattaacaatcatcttaccctccataatgttctctatgttccttctttccattgcaacattatttctgtttaattgtttgacaaaagggaacgattactctttgaaattccttgctgataatttctacatacaggaaacgcacaccaagatgatatttggcaaaggtgtatcggctaatggtctctacatattggacaccacacccgttctcatcaatgcttttacatcggctgaaacttggcacaagcgtttaggtcatttgtcaaataaatgtttagacttactacaagattctttgaattgtgaaactaaaaatttgcatagcattgaaccttgttacatttgtcctttagccaagcaaagaaaattaccttttcctaataataacagatttaccaatcattgttttgatcttactcattgtgatatttgggggccttattatgttacttctcactctaatcataagtactttcttactttggttgatgatcactcaagattcacatggatttaccttcttaaacaaaaatctgatgttatatctattataccagaatttctttcttatatacaaactcaatataattgtattttcaattattttagatctgacaatgcccctgagcttattttcaaagatttgttctccaaaaatggaattacacatgatttcacttgcatagagacacatgaacaaaatgccgtggctgaaagaaaacatcaacaccttcttaatgtcgcaagagctttatattttcaatccaaagttcctatcaaatactggactgagtgtcttatgatagctgtgttccttattaatcgaacaccaacacctaatctcaaaaacaaaactccctacgaaattctgctaggcaaaccacctaattacagtgaccttcgatgcttcagatgtcttgcctttgcttccactatttcttctcatagaaccaaatttgcaccacgggcaaggacatgtgtgttcattggttatcctagaggaataaagggctatagactatatgatattaataccagacaattgtttatttcttgcaatgttatctttcatgaaaatgttttccattttcataaacttaacttacacaaccaatctatagatccttttttgcctctggttttgccttctcagcacatcactaacacacatatagatgattatcctacacaagacaattttgatgttgcacctaaccccattttgcaggatactaatgatgatgttgaagacatttcccatgctgaacatactgctactccacagcaggaaaatcccacgccaacacttgctgctcctagacgaaccactcgagtctcacagcctccaagttactttcaagatttttagtgtttcaatcttctaccagataaatctcctacacctcatcctactttaaattcatgtcttatacaaaattatccaaggcttacaaagaatttattcttgatgtcacagctgaatttgaaccacaaagttacaagcaagccatacaattcaagcaatggttgcaagcgatggacaatgagttactggccctcatcatcaacaacacttggaccgttgtcccccttccaccaggcaaacgcgcaataggatgtcgttgggtgacaaaatcaaatacaacagtgatggtagtgtggaacgactcaaagctcgcttggttgcacaaggatatacacagcaagaaggattggatttcttcgatactttcttaccagttgcaaaaatggtcactttcaagcttttacttgccattgtcaacatcaagcaatggcacacattgtaactagacattaacaatgcctttttgaatggtgatctagaagaagaagtttatatgcaacttccccaaggtttcaaggttccctctactattaccggcactaatctggtgtgtaagcgcaacaaatctatttacggtcttcgacaatcttgaaggcaatcgtacaaaaaactcactgatgctcttctccaagaatgattcactcaatcccatgtcgattacacactgtttacaagaggatcccaagcaacttttgttgccctcctcgtatgttgacgatatcatcctcgcaggtcccaacatccacacactccagcaattacaaatctcccttcaggccaaattcaagttgaagacactcgggcctctcaagtactttcttgggtttgaaattgcccgtgctcagtacggcctcttcctctcacaacgcaaatacactttgcaattgcttgctgatacagggtacaccagcagcaaaccggcaaaggctcctatggatccttgactaagactcactgaccaagaaggagacatcttggacaatccatctcactacagacaacttattggctgactattgtacttgactctttcacgaccagacatcacctttgccatgaacacacttagccaattcatgtcttgtccacaaacaactcacttaatagctcttcatcatctcttgcgttacttaaaaggcacaccaggctaataaatattatattcaacctcatcttctcttcacctccgaggtttttcagactcggattgggctacatgtcctatcccacgacgttctacgacgggtttttgcatattccttggtgattgtctcatttcatggaaaaccaaggagtttatagtctccaaaagttctgccgaggcagaatatcgcgccttggctgccaccaccagtgacttaacttggttacaatatctcctcaaagacttccaaatacatcaacctacaccaaccttcatctattgcgacaaccaatctgccattaatattgccaacaatcccactttccacgaacgaaccaagcacattgagttggactgccatttcattcgcgaaaagattgccacttctgccatccgcctcattcctgtcagcaacaatctccaacttgctgatgcattcacaaaggctctaccctcaaccactcttaattctcacttatccaag

SEQ ID NO: 20844 - DNA, 2331 bp, Cannabis sativa
  modified_base (2303)..(2305): a, c, t, g, unknown or other
ttcaaggcaacccacaagaatttccaaaaaattaaggttcaaaatagcattcaaatagtaacaataaaaaaattttaagtaaaactttcgttgatctactttctccttccatggcgaggaagaaaaaagtgggacgaaagccagttactcgaatcccaatcgacgattcaatttctggagttacagaggaagctgaagatgtcgatgataagtgctcgtttgaggggctaaatttgattgtagatctgatgaaaacccaagatctaatagttacagaggagaatgaacaatctgcgatttatcgagcaaaaagctgggctgtagaggttgaggaagaactggtgagaacatcgaatgttgagcaatctccgaactcagcaaagaagaactgggagagtttcataagggggaaaaccttgaatcgggatcaaagacttctattcacaaaaccgttgatcagagatggaatcaagataacacaagttgacttggaggaggtatgtgaagaggaaaactgctggaaatctgctattatctgcaaggttttgggtgctaatccaccaattactatattcaaaggatttatcaagagggtttggggacatctgggagttgtacaggtttctaagatgtcaatggggttaatcatggtgtggtttcgtgatgaagcaacacgtgatcaagttctggaggtaggagtggtgcaattcgacaaaaatccggtaataattcgaccatggtctgcggatgtaaatgctatgaatcttattcattctgttccattgtggattaaatttcatgacttagggcttcaatattggggtaccaaaagtctaagtgctcttgtgagcacaattgggaaacctataacggtggaccaacacaccaaggataggacgagattacaatttgctagaatcttagtggaaatggaggtcacagatgcaccacctcgattcatcccgtacatcaacgagtatggatagttgcaagatcagagtatagagtatgaatggctccttgcaaagtgtactagctgttctaagtttggccacacaaaagtaacatgtcgacatgctgaaattcagaaagaaagggaaggaaaacagcaacaacaagaaaaaaaataggcagaaagagaagaaattggccaaagaaagtgctgtaagtagaagccaacaacagaaggaatgggtgctaccaaaaaagacagcagttctgaagcctaaaccacaaactgaagcagcaggggataagacagagcagttcagcaatatctttacagttttgcaggagcaacaggaagaaagagtggatgatcaagaggccactgaacaaactgaatcgggtaccttttttattggccatggataacaacaatattgtttgctggaatgtgaggagaataaataaagttgaaaatcagaatgaagtttatgagttttgctgcgtgaataaaataggtgtttgtggtttgttggaaactaaacttagggggaataaaattagagaaatggttgatagaaaattctcgaattggcattattattctagtcctacgattgagtatcgaattcttatctttgtggaggaagtgctttgctcgagtgattgttgttagagaagaactgcaatttgttcattgctatgttaaagtcgctggccaaactaatgctatgagcatcacatttgtgtatggtttcaatattgtcaaggaacagaaagggatgtggcttataacaggggcctttaatgctctttttgatttggatgataggaagggtggaaaaaggttacaattaatgatacaagagatgctacaaactggcttgcccaaagtcacaatgaaaggctcctgaagactggtttgagttatacttggactaataatcaagatggggataagaggacctattctaaaatagatcacacttttgtgaatgaagattggaatgattgctttccaatgacaaaagcttactacagctgggagacaattttagatcactgtgtgtgtgttatatcgatggctaccaatgagaaaattgggttcaaacctttcaggtactacaacttttgggttgatcatccaaatttcaaaaaagttgttcttaaagattggaatagaccgttgaaggttgaaggaatgaatgctttgttcctcaagctcatgaggttaaagcatgctatcaagaggtttaacagagaggttataggggatattgggaggagttaccatgaggccaaagataattatcttatagctagactgtaagcttagatactgttaggttttatgcccnnnataaaactctttacaatctgattagt

SEQ ID NO: 20845 - DNA, 1361 bp, Cannabis sativa
gtctttctaatctctccttgagtaccagtcttgacctcaatactactcattttgaccatagctttagagaactcatactcaaatctaaaacccaataagcctctaatgctgcttgcatatttctggacaagaggacgagtatcatcattcccccaaagtctttggtcagactccaaaacacctttgccatcacgaacgtttttgaagaagctagcatcgaagttggtgtggctgtctgggtccaacgacaccagttttgagtcttctcctttggggcaaaaggtttggagctgagttaagaaggatgggtctatagttgggtcagcatttcctgtctttgtgaagttgtaaagtctgtagtttacaaacatgcaatgagtttggccaagtgtatgagcccctatagtacacacaaatcacaaatattaattaataatatacaagttttggttaaactactttataaattaatatattataccaactagtgtgacaaggtcatgatcatcaaggcctttggctgcaaacttctggagttgaacatcaacagtatcaaaaggagatggcaaagtagtcacttgggatgccaaagacactcttccatctcttctccctgttggaagtgaccaacttggcccatcactctacacacacatatatacataattagcacatataaaagaagaataatcatctacttttgtctcgagatatacaaatgaatggttaagtaccaagtcaacagcatcacgagtagctaaagcaagtatatcagcacaagaaacgacagcagggcacaaggcctctagctgggccttggcatcctcaatcatttcgaaccctcttagccctgtgtttgctcttgcactcctttcggatgaggacccatctaacagaatcgaaccatcacacccctatatatatatataattcaatttcaacaccacacataatatcaatcaaccaatcatatatatattattactaaaaaaatattattaattaactaattaattgaacctgaacaaaacagtcgtggaaatgaagacgaagtaagccagcagccaccgttggatcctttttcatgtgagattgaacggttgatctcactatggcttctgctttgggacatgaagaggaatagaacttggttttcagctgcgcatttacacacaaacccatcactaaaattgctgcaactaaaattactgatgatgatctcattctcactaattgattatacttgtttcttcactactctctatattcgtattttagatgtatacatatacattgggtatatatatacacaacactgtcactagctgacatgatataatactattagttgtatatacata

SEQ ID NO: 20846 - DNA, 2603 bp, Cannabis sativa
  modified_base (63)..(68): a, c, t, g, unknown or other
tttttgtaattaaaaaatttaggctctaaaattataaataaaacataaaaaataaaaaaaaannnnnnatatatatttttaaaaatttcctttgtttttttttttagaccgattcctttgattttatttttattattttttttaataattttaataaaagaaaaaaatacggttcaataggatctgaaacaaaattttgaagctttaatcgcagatcttcaagacgttgaagaaaaatggaggtaagtcttttcaattccattgaattggtttctctttttaaataatgtttgacttctgtatttgcattcaagattcagacactggtttaggatgttttttcctttagacttttgaatcccaaaatttgtgttcacgttgtatattacccctactatattgtgttatgtatataggcttggtggtttcttatcttattacaaataaagtgggttttttgtagctttgattttgttttgcagacatctttaggcatggaaagccttgcaattaagaccgatcataaacctgaaaagattgaaaatggtaaaggagttcccttgttccattgtgatctgtacgatacagaattagtccacaaaatagctcaagcattcctcccaggaatatctacagcctgtgttgacaacacatcaggagatatctttaggaccccagcctcagttgctgctgaattcagaaaggaaatggttgattacattactcagagaagtgagagttttgttgcagagacttttgtcttaggagatgttccagaagtagacgtttctgctaacccttatgacataatttctgactttgttgatgactttgctactttgaagaggaacttattaagtcgagtttctggatggttgctaagtgaaaagagagaagataagattgatgattttgtccaagaaatggagattaatggattttggttgaccgataaaagggaagccatagctcaaactttgcttaagaatgttgattttaagaatgagtatcactgcaacatgagatttgattctgcagaagagctcactgaccatgttgggaggtgtggtttccgatcaatgaattgcgagaacgaaggatgtaatgccatgttttctacgaggcatagggagaagcatgattctggttgtccttttaagataattttgtgtgaacagaagtgctctgatcgtatcatgagacgtgatatggaccgacattgtatcactgtctgtcctatgaggcttgtcagttgccctttctattcagtgggttgccaatcagctatacctcatggtgtgcttgatcaacattgttcaaacaatctccatgctcacttactttatgttcttcgaagtattcataagaaaacttgtgaagaagatctggaacaacgattaaaccaagttgagaaggtatacatcagcttctagttttttgcattgataaagtttcccattaaactataacatagtacatgttttcaagcattttttaagacatggttatctctcactgtagcactttgttttgaggatctcagatctcataagtttatagaatcctaaaattcaaggtccagctttgcattcctcctattgttaacctgttgtgtcttcttttgtttgatatggtatcctatttctaaagttttataatgtatgattgaacattgaaaaaaaaatggttgaaaaccatattttcatgtcaagttgttcttactacttcccatgcagtcatttattttgtaatttcaagactatcaaattactggaaggttactttgtgttactgcaagtctctgatgtaagagaacataatggcaggaattatcgcccagtcaattggcaaaagctcgagatttgagatcgttaaccactatagttaaggatatcgaaacaaagctagggccattcaaaccgaaaaaagaaaacaaggatagggaagagaaagtagaaactctgaatttggtggatgaaccagaaaaatttgaaagttaaactcaaggccgcgggcaactcactccagtagcagtttagcaagaaattcaggtcttttaccgagccaaaaactctattatccaattttcttcttgtattatctattgtctcatatattttgtatctttattttgttgactcttttgtatactcttaacatgattaatgggaataattctttttttaatccacttgattgaatggccttcgtgtttatggtgttttatccattttcaactgacataacagaaaagaattgcactaagccttagtttcctttttggattggaacagtggatattggaagataaaagaccttcagagcatatatttcaaggctgaaaaacccaagcctaaacttttaaaaatgggtgaaacatggagttttatataaatttctcactaacttcatataaatggttcacgcagagacaattatgaacctctaaacaaccccgaaattaaatcaatattagcagatgtagacatgtatatcttaagcaaacaataaagacatgtaaatgaaagagtgcttttcatagcaacctacaaatctccatgtcaagaattaaaagtttagaaaatataaagattcctcttctt

SEQ ID NO: 20847 - DNA, 4268 bp, Cannabis sativa
taattagtaatcccggttaggggattagggtttcataatcattttgggtagcgtgcctaattatttagggcgttacacttcacctcaaagatggtgagttattttgttactgacctaacttagcttcccgtataaggttcacggtctctgcttcttccaattcagtctacaaaattcaagacatgcgtgtggcccttacctccgtgattttatactttaacactctttgagttttttgcttactttcgtagccttactaatccctattattatttgttattaccagattgctgcagaaccaggctgcctttccaagactttgatcgatcaaggatttattgtctcgaagcaggctggcatggatggggtgttaaagaagctcagggaagctaaaagccaaatggagactcttcagaatgacacactgtagagagagctctcagggagcaggaccaggagactttaaaggccaaagatgaaatcatttcctctacccaagccaagctgacctaggcagagacagatttgttgaatgtctgagaagaggtacaaggactggcgtccaagctcaagacccttaaggacttgcataaagctaacattcaaatcgcgacaaatatgttagtggagcttaaggagctacgtgagttccaggaccaagccaagaaggaggttgtgaaagccacaagagatgccctgttgactcttgtgacttgtaagcattgtgcaaaacgcttcaaagacggagtcttcatgtgttgaaaaatcaaacaagtttgaaccttgcctaactttcatgccggatcctgaggctgtcgtcgctcatttctaaaagaaaaataagaaacttaaacaaatattggttgaatgagtgggtccttgcctttgtcccaaggaaactaaagtatcatgatagaatggtttgatcaattatgtattcttgtaattaagcacggattatatagataccggcatattataatttggattggattaggtactttatgaaatgatgaaatgaaatttagatctggacactctataatataaatgattactaagaaaaaaaaataatagtgaaattttataacattggtatgcaatgtagaacttatgtaccgttatagaattccctttcttcttggaagcaaaagtgcaatatgttactgtatgtacatcattgcttataaaaagttcatgtaatttgagtggctgttcgtaaagaatacaatagatttaattatttatttgcaaggatatacgatggtttttatacattatacatccatgtataaacgacagtatatataataaaaccatattgtcatagaaagtgaaatgaaagcagaaatttttggctgctattatttatttaaatcaaaatacatgataggacataaataacagcacaaacaaactattgaatcagagcttttagccttttttaaaaaaaaataataaatggggattatttatggtttaaaaatcatgatcttcactttttggaagctaaagcaatttttttaataagtccattcctttggaagaaacaattctggagaagaattccttttttgagaaataacaccacattgtgacgaaggtatcgtcacctcctttgtttttttactatgtttgcctgaatttgtgttgttgttatggcttccactctttcggtttgctttaggatcagctaaagaacaaaaatatttactaaaattaaaaataagcaatttaatttatataggaagatatatatatatatatatatatatagatatagaatcaaaataattttaatttctattagagaaagaaatcaaataaaaaccttgtcgaggtgaaatttgtaaacctaaagcttggacgttgaggttgagagcttggaccacacgtgaaggtaggagaacaggagcacatgctgcatcacatataatataattaaactatatcaatatttattttaaaaagaaaaacttatattaatatcatcagtttgcatataattaattggttttataatacttttttcaaactagttcataatattttttttttatgaatagtaacagagagtattggatttaagtactatgtgaataattgttaaattacactagtttttatagcattaaattttaaagagagaaaaatttgtttacatattttctttcaaaaaaaattaatgtttacatatttaaatttaatagcataaataatttatttagttacacatacatgcacttaaattttttatgtaaatgtaaaaatctttcatataattgttcttgcatttaaatttctaaaaaagaattttaacagtaaaaatcactatatatgtaacttttttgttggaatagtaatctcttttttattaggagttcaaatgtataaaccaaacataacataagaatttttgcacactaaaaatttgcatctacatatggaattttaaacataatttatataataagctttttatcatttcacaattttaggcacctaatcttttcttcttttaccaatctacctattaagttttaacaaataaatttctaaacttttaagttttaacaatgtaaaattgatctaaatatattatacgatagatttatcatatacactttattcttttatttttttttttcgaatgcataaaaaaataaaaaatttgactttataattagatatacaatacattttattatggtgtctttaattatatatagtaaggtatatataatattaatacctggctttttattgttgtggggtatttggggaaggaaaacaccagtaccaatacatgatttttgggcagaatctagaaaaatggctcgcattccatgccctgccgccgatgcccaatgttgcccaagttttggtctctgcggcggttttttattgttgctctttattgagttctacaaccacattttagttacataatcaataattgtaaacataagtgttgggaggacaaatattttttatttttatttttttgaaaggggatgacaaacatattaaacatatatataattataaaatattaaataagtagctctaattaataatattaaaccacacaagcaagtttaagcactatatatatctatgaaaattggctttgaacgagacaaaagtgacgtttaagcttacaatgcattatatgtaattgatacacatatcgtttcatgcttttcctatttatttgaatgtttccatttaaagtattaatatgtcagaatgctagctgattatataatttggtaaatacttcacaattgaaaaattgtagcttggttaatgcctcttatacgaatttcatattttgattaagaaataaatgtaagaatatagttgttttttagcttaagatacaaaaaaaccttaattaagaaagggaaagttcattaattaaaaatatcaactatttttttttttttttgaagaaagaactactatttttcgaagggtgctatatatggaccattaatttattatattagtgacaccgtaccaaataaatttatacactagaagctataaaatgagaagtaatttattaagtaaaaaactttaaacgttgctgagatgtaacatatattatagaatcaccccattatagactatcttttaattattctgataaaaagaacaatagactctaaataacatactaccaagttaatgttctgcaatttagtcctccatatatatatattattatatttcaaataaaaatctaaagctcataattaataatgtgcactatacaaaaaagtattgagaaaacgaaattcgaactcacattttaagtcttttagcctaatttctttgagttgaaaagactactaaactaaaactccaataattttaagttctaggctcataatattattgtcctacaatataatagcataattattagaaataatattaacacagcacattaattgctgttgaaatatgaagtttatacagtatatatacataaatatatatgtatatgacaactaatttctcttcctataaggaaacttaataaacttagtttacctatttatatatttacgattacgattgagatttaaatataaaaataccttatcaggaagctcttcaaccggaaatttaacgacagcatgacgacgatcatgatgaaggtggtgatgatggtggtagcggttgcggtggctgtgtggttgaagcggttttacaaaatgggtctaagcaagatttgtaaagaaatgagtcagcagggt

SEQ ID NO: 20848 - DNA, 3927 bp, Cannabis sativa
  modified_base (2976)..(2976): a, c, t, g, unknown or other
  modified_base (3790)..(3792): a, c, t, g, unknown or other
aggaacccccaagaagctttcatggctaaaaggcgtgctgccaggatggttatggctgccgattctctcctcaaattggtttctgagctaaagcaaacggccatcttcgcaggcttcgcttcactcaacgaccatgtcgatcagaggacttctgagttcaatcaccaagctcagaaaactaaccaattgcttgctcgaattggggatgatgctgctgctgcactcaaagaactcgaatcgcattactactcttcttcacagaggtccctcggcttttagtatattgttccattaatggcagttttaacatatagctagggttttgttcttctccattcacaatttcttgtttgtcctgctttttttaatgatcattagtcttattctgctttgcattataaatgaaaccatgttcattgcatttcattatctgatgatgatgatttgtgattacaaattataaatcccaaatacatgaattgtgatcagaatgatatgttcaagctcttgaatgaggatttgttaaaatatgtaagtggcactagtcagtgctcaaagcattactattattataaacacaaactaaatcatttgaaaggtaatgagattgattcatattctaatcttgggtaggatatgtgtggttttattaaagtcttgaaaacctttgatatggggctataaatttagtgtttctgacacaagcattgtcatttgctagaaatttatatcataagttggaatggaatgagttgttctttctcaaataaacactcttcagaactcaaataaattagagtttcttgagtaaggcattcaaatgtggctctagttttgtgagatttgtagccatctgaacctcgtatgacaacccttcatctttcaactcgaatactctggcaatctctttgacctgccaaaataacagttacacttctgtagaaaaatgacattattaccaaaggaaagtcatgtatgtgatgagcaagaaaattctacaagtaaagatgtgtcaaacattagaatgccaaggagaaggataaacttaggtagcaatgttatgttaagtgcaaatatgtaatctttgagatggtggcatccacaattttatagggtccagcataatagtggcatttcctgtccgtaaactgaaatcaggaagaactagacagcaatacatgtgttttttcttcctattttttggtggaatagctattccattgaaacggtagaaaagttattccatttcggtgttttgaattgtagccaaacaaaaaagtaaatgaaattaaattcatttacatcttccctttctccccatcacccaaacatgagcaaagccggttgggttggctgtctagataaggacacagttttcttcattgtttaagagctcagttacctaagccatacactaacaacaaaacacagtaaaactcactctttagccaagagcattgctaaagattaggaccaatccttatgtccaaaggtttggcaaagagcattgttagagggcactaaagtacctaacgccattatgaggtggcccctataattagttagtagctttctataatatctattaaagtaaaataagtaggatccaataatttacactaataacgatattacacttcacaagggtactagatactatggtagccctttagcatttttctttggcaaaaagtgttagattagaatcattctacacaggtgcatggaaatcttaacattaagagaagttgtatttttctatttggaaagcaaatcaaatacagacacatgcttatctaagaatttgaatcctcaccagttcagacaacctctctattgaacacaagtagagacaatatcttatcgctttcttatcatcatcatatgcataataacatgttaatgaaacaataatttccatgattaaattcaattattcatccatggtcagtatttattaccttagaagcatttcccacgagctcgctttgcaattttatcactttctgatcagcatcatatgtccctttctgcaaaagttaaattcacaatataaacagatgaggcttttatcattatacaggacatactattattagaatccattccacttagataagaaaaataactattattagaagaagaaaaaatagattgaagtacaaaggagggaagaggataaggtaacataacgacaaacaagaacaaagacagacaaaaacaaaaaactgtttttggaaacacaaatgttgtttctacaacaacatgtttcatctcacagtggattgttgttcaaatgtatgatgggtatgctaagctttactaaccaaagaacagtggattttagtacctgaacttcaacgagaccagtgctctgagcaatgacaacttcaatagtcccatctgattttggcctccaataaccactctctgcgtgcattggctcccctgagcttaatttccaagtcttctgggcataagctataacaggcttttcccattttacaaatcaatcaatcaatcaataaataaaacccagttgaagttacactgaaatgggaagagaattcacatcaaagtgtttagtattttgataccttgccagagtgggagaaatggagctcttcgccataggagaaggaattaatggtgggaaagccaccttgaccttgacccctccatttgccaagaaggaatgagagaggtgctattgccggatgtatagggtgctctccagaaccctccatcttaatggttgactctctattctagtgagatatagcttttgccgtcgatgcttgatggtctgtgacattttctgtccatcttcggtatccccatccattttcttttctccactagttaagggccatgtgtactttattagatacatatattaattttttttattattattttacgtcggttataatagaaaattacattatatatccattttattttatttattttaanttttacttttatttttatattctttaagatacttacttttataggtaatgttgatattatacccattaggttaatgtaaaatatgtgctaaatttaagtagacagtgaaagtacattgggcaatctacttttgagtaagtatattttaatgaaatataatatgagagtaattttaattaatggatacaaaaaaaaaaaggtatttctcaacttattttaggaaatttttgaaattacaaattttatttataattttacgagttaaaattttatttacaaaatatgcttttaaaattttaaatttgtgaaaatacgttcttctcaacaaaaagtatgaaaataactaaaaattaatgagaaattaatctcacaacagcaataacaaaaaaaaaaaaaaactcacaataactacaatacaactattaataaattatatatatcagtttattaaagtatatttttttctaaataaaaaaattcaaaacgtaaaataattttttttcgtattaaagtattattttaataattaggatttttaccccataaattttgacatgtaccaaatcatgctccctgaacttttatggtcgttaaaaattcttcctgaactattgagattgttaaatttaaagactttaatccaatttcattcaattttattaattcagtgattgtccatgtactaaatcatactccccagactttgatacctaccaaatcatgtctctcgaactttgacatgtaccaaattatgccccctaaacttttgtctatgttagactttccttgctaaattagacaaaagtccttaaannnaacaatctcaatagttcacggggattttgaacaaaccttaaatgttcagcgggcatgatttagtacatgttaaagtttaagggcaaaaattctaattagtttttttttttttttttaaaatttttgttttttttt

SEQ ID NO: 20849 - DNA, 5219 bp, Cannabis sativa
  modified_base (200)..(201): a, c, t, g, unknown or other
ggcttaatactcttcctcccgatttggtgacaacatggaatgacttggctgaaaaaattttgagaaagtattttcctctaataagaattgcaaagtttcgaagtgagatcatgtcctttcaacaatcggaaaatgagaccaccaatgaagcatgggaaagattcgaggagttgttgaggaagtgtccacaccatggtatnnctcattgtatccaacttgagacattttacaatggtctcaatgcagcctctcggatggtgttggatgcttcagccaatggagccattctttccaaatcttacaatgaagcttttgagatcttagacagcaacaactatcatggtcaactaatacagctcctacaagccgaaaagtaacaggtgttcttggaatagatgatttgaccgctattttaagaaatttaattcttattaacaacaaaacaaacaaaataagtatttatgcagcaaattttataataaatatcaattattctttacacttgtccttgaggaagtaccaagttcgaaatactcttctcccattaaaaaaacaatgaagacataagtctactcatatgattagcgagcgttttgtggaaatattggcgaattagaatcccacaacaaattgctgaaagacattcaatgatttaacttcactaagaaattacaatacaagtggtttcacgggcaaatgacaagtcgcttttcccaacatcaactaagcttagctccaccttatggagataatactagtactcccaagtcctagatatgggaatataaatgtatagtagaaatcaaaagggtaaaatttgtacaagcctcaatgactttctcaagtatatctgtttatataattttgataaatggtaaaaaatgaaaaagctatatctgatttatgactaacaaaatactattccaaccatttctcctcctactcatttatcaaatcaagctttcatgtccttctgttgaatcccaaaagtacctaaacatgacaactgaagaagcttccccaaagggataggctccataatcatcaaaacattacccgttctcgccaatgacaccgcactacgtgctcctgaaaccattggaacagcactcgaaagatctgatatgggcagcaggcaattagcgagaagtgcgctctcggtcgctgtgacacagctctcccaataacgtggcgggggtatgctgtcgactgcgtcaaggtcaatctcgaaaagatcgtcttcatcgaattccatgttcgctagatcattgttggcttcagctgaacatctaagaacagaagccatgtggattagagaatatttctagtctctttatggttcctgttcctgaaaatttcatagaagacttgtatatttatatttgcctttgaggagattaggggtggagaggtcagatggtaagtagaacaatcttcaacaaatcagaaataatgaaaatagggggacaattggtctttggatatgacacatgtagctgacttgttccttataatgtctatgatattattaaaaaaaaatcccttaaaaatgagacaagataaagaaggaaattaaaaacaaaaatccagttaataacagaacaatggaaatcaatattttaagccatgaaaaatccataatataattatatagtgattaaaaataagagggtgtgattcatatccaccaaatacatcgaataaaatcagcagcagaagcagactaactaccacaacagaacagaaaataatggccattttcttaaacaattaataaaaatattaaaagcttcatacgttaagcctcacaagtcaaaacaaccaatccatgagaaagctaggcttgctgaactctttcaagtttcaactacaaaaacagaaataatagaaagaaaaaaatgacaaccctctcagaaaattagagacaaaaacgcacacgtgggggggccaatgtcctccataatcctctgctaattcaactaatatttttcataataagacacaccagaactaatacatgtatgatgaactataatgaaatattagataaaaacaaaccaaaaaaaatgataatttaaaaggaggtgtaggacgaaagcagcatatataataataatgaataaaattctagctggcctgaaactattttggtagcttcatcagttgaccacctgacctcaaggaaaactttgccaagtatgacttatggcccttttattgtaatattaaagcattgaccagtgcagtctaccttaggtaagaaactcttttaacttgttgggaatcattaggtaagaataagaaactcttttaacttgtttaggaaatttagctagaacaagttcttcttgattgtgcaatccaagtataaaacactagtttttttgttaggagttgaatgaagctaatttcttgatagaattcttctaaaataaacagaacaaaatttgtaaataaaaaaaacaaaaaagacgggcagtgtaaaaactaaagtaggataagtttttaatatccttataattttgattaaatatactcacagaaattatactgggaaacagatgacaaaaaaatcattcaaaggtaattccaaagaaagttacatacttttcttgtgtcacaattaaatgatggaaaccctttcttttagcaagcacctcaattttcattacatactacgattaaagaaactaaggcatatcaaactatcctgaaaatctattcattttatagtcaccgaggaaacaaaactgtctggctattctttctgttttgcaaaattaaattaacaagcaattataatgaatgcaaaggttcatatatttcacatgataaggcaattacaacgaagattgtgagagactgagatccatctagtcaaactttatccacaaataatctcaactctaaaagcagagaaagaagagaaaagatgcatagttacaaaagagcatatctcccacgatacaacaagaaaactaaactaaggcgatcagcagaagctaagctaatatcaattaaagtaatgcaaaagctttaatttagcttatacttagtgtgcttcagtcatgaaaatccaacaacctaaattatgtagcataaactatattgagttaggtagcattaaaagaataaacaattcaaaattggtttatcagtgaacagaaagccaaccaactgtatcctaacataaccattcatttctttccaactgagttagttcaccattatggtgcctcaaggaagcacatacttcaattagttatacaactacagcaagtgaaattgaagcaagcacagaatctcaaactgaattctcataacaaatccatcttaacacaatacaacaagagaattactactactagcatataggagattctgttatgaagtacttcgtcaagagaaaactcgtcaagtaaaactcaactccgaccatgattattctccaatattactatgtaaaacgataagtgagattctagtttatctttagtgagtgttataatgaacaactacagcaagtgggactcgtagcatcataagtaatctgaaactaatttctcataagaaaaaatcaatctttgttagaaacatttgtctctaacaataaagaatgaattcattaacaaagtaatatatccaattttctacagaggaacacccatcatctcataaactcctgaagttcaattcagacattatacttatgtaatccctcactgaaaaaaccgaaaaggaaaacactaaaccacagctacaacagtattaaacaaaaaagaaaaccccattactgctcactgctcattaatgtcactagaatataacgagaagcgaaaacaaagtgtagattaaaagggccgcatacgctatcaacccccgatgttcgtctccaccgtcggcgagtgagaccatgagcccagtgcaaaccctcgttgcccaaagaacgaaaaccccggccaccccgaatctcaaaaccccaccttgtggaacaaacaaagacgccgccgatagaatcaccacaggcaacatactgtacccaaccacactcgtacacgtgtgcaggtcaagattaccatttcgcccggctaacatgttgaaaaccacatagagaaaaatcgatgagacgacgatccatcccaagatcacgccgaattggatcttcccagccaacaactggaataagcagagagacatgtagagtaggatcgggccggaaagatctgagtccttgtagacaaccggattgactcggaacgggttaaggatcgatttagtctttttccagatttgatctgggtgaatacctagctcgtcgaggaggggttcttcgtcctcgaagttggcgtttccaggggtgaggccgccgccaattggaccgccatagatgttagcggtggatgaagacgcaccaaccgcggatccgatatcgaacgacatgaacgggatgcttgaaccagaagaccgagggggttgaaacggcgccgtcgcgacccgccgttgctgcatgtttgcgggggcagtgccgggattcccgccggatgggaaaacaaccggcggaaccgtgaactgcttcgccatcggatctggattttggaatcccaaaatttagggttttgaattggggatgaggcgagagagatgggattaggagaaaagtggagagagtgctgggattttgtttgagtgaaaatggagaattattttgtttgagaaagagaagttaagggtataattgaaatttcgtatgtgtaaactctaatagtgtttgagttggctgcttcatattggttctatgacgtttttaattatgctctagttatttatttatttatttattttgaaagcgtgctctagtaacattttttaattcaattctcgtctaaatttggtgtaccttcttaaagtttgacacttgtaacacttgcctttattagataaccagaataatcaataaatagaaaaattaaatcaatttaaaatagaaaataaattgtatgggaagaaaaccaaaattataattattttatttacataattaaaaaataatcagaattttgacaaaattattattattagaacatgtaattattttttgtttatagatttttgaagaatataggactatttacaaaaatatgagaaaataaaaataaattttgatatatatatggcataaaacttaattacactaaatatgacatttttttaaaaaactt

SEQ ID NO: 20850 - DNA, 6200 bp, Cannabis sativa
  modified_base (48)..(51): a, c, t, g, unknown or other
  modified_base (2673)..(2681): a, c, t, g, unknown or other
gtactcgtgtataagagccattcggtccgtgggtgtaagggcccaatnnnngcttgaagcagggacgttacatcacatccactcaatacccccagtggcttccctatattcctagtgtaacatccaactctactactggtgatgtgcaagatgccactgtccgttgctcaccctccagtcaagaagaccctacttctccatctcctaaatctacaccaaaagcaacctccaacattccttctcatacacccgcaccacccttatccgattccatatcatcctaatccaccatttccctacacgttcaactacccctgtccccaccaccctccacttcaccgtcacaaccacgaccctccactcaaccttcaccctgcccatctcaccccatgatcactcgggttaaagtcggcattcgcaaacctcgtgttttccatgccttctctccatcccccatggcccttgctactgactctgtccctgaatgtgccattgccgccctaaaaattcctcattggaaacgtgccatggacacaaaattcttcgcccttgttaaaaacaagacttggtcccttattccacgtatggcagacatgtgagttgttgacaacagatggctccttcaaatcaaacgcaactatgacggtagtgttaatcactacaaagcgagactcattgctaaaggttaccaacaacaactgggcgttgacttcttcgagacattcagccccattgttaaaagctctactatccgcgttattcttgcccttgctgcctacaataattgggatatacaacaggtcgatatagacaatgcctttctcaatgacatccttactgaaaccgtctatatgaccaaacctgccggctacatcaacaaaactcaccctcatcaagtctacaaattacacaaggccttgtacggtcttcgccaagcaccctgtgcctggttcgaccgcctcaagcaggttctaacctcccttggcttcaccaactctgtgtctgattcctccatattcttttataaacaagaagggaccaaaatgtatatccttgtttatgtcgatgacattctcctcacaaacagtaatgacactaccatctgaagcattataaacaagctccaataatttttctccctaaaaaaactagggtccatgaactactttctcggctttgaaatcactcgagacacctccggcattcatctctctcaaggtacttacacacttgatctactcaagaaaactaacatgccacactgcaagtctagccccacacccgtaagccaaggcgataaactcagctccaacgacagcaaactctttgatcaacccacattcttccgaagtgtcatgggaggactgcaatatctgaccttaagcaggcttgatattgcctttacagtgaacaaactcagccaattcatgcacaatcccactcaaatgcattggaatgcctgtaagcggcttttatgctatcttaagggcacagtgggacaaggactcctattcaatctatctaagagccaaagtgttgaatgcttcagcgacgcggactgggcaagatccattgatgatcgaaaattgacaacaggatattgtttatatttgggaggcaacctcattacctggtgctcaaagaagcagaaggcagtggcaaaatcttcaacagaggctgaatatcgtgccctctcttagacagcaaccaaggtagcatggatcttttccttgttcactgaacttggcatcaaacataatacccctgtcgtcatttggtgcgacaatgcaggtgcaaaacaacttgcttctaaccctgtcttccacaaccgcacaaaacatattgaggttgatgtccattacatcagagacttaatcaagagaggactcatcaaaattaggcacattcctacatcagaacagactgctaatgtattcacaaaagctacttctataaaccagttcacctacctaaaagacaagcttgtcgtggtgtcacaaccaagtcaatcttgagggagcgtgttgaaaatagcattttaaacacatgtttttaatgctcaagtgggtacgtagcataggaatccttttacctactttttgaatcctttattaatttctgccaataaaactaattagcacatgtgaatagtgcattatatatacacccatttgtaccgtgtacctgcaagaaaaatagaacaagaatattcaatacactaaaatacatatatatatatatatattactctattgcttcattctttttctagccgttattaataaaggcttgaaaaaatttatacaatctttaccaatcactattaataaagattctcaaactattttaacatcctctttaccaatatgtttaggccaaaccaataaaactctatttctttacacttttggttatctttctaataagaatgtctaatctgattattttttagcccacaaaacttcatttctctcacgctacaagtgatatatatatcagagccgacaatatgaagttgccaagcaattccttctaaatttactcaaattagatcgagtcatccatactataaaaaaaaacttacttttagtcacaacaaaacttgtgattaattataactcatcattatatgttgtgactaaaaggtgcgtgactaaagatattagtcacaannnnnnnnntttgttgtgactaaatgtatttttcgtcacaatacttgttgtgactaaaactaatttagtaacaacttatatctaaatactatgtcttagtcacaactaatattttgttgtgactaaaaattacatttagtcgcaaaaaaatatattgtcactaaaaaattatcacaaaaaataacagttttttgtagtgccacctagcaagatgtacaattgaactagaaaaagtttgccaacctactcactttttttctttttttgataaaaggccgattcattaaaccaaagcaaaaccagaaaaaaaaaacaaacacaccagggcagccgaaaccccacaaccaggcttagttcaaggccaaaattgacctcaaaacagaaagggaaaagcaattactgaaattatgggacgcagcccatttcgcaagcaaatgagcattggaattcagtgaacggggtatccaaaccaccttagtattcactgccacctcaagacgattgaacagttgaagaaaccaagctgtgctcttccaacaggggactttacgggcagccgccgcctccactgcaaccttgcagtccgagaaaatgcaggcattcatccaaccatgctcttgacacctcgagattgcatggcaaatagccatcgtttccgcttccaaaggagacttcacccaagtcttcacagaaaaggcctcaataacctctccttgtttatccaaagacagaaccgcaagaaaggccatgttgtccttgacagcagcatcaacgaaaacattaaactcccccaacagatcaactgccgacggaatagggggggttcccccaacatggttcagcaccaagttcccatcaatctgaatttcctgcactaaagtcatagtagtatgcaaaatagaatcaacagagggaaggaagccatcatgaaaggctttattacgggcattccaaagggtataagccaaggcaaccgcaaatgaagagagatcatggagatccatcggggataacatcgacggagagtgggggttcaaaagccaatggagaatctcatgagaagaggagaaagtaagggaatcacttcgaatgccccacctactcttgaaccaacacccccgcgccaacgggcaatgaaagaataaatgctcaagtgtgtcctcggcaagcgaacaaagaacacattcaaaacttctcccataaatcaccttaagtctcttaccacaaggaagaatatccttacccaccttccataaaaacaatttcactctttctaagaaggaagagttccacacttgtttgaaaagtacatccacattgccacttctattcttgatcaatgaagcatgggcggccttcacagaaaagaggccattaggagagtctttccaaattagcagatcatccgagttgccagggagagtaacaaaggttctcaatgactctaagaattccggtcgaaaccactgcgataaaagattaatatccaaggacccattgctcaaaatgaaattgtccagcgaaagcgtaaccggccaacgaacatttggattgaaggcagccaagtatgaatcccaatccaaccatggcgtccacggggtagtccacaagtcaacacaatgtccgttacccaccaaccaacaactttcttggcggatgaactctctggaagcaaaaattccccgagctccccaagaggcattagaaggaagagttgcattccaaaagttactaccccacttgcaatatttagccttgagcacctggcaccaaggagcatcccctcctttcgcaagagcccaccccaacttggtgatcaaagctaagttcatctcagaaaacttctttatacccaaacccccacaagccttgggacgacaaagcccatcccaatggatcaaggccaagaacctatccttcttagaattacccacccaccagaatttccgagccaatttatccaaagtcccacaggtcgaattaggcaaaaggaaggacgacatggtatatatggagatattagtaatcacagagttcaggagagtggtacggcccgcctgagaaagaagcttgcatctccatccctcaagacgattcttaactttatccactacaaaattgaagtcccgagtcttacttttagtaaagaaaagaggattacccaagaaaacctcagaagcctccatccgcctcacccccaaagcatccacaatagaggacctaagggagtcattcgcattactagaaaaaaccacagccgacttagagtaatttatcatctgacccgaccacatacaataacgttgcaagcacgttttaagcacatcaatttcttccaaagaggccttgcaaaaaagaaatgtgtcatccgcaaacataagatgggaaatagaagggctttgcggacacaccttaaagcctgtaagacttccattaaactcagcctgaaggagaagcctcgaaagaacttcactacccaatataaagagaaagggggaaagaggatccccttggcgcagacccctagaaggaagcaaacgtttcagagggcccccattgagcaaaatggaaaaactgactgaactgatgcatttagaaaccaaggaccaaaacttggagtcaaatccgaaggcctctaacactttatccaaaaacccccattccatccggtcatacgccttagacatatccagtttaagaccaacaaaggccgatctcccctttttcttcttaaaagaatccaacacttcatgagccaagattccattttctgcaatccatctacccggaacaaaggccgcttgaaagggcgaaataagagtcgggagcagcttcttaagcctatttgccaaaagtttcgaaataaccttataagcaaagttgcaaagcgaaataggacggaaatcatcaaatttggccgcattcggtcttttcggaataagcaccaagaaggtatgattaagagatctatcaaaatccccggtcctaaagaaatcctgaaccgtacccaccacttccgctttgaccgtattccaatgatgccgatagaaacagcctggcataccatcgggacccggagatttaagcgggcccatagaccaaaccacaaggcgaatctcctcctccgacggaagtctagtcaactcctcattcatatcatcagaaaccccggggttaataagatcacttatctcatgagtgagaggaactccggacgatcggaagacctcactgaacttctgggtaaaatactctccaataggtcccctacctgaagtccaattaactccatcttcagaaatcgccccaatgtaattccgttttcttctaatcaccgtagaggcatggaaaaatctagtgttcctatctccactcttcaaccaagtttccctggatttctggcgccatatttcacattgacgtttagatatctcctcaatttccaacaaaatatcagcctccaactcagtattaggcagagaaggagggcgggattggacttcaaggagcagcttctcgagagcgtca

SEQ ID NO: 20851 - DNA, 2998 bp, Cannabis sativa
aagtgtagttgctttttgtcatcttcaaggcgttgtgcaccgtgatctaaagccagaggtacatcactctgaagtttgagttaattatcccatttgcatagtttgattccttacttacacaatctaataagcaacttccttattcattatactcttggacagaattttcttttcacaacaagagatgaagatgccccattgaaagttatcgattttggtctgtctgatttcattaggccaggtacccgcttttgtctattgaactgaccttgtttactgtcttttattagtctcattcaacaaaagaagcacaaatcatttgtttattcctctgaagttcattatcttttttgatcaatcactttgtattcacattctgaagttcttgtcggtttgtagatcaaagactcaatgatatagttggcagtgcatactatgttgctcctgaagtattacatagatcttacagtactgaaggagatttatggagtattggcgtcataacatatatattgctgtgtggaagcagacctttctgggctcgtactgaatcaggcatattccgttcagtattaagagccgatcctaacttcaatgactcaccttggccagaagtgtcaccagaagggaaagattttgtgaaaaggcttctgaacaaggatcacagaaaaagaatgactgctgtgcaagctcttggtaatttaattcaaccactcttcttatcttaatgccattcactcacgcacacttttgatatcactactcttagtttttttctaaagtaacaattatgtttgtgctatttcagctcacccttggttacgagatgaaagtcgtgacttgcctttagatatttcaatctacaagctagttaagtcatatattcgagcaacacctttgaaacgtgcggccttaaaggtaaagttgccttcccccttcatccaattattgcccatttttggcggtctttggccccaaacaaggccaccttttgggcacgatactcattcattttgttgtggattataatgctctacttacagcttttcattttgcttgtgacatttatgtaattacaggcactatcaaaagctatcacagaagatgagctcatctatctccgagcccagtttaggcttttggatccaaaacatggatatgtaacactcgataattttagaacggttagttagatcaatcaccttactgtagttgtttcagtttgtgcttctggtattaaacataaccattcaatttggttcaggctctcacaaaaaatgctactgatgccatgagggaagcaagggtttccgacattttaaatttggtgagaaatcatatgatccaacttcattaagatctcttcccatatgacttcattggttataaaaatacttagcttttctatgattttaaattttagatggaaccactttcttacaagaaaatggacttcgaagagttctgtgccgctgcaatcagtacttatcaactagaagcccttgaaggatgggaaaagattgcaagtacagcattcgagttttttgaaatcgaaggaaaccgttccatctcagtcgaggagttggcccaggtacgtacacacaatcattagttttcacaaatatcttatggctgaagaaaaccgcgaaactaaagagagaaaaccaaaacatttgttgtgcaggagatgagtttgggtccaacagcttatcctttattgaatgattggatcagaacttcagatgggaagcttagcttccttggatatactaaatttttgcatggagtgacactacgaaacgctaattcgagacatcgatagagtttaacttaaagaacaattttcccctacttttttttcttatagaattcttttcctcccctcttactgaaagtggtttgtgtattttttttggtttaccatttccttctatggtaaaaggtgaaaattggagtgtctacataggttaaaaaaaaaaaagaaaagaaattgaaacagttggtattgcatggcaatagcttgtatgaattaatttacatgaacatattttgtttaatttttgtaaaaataatttgtgtactgtaaacaattatgtgttgaaatctttgagaaaaatacaactttttttcttcttcttcttgtattaaaattattacaaatgattcaaactaggatttgtccaatgtctattccttaagccttttcaaagtcaactcaattgtttgctttaaaaaagaaaaaggaaaaagtcaattcaattcttttcaagctttgaactttccattattagcttcttcttcttttttttttttttcttaatgattttaaaagcataattaaaatgttgtggtcctgattaaataacccttagaatctaagcataaaataactttttttcttttttctataactatttaatcccaattttttattaacactcaaagaacttatattttagccaattgggtttgactttaaaatatttaatattattatatagaacatatggatcagattggtttgaagaaaatggttgcaaaactaaactggtttacctataagattaaagagagactgtttaaaagttcaaactttgagttgttcttaccccaaataatatatgtatatatatatatagtactaagtcttcatgtataaaccagaccatatatatttttatgtaatttttataaagagagggattataaattataatataatctattaagtcaaactaatcaagaaattaacttccggtatcttaggaacaaataagtcaaacaatcatggatggggatgctaagtttgttgtttacagataataatacaaataaaagtatttttggaattttaagaaaaatctgaactgaaattttgacaccaaaaaaaaaacttggtgtgaaagaaagcaatgaaataaaagctttttttttttttttttttgggcccctcggaaagtgtggcccctaggcccgggcctagcccgcctatgcctag

SEQ ID NO: 20852 - DNA, 7298 bp, Cannabis sativa
acacatcacaagtaaattttatttaccagcgtaataccaacttttgccagcacaaaaatgtgctggcaaaagggacatttcttgtagtgtaacttgaagacctaggacaaatgggatgtaaagttgctaatactcacatggaaataaatctcaaactcagccaagaaggagaagacaaacttgttgatcctaaactatataggagaattatcggtaaacaacaatatctcacaataactagacctgatctagcctatacagtaaacaaacttagacagttcttggtcacccctcgaatgaatcacatggatgttgcatttagagctttgcaatatgtcaagggaagtcctggacaaggcctttttttattctgcaagctcaaagattcaattcgaggcatacacggatgctgattggacaacaggtgtcaacactaggagatccacaacaagttttcacgtgcttcttggcaactctttggtgtcttgggaaagcaaaaagcagcataccgtatcaaggtcctcagctgaagctgagtatagagccatgtcgaatacaacatgcgagttggtgtggttgttatctctgttgaaggaactaagcattgaccacttaggaccagccatcgtgcattgtgataacaaagcggctcatcaaattgctgcaaatcccgtgttccacaaaaggaccaaacatatagaaatcgattaccatttagtaagagaaaaggtccaacaaggagttatcaaaacagttcatacctccagcaaagaacagatagcagatatttgtactaaggctttacttcctaatcaatttaaaattctcaaagacaaaatggaaatttgtaacatatacactccaccttaagggggagtattgaagttagttgttgtaaggtgtattgtattcggttaactagttaggaagtctgttagaggttgttaagttcgttatatgtataaactgtgtatataaagcatgtaatgtactgaactcttcatatgaatgaattccaatttcatttctctatttctgattctttattcttttcttgttctcgttctctcctttttgaaaataaaaactaataataatatttatcaaaaaaaaaaaaatattacaaaaactttatatgtttccacataaatttctgatgatgtgcgactgaaacaactgactttgtagagtgaaacttatcatatctctttgcctccaaactgccagcctagatgggtccttacttatcttaacttccagcactatataaccacttaggacccacttcttaatttgggttcctagaatttgtgtatatatactcctactttttaatttgtaaatgttgtcttctatatttttctatataaatatatattttagtttcccacactaaatatttccatgtctccaagatatgtactatgataatttatttatgtaatcataataaataattattaaatctccttttgatccaattgtcttattatgacacaataaaaaatttgcaacctaagacgagctaccaccaatgacataaacagcatctatatagttattttacacattatcatttacaataattatattgaatgagggcaaggttggtaataattttatcataaataataagataaatttttgctattaattaataaggattgcattaatgtgaatagtgtgcatggttggtttttgatggagtatttataatttatatatatatacatttgtaaaaatgaattgattaatgcatgaatgattatgcaagcaaaggtactgaaaacgaagacaaggttggaccacaccccaattagctagcaactgaagcattattttggcaaacagctttcattcactgcttgaagagtgatgacccaacaagaaaaaaaatggtgccatgatcaaactggctaagattaacccacatttgggtgagaacaggctagctacgggtccataataatatggactatatatataatatatatatatattatattactgtttctaaagcaattaatggctaatattgtgagaccaccttatctctctactgttttttccatttacacaacattgaggaatctacgtgtcaataatattgtagcaattatatatatgaaaacttctctcaaaaaaaattatatatattattatataatcttttcacacatatatattatattatattagttagtaattcacaaaaaaatatggaaaagcaacaatcatatttatcacaccatagaaaaaaaaattaaattaattttatattattattataatttacttgccttctttttatttcatagacggatgaatctaatttttcgtacaataaattattttaaattttataaaataacttaaataaatatcatatatagtattttgtaattatttacatattaaaaatatgaaaaaagtacatcaattgaaaagtaaggtgcaccataattaaagcactcaaaaaaaattatatattatataatttcttcctatgtcaaaaacaaaagtattcttagcagtagagttaaaaattatattattataaatataaaatataatctcttaattatattatagcttgttgctaaaccaaaacatttgatatggaaccccgtattattaattggtgttgagattcaaccatataattcttgtggtccagtaagataaaaaactagcctgaaaaatgttacatacaatttatactttaattgttacatacaatcttttacaaaaaatattatatttttataaaataaccgtaaaataataaaacagaacaattaaaaataacaataaaacaactcaaaataaggtgggaccaacaataaaaatttaacactgcacacaatataaaatttacactgtattttttaaaaaaatttcgttccacagaaaaaaattgaaaatttgagtggtgtaaaaattacttttttttttggttgaaaacaaagtctatttcacccactatatgttaaaatattgttttgatacataagtctgtaatgcttacttaattgaggtccctttggcatgtaggcctgcacttacattttccaacattaattgtttcaataattgatgtttttatggtcaacataataataaaaacaaccaaccatatataaaggagctgtgtgcttaactagaaacatatatattgtactaattagtggcagaaacattcaatgtttatatgtatttatcatgtatataaactaaatctgagattctctttcatttaattcatatatgtatattatatatataatatgagcattcagtaacatataacatgcaagtaataaaagatatataataacaacctcacttttgtaattgaatattaagctcaatcaattaataacaatattaaactcagaaaccaggggagaccacacatagaagacaatcaaatataatatggatagaatttctgagcaaaaaataatggcgttattttgttgtgtactcataattcgttggtagcaataagtatttatataatatattatatatacacatataaatgaaattgcagataaaataataattaaaaaaatgtatttcaaaatacatattataatggagtgagggaaaacaatgaggaaaagaaaaaggtggtaaataattaaggttggagaaaggcaataccgtcatgatcataaaatagtaaaaagtgagataatgatatgtatatataggataaatatttatatatattttttttatttagagagaaagaaagagcaaaagaataaagatctatggtcccattcttaaacctaattaatttattattagtctcgagagagagggacccttaatccactttgtcaccaccacatataactataaatatattaattttaccaaaagtaatcatgatgttttttcattggttaattagatgaagatctatttatatataattattgattgtttaccaaaactaattaagtaggtttcaaacacatcaaaatatgttccatatacatattcttgatcaaatagcgaccacttctttgactcactcctctgatttaacattttcgaattcaaggttgatttcaccctcttccatacaacattgtgtatctttaatatgtgcaaaagattttggtaaagaactgagaaacaaggcttgatcttcatcttcaatgacgacaccaatattttcaagatcgagaatcaacttgttaaactcattaatatctactctccaacagatttttcttccatcatcttgaatgaatacagggcatgtttcatatatattctattcaccaatgatttagtcatatacaaactttcaagtttcaaccacacacatgcggctatatcttcttttgcaaccttactctgaaccttatctccaagattcaaaatgattgcactatgagcctttgcaagagtctctttcttgtgttttttagacatcgaatcaagaagagaattatctcctagtagagcctcatacaatccttggtgaactaaataagccttcatcttcatcctacataatctaaagtcatttgtgctggtaaacttttcaacattgtatatcgtagcagccatgattacataccaagttgtgataccagtttgttatgcaaaatgaaaacaatcaatgacttatgatccagtttacgaaacaaacaaacatgtaacacgatcaagaaataatatccaagagatctcaagatttaggtaatgaattaggcagtaaagcagaaaagacaccgggtttaacaagtttgagccatgtacaatgctctacatcttggtcgaatctatagcagcactatctttattaatatcagtatttacagttataagaatcctcacaactttccgagattacgagaagaagtttctctatctagtttaaactccctctcaactttacactgtcacaattttcactcaagctaatctagtcaaattctcacacaggttacaaagattcacaactatttatagatttttagtattgtcaaaaattatctcctaaatcatcgtgacacatttacactgccttaaatgatccaactcattaccagtaacaataatccatgtcatcttagaaaaacagtacaaacaatctggaagcttcataaacatacaagcctaccggatacgtacaagacttccttcttggatggaccttcaagactaacagtaattttttttgggagtcttcaaattaataattaagctatttgggagagacatcccatacgcagtacaagcttatgtagaagtaccttctggagtctacaagaccttctgcacaggactttccaaattcacactaaacttccaatatctactctctatattaacaactttcatcacaaaagacaaaacttgtaaccataacaacacttattaatttattttgtgtaatgtatagttatttcatcgtgtttatactattttcttgataaaaatgcatctaacatcatttttttttacttttggttatgtagatttactagttagaatacatgtagttttttttaataataatatgtagtgacaacaaattttaaataaattattttacacgtgtaataaagagtaaaaataaagcatgcgtgaaatagtatattttttttaatgtaatgtagtgatattacaatatacttgtaatttagaggtgttggattcaaatccatgtgccttctctttttctccatgacttaaatactatgtttcacaattttaggaatagtaaattatttgaatttttttaatattatgtgcatgcaacaccactttatataatatgtatatgttattattgtataataatttagtcttgtattattattatatatcctaatttaaacttacctccaaaactttgatatgtatcaaattatgttttttgaacttttaatgtcgttaaaaatctctctaaactattaagattgttgaatttaagaatttttgtccaattttaataagaaaagtttaacgtggatgaaaatttagtgacatgatttagtacatgtcaaagtttgagatgtatgatttggtagattttaaagtctggaaagcatgatttagtatataaacaattatcaaattagtaaaattgaatgcaattagacaaaaatctttaaacctaacaatttcaataattcagagaaaaatttttaacaacaaaaaaaattcgaaatataatttaatacatgtcaaatttaggggacaaaaaaatttaattagccatatatatatagttgatatatatcaaacattttctcttaacgaatttaatatcacatcactacaaaaaatgagatttttgcgagtgcattacactattatgcaaaagtaatttttattagcacacttttgtgttggtaaaaagtattaaggggaagagttttacatagcttcttatgcgagtataaatatgagttgtactagtaaaaatacgttttgcaacgaaaatgtatgctagtaaaattgtgacctttttgtcagcgcaattttatcaacgcattagcgaattgtgctggcaaaaataatatttttttgtagtgcatggaatggtgtgttttttcttcccctgttgttaagacaagtagatgttgattcaataatgtctagtagataaatacttacttctcaatgtcatttttgtaagaaaaactacataaataatatatatatatatatttaatataatgacaatatctaccaccttattattatgtatggaaatgagagttgaatatttatttataggtaaacctaattcaacaacctgatgctttggacgtagagcctgtgttaaatatgacctcaaacctgctcatttttttattttaattaatcatcattatattatgattatctaagctagtgctattatatgataacttatttagtaatcatacacttataatatttaagctaataattcaatatataaacgggccaataatattaacctggttcacggccgaagcaatattatcaactattaattggcagtattattattacaaatgtatattatatatccaataaaatgtagtactacattccatgaatgatgcattcacatattggttaataataaaaataatatttatatttcaagcaaatattaatcaatgcttcttaactttaatgtaatgtattatgtttacacgttgctatctctcattgctttttagtcacatgaagcttcttatttttgtcatcactttatatctttttctcacatgtgacaacaagtactatatagtttatatataaaagtcaca

SEQ ID NO: 20853 - DNA, 5458 bp, Cannabis sativa
ttacggtaggccttttcgtctttcttcttttcctaaactgaaatgtttcgaaaagaaaagaaaagtccaagcattcaatgttttgtctttttcggattcattgagatcatcagttatatgtttggggcttagtttttttattttattttatagttttatagaaaacccaaatgaaggaaatgcttgtttttgccttttgatttcttcattatgaggattatgtagaaaattgctgcttagggttctttggtgggtgtgtgtgttttttttttcatagaaagaggggttggtatttggtacaaacttatgcgtaattgctttgtgatttcagacaccatgtggccacaatttttgcctcaagtgtttcgagaaatgggttggacagaggaaacgcacctgtgccaattgccggtgcccaatcccaaacaagatggcaagcaaccccagaatcaactctgcgcttgtcattgcaatcagaatggccaaggcttcaaaatccaatgctgaagtggggcaaagcaagccccaacattttatccacaaccaagatcgcccagacaaagctttcacaactgaccgtgcaaagaagactggcaaagctaatgcttgcagtggaaagatctttgtgacaacggctcctgatcactttgggcctattcctgcagaaaatgatcctgaaagggatcagggtgtattggttggtgagtcctgggaagataggatggagtgcagacaatggggtgtccatatgcctcatgtttctggaattgctgggcagtctacctatggctgccagtcagtggctctctctggtggttatgaagatgatgaggatcatggcgagtggtttctttacactgggaggtatttgcttttgtgactgttgaatttattgtatttataaattccattgccaaggttcttaagactaggaaaacttattgttgttttcttctagctttaatgttaagacttctaatctcctgcttcccaattgtaatgtacagtggtgggagagatcttagcggcaataagcggacaaacaaggctcattcttttgatcagaagtttgaaaagttgaatgaggcactgcgacttagttgtcgaaaaggctaccctgtccgagttgtgaggtttgtttgtgcttaattaatccttatctcttatattcattcttcttggtattgtattaggacaactgctttcctttctctcaaatttctgattggcaggtctcacaaggagaagcgatcagcttatgccccagaagagggagtgcgatatgatggagtttacagagttgagaaatgttggcgcaagaaaggagcacaagtaagataatgcttgtcataattaatgtagtagtgtcgttatttgtttatataaactgataatctctcttgttttagggccatcttgtgtgcagatatctgttcattagatgtgacaatgaaccagctccgtggacaaggtctgttaatagtcatctttccctctaacagcccctttctctacaaccactaattcttattttttcaaatgatctttcagtaatgatcacggggaccttccaaggcctttgcctgcagtaccagagttaaagggagcaattgatctaactgaaaggaaagaagctcctttctgggactatgatgtaagttaaaagcagttaaaattttatgatatttcttctttcattaaagctaattgcatattaacattttattatggtcaaaataagttagttatttataaacttgttatcatgttccataggaggagaaaggtcggtggatgtggaagaagcctccgccgcctagtagaaaacgcatgcattctgattgttctggaattccaaggaagagatctaaaaaagttaacaaagcatctgcaagagaaaagcttttgaaaggcattattttctaactgacaaatttcgaacgtttggaatcatctttgagggcttattatatgcttttattggtacaattactgaacaaatagttaaatgtgcagagtttagctgccaaatttgccggcaagtgatgactcttccgatcactaccccttgtgctcataacttctgcaaaggttgcctagagggtgtatttgctggtcaaactgctgtggagcagaggacatgtcaaggcagaagagcactgcgggctcggaagaatgttatgaaatgtccatgctgtacaaatgacatttctgactttcttcaaaacccacaggtaatgttgatttttaggttgctgttgcaactgttgatacactattgtttcactccaatattgaaagaattagaaaatatgaatcttatcgatatcaaacaaagaattgcaattttttcaagcttttcaagacacttggatatctccctgagtaaattttactctttacagtacaaatcaattcctaacccctttggattaatcaacctcacttttcatactaattcatcttcactgttttaagctaacacattcgagcatctctaatagtaataacttttaaaggtgctaaaaatctctatgttattcaaatatatagtattttttttttatatcttttttacataatttttggtactcttctaaaaacactttaatagtataataatttttaagaatactataattatgatttcatatattattatttaatatattatatattttaattataaatattgtcacactaattttttttataaaagatagtattaatgccacatcaacacaattttctatgatagcacttctccaatgttatagcatccaaataagcaatttacatcctaatcaattaagaatttaaccattggagatgctcttaggactattaggatagctcacgtagaaacattccatctcaacaactaagaatttgccaactcagcctccataatcctattcctaatcaattatatttaagagacctaacattctgtaccaagttgccattctttgtgtcttgttcacgcaactttgttgcatggttactaaaataatcacatgcatggctataggagaatacttgagcattttgttaggaaactagctgagtctttgtttgcagttctctattagttgagtatttgttttgctcatatctttatttctttggcaggttaatagagaactaatgggtgtcattgaatcgctgatgcaaaaagaagagcctgaagagagtgctgagacatgtgaagaggtagctgccgaaacaggagaagagtttaccgtgggggcacgagatgaagaagaggaaaaggaagaggaagaaaatactttgaaccctgaagctgaggaagagaaagaaactgttggcgattccatgaaagatgttaagacgtcctctcccaagaaacctactgctactaatgagaagcagacagacattctgatgaaggttgaggagcctcaaccacaagcatccccaaatggagaaaacaaagctcaaagacagaattataagcgcaacaaggctgaaactgttggcaatcccacaaaaaaggccaagacatcctcccccaagaaacctactgctactaatgagaagcagacagacagtccagttaagggtgagaaaccacaaccagaagcatccccagaagaagaaagcaaagccaaaaaacagaattataaaagcaagaaggctgaaactggagttgttggaacaccaaccagaaggagcactagggtaaagcagtagctgcaaaattttaattttttcttttttttactgagaagctgcaaatgatttgatgcatcattgagcttagcttagttccctttttgaaatgctgatcaaacatttaagcattttctttcggctttaaagattacccattgtgtatttaagttatcttttcaaaagggtctagtgcagtacaaagcactaggcaaccacagattacattatgtgagaagaaaaacagattcctatccattttttagtttgtaatgtcattcaaaatgaaacatccatgattatttacatattattctacagaacagtacagtcctgtcaacacattatgcatttggacttatgtttctttctttttgttctaattaagaattttgctgctcaagcttctcgatcaaagctactttctcatcttccggaagggaattgaacataaagacggatttgtcaccaatatcatcctagcaaagaaacaataaacaccacaaaagttttataatttatgaagaaatgtaaatgagtttttaccaagtatagttattagttatagataggtccttaggtagctactaccttaattggctgagaaaacttccttccagcaaatataacaaaaagtatcatccaagctccaagcagaggaagtttcactccatcgtccatcaaaccactctgcgtttcaaatcaaaaaccaagctcatccaatgcattgtttcattaaaagggaaaaacaaccctacttgaacacacgcaattcttttcgttactatacacaattaagaatcaaaaggttgaaatacgaaccaggtggccaagaagaagagttggtattataaaagtgagaagtccagcttctagcttgccataacagagacctattccatccattgaatccaatccaacatcattatgaaaaatgacccaaatagataaataaaagagatgagtttagttttaccttccttgaagacaaggccagtgagggctgcaaagagtgggcccacaagccagacagcagaggggttgtgaactacatactggaccagcccttgcccagaaggcttagccaagttggtgtatgtgagcaaggacccaaccacgccaagcccccaaaatgcttgaagagttcgcttaattggggtgacatatatatgaatcaaagccaaagacaacccaagtccagcaccacccacaatgtaaaacaggtcaagattgtggtgtatgaattccccgacctgattttcttcaggcaagaaagctgtggaggctgccccaacaaaagaggctgcagctgtgaccagcccagaacggtaggatatgacctctctaacgtcggtggaatcgacagaccaaggaccgtaaattccttggaaaacaggagtagaagtagtagtagtagtgttagaggtagccttacatttgaatatgggttttcgaaagcggcgattagcagctgtggcggtggataatctaaggttgtacttgggtgtaggcaccactatagctgcggtggttgtggcatgtagatgcagcactagtcttgaagatgccgccatttttagaagtactattactactttttctttcacttcaattcagccataagactattatcctttgttttgttttaaaagaggaaaagaataatatatgaaatcaaagttgaaaaaaaagagatttaattgaaattgttgggaatcaggggttcgatctcaaaactaattggctatgggaggagtagcccatt

SEQ ID NO: 20854 - DNA, 2316 bp, Cannabis sativa
  modified_base (1668)..(1669): a, c, t, g, unknown or other
aataataataataaaaaaaaaaggatattatcattatcatatagctttgtatcggctaagttcacgagttagagataagcagactcaaaccgctaacatccgccacatggtaaaccgtactgcctctcaggccctcgactaccatagaggccaacgatagacaatagctctccatgaacacagcttacaactttcatcgtactgtgctctccaaaacgcatgcaactcttctcaaaatctcaaaatgtgctaagttggaatcacattctaactaaggatttgtgcaattccgaagtatccagctacaagataaccatgaacggagagctttctcccttttttcactcaactctttaaaacttgagtatttttgagtaaaatctgcctagacaactggaattctggatgttatagggttgtaccaaccgaaagtccaattgggtaatttcagaaaggccaattttcgtattttagccataacttttcactcaagtatctattttttacattttatatatcgtttgaaagcacgtgaaaaactctacaacatgatgtatatttagagccaaaaaatgtgttttgttttaggggttttcactatgtagtttggtaaaaaaaaactctagattctatttacgtgtattaggaagtattttggaatagatatttattagtttatcactaatgtaacataggctctggatcgtcgagcaatttctacgcaggttggttgacacacttgaatttagattggaggtaagaaaagttcatattagaatgagtatgatgggtaaatatgattgtcttattagataataggagataatctgtcactttattaagcaacggtggtaactggttagcttattaggtaacagaatttgagttgtcttattagacattactttcttagttgaatgtatattttgttgattagtgattaattaatgttattttattagtagcaaatggattatgtaaatattactattgtttgtgtttataaggaattattttgaatgcttttataagtattgtttggtattttaatgctttcttgtcgagtttttgtgactcattagtgttctatgttgtaggtaaaagcaagaaaaccttgtacaaccatgagttgaagagagaagtagttgtacattttccggtctgttcagcttacaaggttgagttaatagtttggaatagattttaagactgataatttttatttagcccttttcatttaaataacagtttacacaataatagtgtttagtttttaaattgggatccccaataaagagattgtaatttagaatttttaaatatatctaaatataaatttttaattaaacgtgttttaaagtttaaagttgagcttattactataaatttatttataaaagtacacatgagtcgtctataacaatttgataaatgtttagagataattatataagatattattttttataaaaaaattacaatatttttacgtttaaattttttttttaacatttttacaattttttataaaaacaacaagaaaactacataaatgtaacatgaaaaataatctaaataacatcaaaacaataacaaaaaataacatacagataacaaaaaaacaacaacaaattaacaagatagtacaatataaaaagaccgtatttnntgtaaataaaataaaaaaatcataaaaatatttaaaattcgtttttgtaattttttgttatttatccaaagtgtgttattttttttagcacaactcatgataaaatattaataactttttcatctttatttttgtgtaagtttagtcggtggatccagtatgatgtctgaagtacaagttaattaattaatagagtaatgactaatgagtttggagatttgaagcgatatatattactacaaagtcatatggaaaagttttatttatttatttatttatttgtttaacagatatagaaaagtttagtattagtcaaaccaagtaagtaatgtaaaactaaattatatatatgtgcagaaaacttgtattaacttgattacttctcacgcaaaaaatcatataaatatatattttttgaacaaatataaatatgaatatgataacattatagatgcaagaaacattgaactttattgtcatgatcctactacaaaaggacatatattgtctttattggcataatttcactcatctctttttattatttttcaatatctatatatgtagttttcaataaaaaaatatatgtatatttatgacatttccatgtacgagtttacaatccgtttccatgttaataataataa

SEQ ID NO: 20855 - DNA, 2402 bp, Cannabis sativa
ttttaaaagttcatatttaggatgttaaacaacatacttgtcagtagatctaagatcctcgtaaaataattccaacacttattgcaaacaaaaagaatctagaatgtatgggtgacctccgcccaattgctctatgtaatgttgtctataagattatttcaaaagtcatggctaatagactcaaggtgcttttgaatggaattatttttgagactcagagcgcatttgtcctaggtagactgatcacaattaatattttggtgtcttttaagattatgcactacctcaaaagaaagaacaaaggaaaagtgggtcaaatggcattgaaacttgacatgagaaaggcttacgatcgtgttgaatggctctttttggaggctttgcttccaaaaatgagttttcatactagatggttacagttgatcatggctttagttgttttcgtttgatactggatcactttggttgggcactttctgtggcctataacttcgtctcgtggaatacaacaaggagatcctttgtccccatacctctttatcctctgtgcggaaggccttccaacatttatttgtatgtatgaaactagaggttggataaaacgatgtcaagtggcctgaggggctccttcaacatctcacatgttctttgccgatgaaagctacctatattgttgggccctagaagcagaacctgaaagaatcatggctcttctggtgagttttgaacaagcctctggtcaaaaatttaatcgtcaaaagtcttccatattttttgcaaaaatgctcctttggatattcaggagagagtgtgatctattctgggaatgattgaggctggtgatgatggcttctatttagggctgccaaatatcatgaagcataataaaaatgtggtgttgggtttcctcaaagacaagatgagaaaaaaatttgagagttgggatagtaaattcttatctcgagtaggttaggaagttattttaaaatctgttgctcaatctctccctaattacactatgagcgtctttttaatccccaagggcatttgtgaggaacttgagaggatgatgtgtaagttttggtggaagtctaatcctaagcaaggtactggtatacgctagatgaattgggaccgtatgtttgttgctaaggatcaaggtggaatgggatttcgtcatttgtatgattttaatattgcgctccttggaaaacaagcttggagatttcatactcataaagattctcttgttagtaagttgttcaaagctagatactactctcgtggctcttttattgaagctgaattgggtagtaatcctagctatatttggagaagtattctcaaagcaaaagatgtgattatcaaaagtgggccatctgcttgttggatcagtgagtctcccagacattgataacccccatgttacatcttcccatccaagcttaagtgatcaaaaagttagttgtttaatggcggtggatgataaatgttgggatattgaggtcattcagattttttcaacagtagggacagaaacatgatccttaatatccccatttcctcttcaaattcgattgataattggtattgggagcaaggaaactttaggcaattattctgtcaaattggcctataatttaatccaagaactaaagattactcttgcttcatctaataactctaatttttggagagagttgtggaacttatagatccatatgaaggttaaagacatgatttggagagctttgtcaacctatttactaactcgggtgtaacttattcaaagacatctcaagatttctccctcatgccccaaatgtaaccgaggggttgaattcaatgctcatttccttgtttcctgtagctttactgctgcctacaggagtgttgcagggttgtatggtgggagcattggagattcttcttttgatcactggttccaacaccagtttcagcattggagcagggaagacaaaaaactgggtgccatgttgtgttgggcaatttggcaagataaaaacaacaaggtttggaatgggaaaaatagtttagttaagaatgttgttgccttcgtaaattgtgatcttgaacaatggttgtttgctcaagaaaatacttttacaccctattctttctcgattcaggtaggggaagggatgagcaataatgtgttccaatagtggataattacaagatcaatggggatgtggcaacattcgcggacaaaaacaaacttgggtatggttgggtgctttgtgatgatagaggccatgttcttcaagcttagactggttcttggcttggttgtgttgatctagggcttgctaagactctaggagtgaaggaggttcttagtgttgggttttatgccctaaataaaattccatttcaatgta

SEQ ID NO: 20856 - DNA, 8010 bp, Cannabis sativa
tgaaagccaccaatactcaggttatgactactgaggagtatctcaaaacccagatgaaagaatctgctgaagttgggtttgagaaacaggtggtatctgtgaatgaagtcaagaaaggttccaacgatgaaattcgcagtgttaaagcagtaacagcagaagaaacggtgaagcgcaagactcttgtagaacgatggtgtgaggaagaggcttcaagaaaaaatcaagttgtggcgaaactagagaacccaattaaagctgaaccaataacgactattgttccagtgaaagacgagcctattatagatgcggagccgattaattgggcgaaggccattgttccggtgaaagaggaagaggcagtaagagaaacattacgagagagttttatcaagaagttcaaaagtgctcctgttagaggaccgattaagcagaatctgcctgatgcaaagaaacagagaactgagaatcaaaacccttgtcccattccagtggaggatggagacttccctgaagagcccgactggtttttggtgggaagaacaatggtgactgcgctttcaaccactaaaggcaggaagttggtggacaatgagattgtccattttgcttttccttccaccgattggaaatctaacagtcgttggattgttcgcttttcgaccaaaagatatggagaggtacatttgtttacacttggatcacatttcatgtctgctaaatttggtttttgaactgttctttgcaaatcatagatattgaagattgtgctatatgtgcattagttgctttgtaaagtcttattactgatatcaggtgtttttaattgtacctaatcactagattggtaggcttccaatggagtggggaaagtgcattgttcctcttgtaaactctggtaaggtgaagttttttgggcgttgtgtagctgcaccagcaaacctttcattgatgcaagatattattttatatgtgaggtaaagttgcagtttgtactaaattactaatcttttagcatccatattgaacccctatttgggtttgttgtattaatttgattacttgtttatcttatcagcttttacatccaccgctccatatttatagaggatgataactcttcatggggatggaagctagaagctgtgcacattgactctacagtctaccccctcctcaccttgttcaagctgttgaaaatccaaccgtatctgagggtatgctataaatttattgaaactgtattaacattcagcaagaaagaagatgttcaatctctagttccaattaactttaagtaaagattttaatttccattttgcttggaacaggctgagtttactccagaagaacttgattctcggaagcgtctcttagatctagaagtatgtactagttgatcaattatgtactggttacgcaagaattgctacactttgattgacatggcttacaaatcattaatttgttcatcaatgcagagtgctccagatgaaactgcatcaatgctgcctattgtaaaaagaagacaaggttgccagcagtatccagagcaaagcaaggatgaacaagctgtttctgagtcatctatgaataaaattgttggtgccgcagaatcatataatttggaggtttgtaatgtttagagtattatattgtttaccttgaatgaatcatggtattattctggatttgaaggtcctagttatcttgtatagtttctcttacttcctgttactatcttaatattttaggagatggaaccccctagcaatctcaattgtagtctaaggtcataccagaaacaggccctttactggatgtcagaactggaaaagggaattgatgttgaagaagcagcaaagactcttcatccttgctgggcagcctataaaataagtgatgagtatgtagttcttttgatgaaacatttctgctttatatttctgaatctgtattagtactcattctttcataatcatagttctaacttccaagtaaccattgaatatattctggtaggagggcttcctcaatctatgtcaacctcttctcaggggaagcaacaaccaaatttccaactgccacacagatggcaagaggaggagtgagtactaacacccgtttctctattattgtgtaaacatttacaatttgtgttctgacttgagtatatttgtagattctagcagatgcaatggggcttggaaaaactgttatgacaattgctctaattcttaaatgtcctggccatgctagttctaataatcaaggacttctcaaagattctcagacagacacctcgtccaaaccaaaaggcggcactctcattgtttgtccaatggctttgctaagtcagtggaaggtgcatatctcttgcttaaaaatgctaagaatgatattaattgatatgttataatttcattatgcttggaatagtacttactgtctctgcttaaaattctcaggatgagcttgaaactcactcagaggcagatagcatttccatatttgttcactatggcgggggcaggtcaactaaccccaagctgcttgctgagcatgatgttgtcttgacaacatatggtgtcttaagttctgcttataaatatgtaaggaagtgtaattgtttctgtaaacatttcattcccttttgtttttttgaataatgcatcaaaactttttttcttcgtggtacaggatgaagagaacagcattttccacaaggtggactggtatagggtggtcctagatgaagctcatataataaagtcttggaagacccaaggtgctcgtgctgctttcactttgtcctcacattgcagatggtgtttgacaggaacacctattcaggtttgctttctatattcattaatcttaagcatacattatatccttctgtcatgcatattcaatgattcatacttagtttagtagtctgaaattttagaaccatttgtgctcatagtacctcacagttgatgaatttttgtataaattgctgcagaataatctggaggacctcttcagcctcctatgcttcttgcatgttgaaccatggtgcaactgggcttggtatgacaaaacacttgaactgtgtttctgtttatattgtagagtaggcatctagagaactttagcttgtcaaattgttcattttgttaactcatttattaaattctacatatttacaggtggaacaaattgattcaaaagccatatgagaatggagatcctcgaggccttagactgataaagtctattttgagaccactaatgttgagaagaacaaaggaatcaaaggacaaaaaaggaaggtagtcatactatattttttgtccctcagttttgtagcatctctttttctcttaaatgattgtgctgttaacattcacattacttgtgaatttgtaaccaggcccatacttgttcttcctccaactgatattcaaattatcgaatgtgaacaatcagaagctgaacgtgacttctatgatgccctgttcaaaaggtcaaaggtatgttatgtgatctattattttttccatgaaaagtcccattgaaacttttttgtttcaaaatttagtttcagttgaagcattatcttccattgtttagattttgctcagaccttcatcagtattggtcctttagctaaccacctagacacaatttgtattaacaggtccaatttgaccaatttgtggcacaagggaaagtcctacataattatgctaacattcttgaactactcttacggttgaggcagtgttgcaaccatccatatctcgttatgaggtgagattagcaacatcaatatcatctaagtgacaatattctttctttagtccattttcatttgttctcatctgtggcaactgtggttttgaaacaatgtagtcgaggagattcacaaaagtttgcagacttaaacaagcttgccaagagattccttgacttgaattcttcatcagctccagcaccaccctccagagcctatgttgaagaagttgttgatggcattcgacatggtgataactctgagtgtcccatttgcctggagtctgcagatgatgctgtgctaacaccctgcgctcataggatgtgcagagagtgtctcctttcaagctggcggacaccagctgctggtctgtgccccatgtgtaggcaaatcctcaaaaaaactgacctcataacctgcccttcagagagcaagttccaagttgatatcgagaagaaatggaaagaatcatcaaaggtttctagtctcttggattgcttggaaagaatccgctcttctggctccggcgaaaagagcattgttttcagtcagtggacttcatttttggaccttttagagattccaatgaagaagaggagaattgggtacttgaggtatgatggagggctgtctcagaagcaaagggaaagagtgttgaatgagttcaatgaaactaaagagaaaatggtaaaaaaaacttaaaagcaatgctctcttttctcagtcattgattattttgattatgatgttcatgtggttgtgctataattcaggtactactaatgtctttgagagctggcggtgttggcttgaacttaacggcggcgtccaatgtattcttaatggtactctgttctttttcttttcatgattgcttcaaaaaattcttacaaaaatggtgatatgacatgtttatgctgtgtttgttcaggatccatggtggaatccggcggtcgaagagcaagcaatcatgagaattcaccgcattggtcaagaaagaacagtttcggtccgtagattcatcgtcaaggtaagatccgattattacaaaactgggacgggtttagggtttgaccagtaatctcattttgagctgggttttcttttttctcctttggatcctctggcattgtagactgggcccctgagcctattgttattatggtgtaggtccatgatccatctattcaactccaaaacggtcttattaatcaaatatatatacatgaatcattagaaactacaaaacaaagataatatcaataatataaggaaagcatgaataatcggacatatccagtcaaaggtgtatcaaaatttataattgccaagcctttttaaggagttattatttctttatttatttaatgatgtggcataaataattggacattgcattggtatagtttctgttagggagatttgattgaacaaattgtgtaacatggcaggacactctggaggaacgcatgcagcaagttcaggctagaaaacaaagaatgattgctggagcacttactgatgaagaggttcgttctgctagaattgaagaactcaaaatgcttttcagatgaacaaagtttcaagtctgttttgggttatagggagaacattttattttattttgttggtcaaatttttgtaaagatgagctgggttttatctatgtatgtatctatgcacagctgggcttggtgtctagtcttggtattataattttctcttgtttgggtgagagggcagaggagagcccaattttgtaaattttgaaagtatgaaatctaattggaaagagaaaaccactgttccttcatcatatgtatatgtatgtactattaactcttttgattagaaacaatgtatatatgattttaataaaggaaaaaggtaatgatctttagaatattctcgaaatgatggttatatgcttgaccagtgaccaccgagttttgaccggtttaggatttaaccgtatctaattggtaactgcattaataataataataaagtgcagctcaactaaacgacaacagagatacataagcacaaatacaacccatacacgtgtcaatcaaatcttggttctcttaggtctcaaattgaccacgtaagtcactcgtcgaccgtttgatttttgctgaaggactaggaagaaaaacacgagtatatgatggtgccacgtggtactcttgtcggttaaacatcgccgtttatagacgtctgttttgttcacatttaggtttttgttttgtaagtttaaaaataaaagggtcaattaaaaaaaaaaaaatataatgacaacttatttttaatatttttattttatataaaaaattattttaaatttatacaattttcttctctcatattcttataaaataaaaataaatatattcgaaatataatgataaaaattaaaataaaaagtataaaattttattagaagaaataaataaattaaaattattattaaatttaacaaaaaagttttttatttttattttaatattagtctattagagtatatttatatttttgagaagtgtagtaaaatgggtcagaaacaggcggtgaagtgtaagaaaaggcaaagaagtccccacggttttcagtttgggctaatgggctgggccccacttacagagaaaattgtagcccgttaagaaaggcccctctctctttgactgagaatgatatcaaattatcagtaccatatgcttctctctgttacttctaaagataaagctcttttttgtgctggcaataagttgtctttctgatggctcggctcggcttggaatgtttttcttcttttttatgtagaaaaagttgatgaaaattgtctttaaagacaaggcaagaatatctattttgagtcccaataaaccaaagaaaataaagaaaagaagaataaatgggtgtattatgaatttatttggagtaaaatatagtatttaagtggtatgaaagacacgctttaaatatgtaaaaatatattattattctaaactttctcattggtcaaaggttgaaacttgaaagtagggctacaacttaaccaaaccaagtttttgggcaatgtattggtgatttgtttttcttttcagattactgttttaaatgcgaggaagtattttcctaaatggaaaaaaaaagaaggtaagtatttatttttttatatctatatatattttttcaaaatactcatttaacctcttacattttatacctaaaatattgtccaaaaaaaaacctaattaaatttaaaagaaaatcaaattcctgattcttattacatgtcaacaaatccaactaatgccattatgaatgttattgcataattagatctcatttatttaattcaatccaatgtttctccacataacacgtggaagcaacaaaagattttcacaatgaattcatttttttatattacattttttaaattgcacagtttggattcgtatccataactctttattaacaatatttgagtggttcaaaaatcagtaagaaaaatacaactttttcataacgtattaataaaaaaatatggaatttgttttcaaattcatggttatatcctcacatttatatcttcctatatatgtataaatatatatattttttaaaaaaatagaaatgctaaaatatatcttaatattttaatgtcggaagcattaccaaataaaatgacatttttttcgagtgaccaaaaataacatctctattaatataattaatctcatattttcatcaaataaataatataaaactgttacttgcgaatcggtatagtattatacctaataacaattatttgtttttttaaaaaaaaaacagtaaaatctttcatgtttaatgataatagacagagggttgaggtgttcatcaaatttaatccgcattaatttgcttatagtacattcgatctgtactaagttcggatccaatctaattcccacaaaaactcaaatctaatccaatctcatttgcaaaagttcgaattgaatcgttattttggattagttattttttaatatttattattttttttttcataaaattaacaacaaaataaaataaattattattattttatgtctctaataacaaaataaaataacaaataataaattcagaagaaaaaaaattatatgtaaaaagaaatatttaattttattttaaattatatttttctagaacttgtgtaagtaactgaccattaa

SEQ ID NO: 20857 - DNA, 3384 bp, Cannabis sativa
catattgatatttttattatatacaatagttaggtttttttatgctatttaattaaaatatggaaaacataaaataaattcacctatgtcttttaacgtttctcataaaaattcgtttaatcttgtgcggtacacattttgtttagtggaaacgatccaaaaaaaaattacaacggaaacgggtaagagtcattgccatgtcaaaatcaattatctaatccaatggcccattgtggcaaatgatgtgctgctgtattttcttgcctaggtagatgctgaagggaaacagtagaaaatgaaaataacacatcacgaagcgaactcacaatcgctccatatgcagataagataggttcattagcttgaatatccgttatgagatttaagcagtccgattctacgtgctgaatttctatgttattatctcagtttttccttttttacttgaaacaacaccatccacattaatcttcagtttcccagtagcggggtacacatttctgttagtatagcagagtctctaatttaatttttcgttccttcttcaaagtgaaatactatgatacataattaatcatatgcgtggtccaattgaaataattgcattccatgatgtactaatcgcttaaattaacaaaatggtttatatgtttcaatcattatatagatgtgaacatccccaatacttctcatcaaatttatcacaatactatatattatttatatatatggtgatatatattctccttattatttcatttccaaacattttttttacttttttcgaaacattcactcttaaatttgattattgaaaaaatattccaaaaattattataaaagagaaatgctaattaaaaggcaccagtaatcttagtagtgttagtgcttatatagttaatgctcattatatatatagaaagttataaataattagtatagatatagtaaaaattaattaataactatagttttactcacaaaaataaaattctaattaataattaatatatgtttcgtattattggtcttagccgaaatcgatgacgagcgagggagtgatcaaataacaacaaaaggcagcaaaggtgatttcctatcttaaagggaaactattaataaaacctaaatggttggttttcgtcccacagataatattatttattatttgctaacttgggacactaaattgatcattgtgttgtcacggaagtataacaagatactactgctcttttactacaataatctttatatgttatgctatatatatcgtttataggaattattatacgaattattcaaagtaatgaaataaatggtaaacctatatgtgagtacatatgccacataaataaaactatatttaatccttccttggctaatatatgagtatatatgtaaaacttattaaaggtaatttatatctggaaaaatagaatagtataaaacattaactttgaaattaaattcttagttgtaagcaatgacgtttatttctctttccaattccaatttagaagctcatcaaatatatgccacttgcacgcaacctgtcaaacagtgagtgaagttaaatgtctcaacttcaagataatctaagtgtgttactttccaagtaaatctctttttcagcgtttgaaatgagttaatataatgtggccgtctgcattaatatattatagttcatattaattatttgttgttatagtgtggtgtgggggagaggggccgagagtgttggctgaattggtgacgtttgaaagcggttacaaaaggttggattgggttggaaaaattagagtcccgaggtggatgaggaaagataaccctatctccactacttgacaatcctatcttccatgtcttttcttggtttctttctatatcaaactacttattccaatcacaaatacttacccaaaacatacaaacctctcacctttatcattttgttattatatattaatcaaaaacttaaattattatgggttttttattattatactttaaaatagtttttttttttctttttttatttttacgaaattatatatacaaactcctattgcaatttaaattggaacaaaaaatcgtatagaaacttttattgtaactagcagtgcaacaactttggaaactcaaactgtaaatttaaaaaataaattaaaaaaaacaatatttagggtaatttcccaattattatttatcagtaatgatatattaaatttaaaataaatatgcacttgttaaatattcagcataatgacgtgtaaaatcatatttcttcttaaacaagtgtaaaatcataattttaatcaattataatttgatatggcaaaagcttatgatcgagtagagtggtattttttaaaagccgtgatgctttagttaggatatgctagtgactgggtagacaaaattatgccatgtattacttctgtgagttattcgtttcttgttaatggagaagcggttggtaaagtggtttcgggtcgaggcttgcgacaaggagatcctttatctacgttcttatttttattttgtgctgaggctttttcgtgtcttatatctcacgaggaacggaaggctgcatggtctgaactttggaagacacgacctttcagtttcacacctttttttcgctgatgacagtttggtattttttgagaccaaggaaatggaggtcaaaagtagctacttgataagtacaccacaactttggggcaactagtaaattttcacaagtttgagatgtgctttgggaggaaggttaatcaagaggtacgagggtgattgacggagatgatgggggtgaaagtggtggaaaattatggtagatatttggggttgccctcctttagaggtagaaccgaaaatgaacattttgaaatgattaaaaaccgggtttggaataaagttaaaggatggaaggcatctatgttttcagtcgcaggaaagaaagttttgatcaaagccatacttcaagccatgctaacatatacgatgagttgtttcaaactgtctaagagtactatcaagaggctacacaggatgcatggtagcacgattttggtggggatcctctaaaaaaagctcgaaaattcactggtgtcggtggagctgtctatgtaagctaaagaaaaaaggggaattgggatttcgagatctccgattgtttaacaaagctttgattgctaagcaaatttggcggtgtcttcgatttctaaactctctttgtagtaaagttctaaaggagagtcactacccgaataaaggaattttggaggccaagtgtggatctaaagcttcctttgtttggagaagtctagtatggggaaaagagattattcttcagggctaccgttggaggataggagatga

SEQ ID NO: 20858 - DNA, 1523 bp, Cannabis sativa
cttttatgtgtgtaaatatatcctttccccaacagtttatgcgaccacgttcacgtgacaaaaaacttgtggaagaatggagcattcctttgaagagcgttgaagatattcatgaggtgcgttttaccatagcagaatgaattgttgctattcttatttgctgtgtttatttgtttaataaatgttgtgttgttttaattatcagcaatttaagaaattatgccttggaaagttgaaaagcagtccttggtctgaattagatggacttcagcctgagacaaagatcataaatgaacaactagtgaaaataaacggaaaaggtttcctgactgtgaatagccaaccagcagtaaatggggaaagatctgattccccagtagttggtaagcaattaatattatcttcataattcaaatgaatggtttgatctcatactttctgagatgttgtttctgtagtactactagtattaattctagtgatctaattaatacttactcccatggcaattggcatggctaacatgagtttgtttgatattaaggatggggtgggccaggaggatatgtttatcaaaaggcgtatttagagttcttttgcactaaggatttgttggacgcccttgttgaaaaatgcagcaggggtttctcatctttcacctacatggctgtgaacaaacaagggcattggttggcaaatgttgatcaaacttttgtcaatgccgtaacatggggagtgttcccaggaaaggagatcatccagccaactgttgtggatcctgctagctttacggtatggaaagatgaggcatttgaaatctggtcaagaggatgggctcgcttgtaccctgaggttgacccttctaggaaagtacttgaagaggttggtttttttcttttcttttcttttcttttctttcctggtatgtgatattactgttctgttctttgatttattaagcttgtgtgtatctcactttttcaggtggagaacagctatttcttggtcagcttggtcgataatgattacatccatggtgatctttttgcagtttttaatgagttctgagttgtgttgtcctttctattagctattattgaaaatgaaaattatgctttgctctttagttggtttgtaattgttattgtcctttgtgaattgtgtaataataagatgagttttggaacctcctcccctgctgcgatccagaaatatggagcagtaacagtaactgcagacccaaagccgatttctgtaattgttgtctaccttattcattgtcgttacaatttttatttatttatagggtgattccatacaaagtctataagttgcactgtatcttaagtcactctccattgttattctattcgttatttcgtgacagtagctctcaaaatgccaaagagaatgaattggacaagataaagtgcatcataattttaccagtgtttaatgtattctatcaaatactttatgttgaacgataaaaaaaaaataaataaatttattattatttcatt

SEQ ID NO: 20859 - DNA, 2704 bp, Cannabis sativa
  modified_base (2652)..(2665): a, c, t, g, unknown or other
ttagttataatttttttttttttacttttagttttaagttttgttttgactaaaagtaagatttttttgtagttattaattatatttacaaagagcactattattaggcacctgtgttgcccaacactttttataggtgatgtcttacgattagttagtgatatactctacaaattattttcttaagttgtataaaaaccgatacttaattacacaaataataatatgatacgtgtttgataagagtattatcaagtcaattacaacacatttttaaattagacatatatataggcgtgtagcttgaaacatgagaaaactttattactaattcatttttcataatgtagaattagctagagtcaactctctaacaagttatatatatacatcatgccaaattcaagtctttaaaattaattcaattatttatttagtattataattatagattgtcaaccatgtagttttttataatcaatccatttttatacaattttaatttttcaaggaatacacatcttagtgtttagtcaatagtgtagaatgcatttattttatttagttttgtgtatctatttttattgacatcgtgcttcaccatgtaaacttatgaattttgcattgatcaaaattaaaacctattatataagaaaattattatatatactttttttttttttaaatacattattgacaaattctaacaaaatgtttgttgtgaatgatgtctcccttatttgggattagtgccacatatttttaggaaataatcatgttagaatttgctattgtaaaaggagtattctcaatatggtatgtttcataaaaatgcaattatttttaattctaaatttaaaaaatgttattaatttttttttttttttgataatgtaggcatttttttttatcaataatgtaggcattattaaatatggagattaagtaacatttcttttgttattttgtttcaacaaaaaaaaaaaaaaaaagaaattcattatacaaacaaacaagatagcattacaaagcataacaaccaaaaaatacattaaataatatttgtttttaattatagtgacagtttaatatataaatggtttaaatatttcttgttatcaccatttatctaaaataaaaaataaataaaacatctctcttccctcatcaatttgtcaaataattttttattcctctcctcctttttcaaaatgtaatataagatatataaaatgctaaattaattctaactttaataacaaaaaaaataggaaaacaaaagaaaaaaaactcaattttcctttcattatcaatgtatatattaataaatacaaacaattaatataatcataaaacaaatatctatattagagactaaaaaaaattaagataataatattacctgcattaattattaactaattaatcaatgccaagaatagccaagataagaagaagtgtatggattaatatcagaaaataatgaaaaaagtggtatttttgcatgagaatttgtatttgtgtcatgtaagaaagaagatctacaaagtgggcatgtgaagtgattagaatcaagccacttgtcaatgcacttgatatggaacacgtgtccacatttcgatagttgactcaccacatcttccttctcaaagtcaaccaaacaaattgaacacaatgcttcttcttcttcttcttcttcttcttcaaccttcttattttgacttttcaatttcaagtcaacatatctagaaattggaagccatggctgaactgcattggtatgattattaatctcataatcattttgatcaaaattgaagaaaatgatatttttaagaagcccaataagagatttcttgagttgaagcaatgggatccaaatacaagtgtagaaaataattgtaactacacaaaatcttgattgtgaaaccactaagcatatcattttaatgtatatgtaaatattgtatatattgtataatgtactctcacaaaaatcaattttttgtaaggaaggattaatttgaatgaaagaattttgggatgttatgaataaaacaatgtgaggaagagttggccatttatagagtgaggaaattaaagacttaataatttaatgggttttgtttgttttgttttaatgaatatttaagtgtttgaaaaattaatgtagctttgcggttaataagggtgaatattaaagtaatattttatggaataacacataattataattaattaattaataattaatatgtatagtttgtttgtattataatcaaagtttgaaaagggaattagaggttagaatataaggccggcgccgaccccacattctcctaatccaaatactaattatctaattaacaataatacatttaattagatcttgtttagatcttcttcttgttgtttaattgtaaaacaaaattgtaattatagtagatatatagtaactacattaacttaattataagaattgatgcattatattgcaactagatatatattattattattataattagttaaattatatataatgaccttggcattagggtcaaatctgtttcctttaatcacttcatccttaatatattagatatatgaaagtgcttattacaactttctagggtaaataccattttggannnnnnnnnnnnnnaaagttaccaattggaccctgtgttttgttaaatgacaa

SEQ ID NO: 20860 - DNA, 7496 bp, Cannabis sativa
acttactacttagtctaatgtgaacttaatgatgaaggaagaagattattgtatatataaaacaattaatcatgatgggcttaatgtcgacgtgtgttttaattggtgcattcctagtatgtaacaaaaaagacaattatatatatagtactatataataaataattttattaatatttcaatatgtgaaggagaaattctcagcaaaaagccgatcgagtccaaatagactcaaaatacaatccgataattttgactaccaaaccatcgaagaatctaaagataaaactttgtgagctatggtaactcaaatctatattggaatgcatctaattatatataggcttcaattaatgtcaaccaaagaaaaataattaatattgtcaactaaggcacagccaaattcagctagaagtttttatctctcttcaacaaagccaaataacactatttgtgaaagttcttagccattgctgagaggaaacaaagaaagaaaaaggaaagacagagagaaagagagaagaaaagatgaattgaagaaagactgaattcattacaccgttattagagagaacaagaatatataaaagagcaacaactcactaacaaaccaaggagaagagaagaagaggttagttagagtagttatacaataacaactaactaaccaacttctataacagaattgactcttattaatattaataacactatttgacaattggtttctacttaactcaacgagttataccaaccgagagtatagaaggatatcatagaactactataaatttctttacttttagtcacgaataaaagtaaaaaagttgtgactattaatttataaattatcattcttatgttgtgattaatttcgtagctaaatgtattagttataaaaattacaatttgctatgactaaatatgatttagtcacaatatttgttgtgacttaaagttatatttagtctacgaaaaataattttttttatagtagtgaacactgcaatacccttgatggagacctataatttagtaaataaaaaaaactatatatcctagatttacaaaataagaaaatacatattaatttttaccattttaaactaatttaattactactaattattataagtcaaattatggtcaacacatgaatctttttcattgaaataatcatttatcaaatctaacattacttattataaagcttattattaactggggattagaaaaaaaacataattcttttgtattgagtttatcaaaattttttctttcaaaaaaaaaaaaaaaaaaaaaaagagtttatcaaaattttgtaagtttataatttagaatagactcatgaataaagctatagttatgatatgagaattttaaataccatattgatattgaatcacattttttttaacgagaaggatgtaaattttattaactcaaatcattcaaaataacattacataaactactcggaaacatagtagccgaatagttacaacaagcattaactatgaagctctagctaaataataagcaacacgatcacttgacaaaaagttaaaagagattattcaaactggaaagaatctgtcgacactcagagatgcagaacccgaaaacaaaaagtatatccatcgaactttggatagcttggatcgtgatcaaactgcatgactccaccaccacatcttcacgacatgtctctttcaacttgctcaaaacctctttaaccccaatagcctcgacaagaacagaatcaaccacacccatttgacttgttgtctgagttagaataagctgaccagaagagtcttgcgccacccaaccatatccatgcttattcatattgctaaagatagctgcatcgacattaattttaatcatattatcaatactactataaaaatctcatttcttgttggtttttaactcacattaaaagttttgtcgttggtttccctaaccaacgtgtgtactgtagacgcaaaaaaaaacatgtgtatttgcgaccaactgacggttgaaattattttttttgtgtctgtttataacatacacaaaaaaaaaacctcagattttaacccaaatgaacctagatctaagcacaatcaaaaataaaaataaacacaaatctcacatattacacaaatcaaaactcaaacttcaaatattactcaacataaatacaaatattacacaatatatattatatgaaaattatcatatatatataaatgcacaaatcaaatatttgtagagaagttgccactaactatcgtagctcggacagtgccccaccaatcatcgttgatttgctgacataataatggttctcatactgttatcttagattcctttaagatagttgcatttaccaacatagtggatccaatgctcattcgagaatgagagtagttagaaacccccttttcactcatatgcaaacttttctttactagttccctcgctaaatcaacagagtcacattaacttaagatccaaccaattatttacttagaatgtttttgatgcaccatgagtcatcttatttcttcctcattccattttagacacagttaactttataatcagtacagtacttgatttacttttattttaagaaaaataattttaaaattaaatgattattgttattagaaaaaaaaaagatatagagaagaaattatgtaagtttttcaaaaaaaaaaaaagaaaaaaataactaataaaatattgtagtgtgtacgtacgtattacatttcgaatcgaatgttaattaatatacacttatatcaaacatcatcaatataaagcaaagattattaaaataataaatatatgaaaaattgtaaatctatacaattgaagtataaataaaagaagatagtttaagtaattttgaaggtgatcatataagatggctgtagtgattttttatctttttttttttttttgtcttcaaaataatgatcaattaattaaatttaaacatacaagatacctttatttggtctcctcttcattgttgtaatgaattaaaataataaagccaaaactaaataataataaataaaatggtcggtgtattaattgtggaaaaccagagttagaaactgggggcgtaattatatacctaattaaatcaatttgagaggttggcattaccttttgtctagctatctagctaagctaacctcactcacaacctaatactaatacttaaactaataatactattataatattcattaaaaacataataattttctatgataatattaattaattattataattattattgggtttatgtttgttttatatgatcctgctaaataaagtcaaacaatgtcgtcacaaaataaaaaataaaagaacaacaaacaaaatcagagcattgcttaagaaacacatacaaaatcggtaatcgtatcaacttgaataatatttttttgtttcttttattaagtattttttcaacttaattatatgtagaaaatgtctgcaacttttttttcccttctcaccaaaaaataaataaattccccaaccttttttctgaagctaataatgaaataaatattcataattttattattatttattattagttttcaattttacatagggttgagtcggggtataagaatacctttaatatttgagtgttaaataagtgatgtaatgctatattttgatatttttgtaatctttctccaattacgcgttattaaatttgacatatgttatagtattgtgttaaatttgacacacaattaacacacatttttaatttatattattgtcatttaatataaatgacttattctaatatactttctaaattacaatatcatcgttatttgtaaaaaaatatttaatttattatttattattagtgatagtgctattctttttatgttaatttacattttaatttgcaatatacattggagtacaataataaaaaaatactaaatacaacatttattaaatttttgtaccaaattgaatatattttttactccatgcattgaaatggtctaatatgactatgatgtctccaatcttaatttcaaagttcatttttatcaaagtgcaaacgagccttatgggcagtgtaaactttgagaaaccactattgtatgttactccaaagtgcacataagtgtaatttattaattacggaaattttattaaaatatataagtattttaatatatactatttttaaaataaaatatttttagatttactgaccgtgaaaattaaattattggccaagaaatatcattatagtaaaagattgagttttagttgtaccgaattattttagtggttactttcgttattgggatgtttttgggtaattatttatgaccaaattatccttacctagagataatttaagaagtaagttaaggggtaaaatagccttttactaagatttatttaaatttccctttttagtattttctagtatgtgctaggctgacagaaattggaatttaatttatattaagttttaatttcataagtttaataaaaaaaggataaatcaaaacaaaacataagtcttctcccctaattttctctctctttactcgaccctaaaaagattaagacccaacgtagaaaaccctttgagttttcttcaatccatattcaagaattcagctagtattcaagctggaagagatagagacagttaaggtaagttcaatcccttgttatcttcattttcttttaaagaaagttttgggttttggagtgaatttgatgaaatagggtctgtttgagtttgtttaagttacagttggttttatggtgtttatgatgattgtttattactagttatgagttgaatttgttgttgtagttgggttgagtgagttagagtttaaagacctcaaaactcactcaacattggtgaaattatgattttgagatatttgttggttatgagtgtttaaaattgctttatttatgattttaagatgttcaacatggaaaaacggcttaccgtttttacggtaatctgtaaaaatggtcgtttttacattaacctgtaaaaacgataatgtaaaaacggtactttggaccatttttccagtgctgaacgcagaaaaatgatggaccattttggaaaaatagtggactgttttgggtgtttttagtaactatatttttgtgttttattgatatttaagctattttcgcactatttatcgataaaaatttgtttggttttaattataagtcttagaacggaattggttaagttatttactggtttactgttgtcgtgacatagggcccaaaatcgtcgagcgttgttatactaatactggcccacacacttgaatttgtattcgaggtaagaaaagtcaattataccacattgcatggctaattgaggcaatgactctcaatatgaaagagttataactctattttgaaactgttaggtttttaacttattggttgcgtcattgggcaacgatagttacattaggtgatttgttagaaacgagggttgatgaatactttataaactttcgggaatagtttgtcttattagacaactaactcagaattaatattgtgataaattgtgatgttttatgtatatatattttaagtatgtaactgttattgattactggtttatttaatcatgaaatctatatttttgtttctcgtttttcttgctaagtctttgtgactcaagggtattttgtggtgtaggtaaggaaaaagaaaagatggatcaaccatgagttagaggtctcccgaaaaatatacataccatccccttcgtcttttgtgctcagttgataggattcgtctttggtagtttttgaatatgtattaatattttgtaataaactaatacggtggtatttttgtaaaagtttataacaaagaagttcttcgatccagtaatattttgaaaaagagttttaagttatattttaagaaatagttactaaaattttaattaactcacatttcttaaatcattagtttaatattataaactaattaataaaagcacacatgtagcgcagagcgttacatgttcactttgagattaacagataaatgtctgccatttattaatatattatgaggaaataaaagtttgaatcgatgaaaattgtgagcaagcattccaaagcatatgaaaacatttatttactccctcaattttgtcaaaacttttaataggagacattctaaaattctgtaggtacctgaccgttaaatgattatccacgtgttattttctttttggcatacttaaattaattttttaaaaaaatttaacaacttgaataaatattgaggcattgtcatgtgccaattttcatacttaataacaaaatacatataaaagttctagaattataacttatgtattattaccgcaaaaaattaaagttacatatttatttacaatcgaaattatacttaaatatttatatcgcaaattattcctaaaaatataacctaattacaaaaaaaaaaaaaattctttttataaatctatagacagttcatacctagaagacaaccacatcaaagcaaaaaacttattcaaaagtatatacccatttcaatttgatcctttctttcacatttatcttttaatcaagtactaatatagctcctaaagtaatatatgaagacattagattacaaaaaaaatattaacaacttaatcaaataataacaaaaatcgttattcagatgagatttcgttatatcttacccttccctaaccaaatttccaaactttgctaaaatttcatttctgtggtcagcatcgactgagtacccacattgccacgtgtcaagccatcaacctctgagaaaatctgcatggaaatccacactagtttatgagagccaataggaggttggtgacgtgtagatttccttatccaaaacatcttcaaattccttattataacgttcgattgcaaactcagtacttcctcaaaatacataccaaagatatatcaaaacaaactaagaaaggttatagagagtaacctaagctttaacacaaaccctttatatggccacctctgctattcaacagtcggcctttgccggccagactgctctgaaacagtccaatgagctcgtcaggaaggtcggcggcggcagcagtggtggccgtgccactatgaggagaactgttaaaagtgctccccagagcatctggtatgtaattttaatcgcttacctagttactagttactagttactagctttgacttagcaaatatacatatgtgattctcttatattttcatttataatgtctccataattttttactagggtgttagtaattgtggataagggtgttgttttgataattttttagtgggacttaaagtattcttaagctttgtttgaaacttggattttggtggaaagaataagaaaaatgtatgaggaaaaaaagtggaaaataa

SEQ ID NO: 20861 - DNA, 5714 bp, Cannabis sativa
  modified_base (1202)..(1202): a, c, t, g, unknown or other
  modified_base (1302)..(1305): a, c, t, g, unknown or other
ctcaatatttaatataatttattatttttcttaaaacgaatttatttaagaactttttcatttttacacttaaaaataatttttttgtatttttacggaattctacataaaaactcttattgcaattaacgctacaacctaaattgcaataaaaaatcgtatagaaatctctattgcaactaacgctgcaaccacttagaaactcaaaccgtaaattaagaaaaaaaaattaaaaaaaatggtatatggagtaataaagaaaaataaaataagtgaacaatttaacttagttcccattaatgtaaggttgaatgaattatttgtataagccactaaggctagcttagtggtgatggaggaatgggaaaaagagagaggtcatgggttcgaacctaggatctttaagctatgaagctaatatatgattgtaaaataccattacgctatactcaaaaaaaagaatgaattatttgtattaaataaggaaatagggaaatattaggggttgttttacttggtaatttaaaagttatttttaattttttaaaatgaaaataacttttaaaaactaattgagtgtgtttggtcacattttgtataagcaatttttcgaaactcttacaaaaaaaactagaaaacatcaaatatttctttttttcaatttaattttcaaaaagaaatttttttttttttatgttcttatttacataagaaaatttaaatttatatgcatttattagattaaaattattttcctaaatttaagttaacttatattagtaaagtaggctaacattttataaagctcaattctacccttcccatttcaaatacttaaccctctctcttcctcccttatctctcttgctctctgaactcactccaaggactcaaacccacaacttaccacccacaacattggttccttctctccacgaccaccacaaccattgacccaaggacccacagacccaatgaccaccgcagacccaacgattatttcatcaaccacggcttcaccatcggcagtgttatcaaaggaataaaatttatgataaatatttgttatttgtaagtagatgttagatagggtcgacaatggccagatctgagttttgggcaaaaaactaattttttgtcaggttcgatggtggtctgatagtgatctaatggtggcctgatgccttcctgttgttaaaatnagtaaaggttgaagacgaaggtcctatggtagcctgatgatatggtccaatggtggcccgatggttgcctaatgctactttttttatgtacaaaaatatnnnnaaaaaattaaaaaaaaaatagatactatcgggccaccatcggactcccattggaccaccatcagtatagatgggaagggggagtataaatggtgaagttagaagagaaaagcagagagaagggtataatgggtatgaatataaagtgtgcttatcttttcaattttagtaagcttgtgttcaaaaatttaatatacaccaaatgtatgcatataaattcaaattttcttttacattttttctcacatacccagatcttgaagttggacctaaccttcagacgagtttagggtctgggattggggtcggggtctaggtctggggtctagaatcgtgtccaaggtgagctggattcatgtcgtggtatggtgtagaatattaaagttttttttttttacttttagtaaaaaaaaaactaaaaacaattttaaaaatatgagtcaaacaattaaatttttaaaataacaaaaatttgttttctattctcacttttaaaacacaattttaaaaactaaaaatacaggcaaacaatctctaaatcttcttctcttcttcaaaaaaagataaatctaaatgtgtttcattatctcgattcgtatataaatctagcttgtggaaatgttttgagtaaatttaaatgagaaaaaagaatttttgttgattgattaaaataaaagaagtttatataaatttatttggaatttatcatgtgagcatcactattttttcttatgcacaaaaatattcttataccttttcaattggatgagtgagacaagtgcatagagttaaagttaattataaaaaaaatattagtacttgatctattattgtttttactattttatttttctaaatcatgtttgattttttatttatttattaaaaaataaatatgaaaaaaaattaattcacgccaaaaaaaaccttacaacaactctaacactataattaggaggagaagtttgacagatcatgtcagctggcggggtaccttatgaaggtgcttgagcatttctaatggtagcatcttttaaggatgctaaaaatttatacatcatctaaaactataatattttattttatctctcttctacgtcattttcgacactcttacttctaaaaatacttcaatgcacaacactctttaaaaatatgataattattatttcacacattattatttaatatatattttaatttttagctacaataactttttagttttaattttttattaaaaaaaataaatagcatcaatgctacaatataacattcctacaaatttctagaatggcactattttctctttaatggtatagcatctcaatattttgtcacataatatatccactttactaagcatcctctaaaattttaccattagagatggaatttacaaaacttaatataataaattaactctcttttattactaagaagaaaattataattgcctacaataattaagttattaaataatatagttatatatatatatatatgaagaggtcttaatagatacattaaatatataactatgatgattacatttattttcaattattgaatcactattaaataatgttgattaatttaaaaattaaataaaaataaataataaataatttataacctgataatttattttcttataaaattttaatcaagactaattttattttaaaattaaattaattataattagtaattaattttatacaaaaaaattattttagcaattcatttttttcacttaaattattaaaattattacatatataactttataatttaaaactatttctcatataaccttatcatttatttctcaaaaaaaaaccttatcatttgtaatataataaaaataaaaataaataaattaagaatattattgcaaaactaacttataatctaagattagcctaacattcaacaaatcattatgttaatatattctaaaaatcagctacatctctattaattcacttaggagtaattcctactttttatatatatatacgataataatatcttgtatttttttggtgttgtaactctttatagtttgattattgttatatttaatttttaaaaaattaacaaaaaaataaataaataaccttgcaactttaaccaagatttataaatgtcgcgaatgagttaaaagattcttcttgagggctccatggcacctatagaggactggaaaacattatcaaccatttggtgccgggactcacacacccaagtgtgccgaaactaaagtttatgggccggcgcgagtgttttcaccctagagactcaatctaccaaagaaaccaacaaaaactttactcatttgggcatgaaaaggcttagatttgtacataaagttaaaatggcataagaccccatggaataaagcctatgcgcccactgccatatgaagatggaaatgctctctaatttttggagaataatcgaaaaatatttagcacaagcaaaataagaaattgagctttagcttttttttaatagtgaaatcagacttgttttggttgatgtccaatactaacttagagaatcagccttaaaagaatgagctcccaagcataaatggctccctataatacataagagatatgaagttctctaaatgtagggagctctcctttttcgctaatttttttagtaatattttaatctaaaacactactattttttattattttattgaattaatttatatttgacaaatttaaatataaaatattattaaaatagttaaatattttaagcatggagctaaaataataaaaatattactctattttaattttttagctaaaatagctaaaaaatttgtccatgagacttgaagaagactataatgtccaatggtcatagcatagccaaactaatctaatctattgataatctatttgttttctaatctatttgcctactaagaccacattaataataaggaaaaagtaatatatgtatattgtataggatatataatagatagaatattatattctccttgcttccactctaagtaacttgaaaggatgatctaaagtccaaaactattatattatacctataaccattatttccaagcaacatcatgtgactattatttgtctatgtgcatataaatacgaagaaatcataaaacttctttactctataatatctttcacctccttgcatcatattttacagatctcaacaaatcttataatttcccacaacttttttagtttctcaaatcaaaaaatatgcaggaaagtgcttacaactcagatcatggaacttgtacagaaggtggtgatggtttctcaaagatatcttccatcaatcttagacctttggatctttctgacatagatgctttcatggtatgggccacagacaaaaaggtgcctattttttgcacttgggaacctttcaccagcaaagaagatggcataaactacatcagagataaggtgatccctcacccctggttcagggcaatctgtattgacaataccccaattggctatgttttggtgacacccaattcgggcaatgatcaatgtagagcagaaatcggttatggtttggggtccaagtattggggtaaaggaattgcaaccatggctgtgaaaatagttgctgagaccatattcaaagagtggccacatttggagaggattgaagctttggtagatgtggaaaatataggttctcatagggttcttgagaaagctgggtttcaaagagaagggattcttaggaagtacttcttgctcaagggaaattgtagagacatgataatgtttagtttcctttctaccgattctaacactttactatagtttgttctatcatgtagttttttttttagtgaagttaaaatttagtttataataaagaagccaatcaaaggacttggattgggttttgaagccacaaaatgtctctttattgatcacaaacattacattacataaacaataatcagagtcacagaatcttatctgttgataagaagctatacataaacatatctctaatttgacccttacagaagccatattttctctacatcccttcttttaagaacccaaccttttctagtaccctttgtgaagcactattctcaacctcaactaaagcctcaagcctcaccaaaccaggaaactcattaaacaccaaagtgatagccatctttactgccgtagtgacaataccctggccccagtagtctgctcccacagcatagctaaggtgtgcctggcatttgttgtcaccggactctggcttgactgagacatagccgatgcaacggtcatccgaacatatcacccaatattatagtctaacaatagcaaccttctcaatgtacgtcaaggcttcttctttagatgttatggt

SEQ ID NO: 20862 - DNA, 1606 bp, Cannabis sativa
taactttttttcattagtctgttctaaattgttgatttgtctacatttaggattttggcagaatacttgggttctgatcaaatgctagctgttgtagctagatctttcgaaactgctattcttcttgaaaaacataaacaaactggagatgttaattgcagccatgttaatcatgaagaagctcctgttcttggccaatctataaatggtcgatttattgttatatgctttgacaatataaggtgacattcaactccaaaacttctcttcttttgtcaagttatttagatgatttactaaaaggattgactctatctaagcagtccatttagaggtagcttgaagagtggttctcagagaaagctggatttacaacgcccttatttgaacgatggaactattccaaaaggttttctcggatttgctgtgaatatgattgactttgatgcagaccagctatccattaagaatagttcaggccatggtcttagagagactgtattttatcaccttcttggtgaactccatctttacagaaccttggaggacatgctagctgctcgtgcttgtataaaacaaggcgctatatcgcttgatggtggaatattgagaggagacagtgtgatatcttttggatctaggtgtgtttctctattcatgtctttttcatcctcacttgtgggaatgttttttgttgaaatgattggtttttctatgattgttcttagtgatcctggagtgtgctttcaagttgtgcaaacaatcaatgaaatgccaagttctcaagaaaatttgaaacagcttaaagagaagaaatctgagttgagaacaatcaatgatgagatagaagtagagaagggaaaactcaacaaagttttagacaagtttcatgagagaaaagcagagtttaacaagtttatgaagttagtggaatctccatacaaactatgaggccacactgaaatagtttttacaatatgatgacaaatcaagtcataatttttctccaccgttttgagatttgcttttttgtccttcatcatttctctgatggagaaaaaaaaaagaatgtgttctaaatgtatttttgggtgtatatatatatatatgtgtattgttattgagtattagtggtgcttggcattttctataggtggcgttctataattagttagcgatattttctgaaatcaatggtaatatgacatcagtagggatgatatttaatgttgaagtgtaactatgtattttttatctttttgatagtttctttggctttaaaaccacatctgaattcttatatatctaatttagtaaaaagtaggaggatgtaaatgttatataacttggatcttcagctactgtctatttttctctttatctccaaacaaaattgaaatatataaattctcatagtgattctaatggggttttcattttttaaaaaaaaaaaaaagtgttaattatatgggttgttattaaaaggccttctcttttaaaattagttctgtttttcccttctgtttttttttaactttgatttggtactttctacttttcctactcataagacaacttaagctattgtcatataacctaagctcat

SEQ ID NO: 20863 - DNA, 2135 bp, Cannabis sativa
tatggactctggtacgcttccgctattctttaatcttattgtttgattctcttgaattaattaaggctatatacagatttacagtatttttaacattaccctgatggtgggtcttttagctccgcctattgccgaagctatcactatgttagttgggttgcaattgtgttctcgtacgtcttggatatcgtaatattgagacggagatggatcaagttgttacaaaattcgtgataaaaagagaggcttgtctggtagattacggttcggttttacaaaatatttatttaatttgtgataagctttgagtttttgtttacaaactatatagctcataatcttatcaaacttgttctctttctcttgatggccacttaaatttatgtaagtcttcccacctattttaacattggcctaataataattatctttcatttgaaaaaaaaaaataattataatagtgagatataaggtaagaaacaaatgaagtaaagttcttggtgaattctaaactagccctactgtacaagctgtagtagtgttttttttttctgaatgaaaaagttgtagtagtacgtagttgaaatacgtggacaagaaagaaagtcctcttatttgtttgagaaatatctttatgtttttatttgtatacaccaaaaataaataagagattaagtgtatacaaataaaaatgtaagaggttttgtcagtaatttttttaatattttttagttaagacttctgtgaactcattgaaggacacgaagtagctgaaatatgtggacaagagagaaagtcactctgtacgatcgaacacattgaaggaaggacccgagagaattaaacatattaaatataagcgcattaattttggtctcattataagaaatcagtacgcgttttgtttttttctaaaatgaaaccctgacattataagcatctaattaaccgggtaggtacggtacctactacctttatttaggtatgtcaaaaagatcaattgagattcacctctaaaacattcagatacttattgaattttggatcagattcgttccgcccgagcgaacccacatataaaggtgggcaatcgcctttgaacaaaaagaataaatttttttaaattagttacaatatatatttgtaataaaaaatagcatttgtaagtataatattaattttggtgtaatagttaacctatttaacatacagtttagaggaccagagttttaatcctaccaaaaatatttttttcctttttaagtttatttttgtcccccctcacttattaaaaaaaattacgttcccctcactttaaatcctaggcccgccactgccttgtagtaagaagatttcttataagttttgaatggttggtgcttagaggtgaggacaagtaggtggtgttgattataattgtttttgactcaaataaaacttgattttatttggacatctccaatcttcaaacttaaatttagtgttaaaataacactaaaaaagtataattttaatattaataattttttttattccaatcacaacactaaaatttattttttattattatattattttattaaactatctctcattataatatgtatataaacataaaaatttaatcataaacacattattttaatattaaaaactaagaaaaaaaatttaatgtagtctatagtgtcccactatttttagtgacactatagactctcacatatgtaggatgacatttagagttttattggaataattttgtatctaaactctactatttttgagattttagtgtcccattagataaatcgtcagaaaaccacttaatatcgagatgtaagttggtgttgactaaaatatgacatactaggcaactaaaccgcactttgtgcggtcttgtgattttttttttttatgaaataaattagtttataatattaataaaaatttaaatgcataaattatttattttaaagaacgtgattgactaattaatattataagttataatatgtaaaagataattttaacaaaataatatattattgttgaccgaggttttcggcaactaataaaatatgaatataataatgagctataagaaagcgagatgaagactttttacgtggttgggg

SEQ ID NO: 20864 - DNA, 2686 bp, Cannabis sativa
ttaccatttattcttaatatgatatttcttagctgcgagtttatgctaaacatactttacttttcaactttatccagatataagattgctcaaaaggtttgttttttcggcatataattgaaaacctttttatgagcacttcccatgtttttatcttctttttgtttccctttcatgaaaattgtgctgaatgaacgtaacttttggttcgcaggttgcgggtttagctgttgtttgtgttatatgtttcacctctagtgcttttgtggctctcttaaccgatattcctgtaagttcttatccatagtgagtgtaatgacattcatttttctttcaaacatctaactcggtgtaatagatctctcgtgacgttcatttctcaaattcttttcttaattgcagatgctttatcactggcatgaccaagaagtaaatggtgtttgtatatttcttctaatcgtgtattacttcgtaggtaagtaatgctaactaagcctccaaattcagttaacgagttgatcgtattcttctctcttcttgaaagaattagagcataggcattgcattgatatcaaagagaaaattacgaagttccaaactcttcgagactgtttggtttctcccggaaagtgttttactttcttttaacacataaattctcactgatattcttgcaagttttaagataggactagcctttatatagactcagccactaactataaagcaataacagtattctaactaaagaacgaaacatccgaccctataggaactaagctgaactaactaacttgtgactcatatatttgagctctaacaatgactagttatgaaattaagttcactattatatatatattctcttgagatttcgatttgggttgttttaatccttaaaaattctcaagatctctattccaatcaacagggtttgcatcaggttttagtctccttaacacccctaatgattacttggtattaagcactgattagctaagtcagatgcaaatgtggttgttgataacaatcaaaagaaatgatttttttctcttgggagaagtggtaaattgagctccctttgttaatttgttttatttgctttattgtgcttttaggttcatcaatgccctcagcctttttattatgggtcatgagagaagtaccgccattaataacagcttatgtacaaccagaatcagctacattaactttcgtaagcgatactacagcagcaataccaaatcctcatcactggactaccgcgccaagtgttagaaatcaggtctgcattatttctttcatgtctataccatattcacatcctctcataacccaatacatgtttttttataaacattatttgcatgaacattggccatggttttatataattttatggatgggaagcttagaagatcatgtctcagttctggttattaggggtagcagtcctttgtttttattttttcaactttagaaatcaatcgaacgggtaaggccaaggtaagaaaacgtgcagtctaaagattatcgaaggtgggttcggtttccttttatataatgggtccgattaccccttcttccaaatgtttttttccttttaacaaagaccagttactcattgatgaaaatatggagtacaaaggtcataatagatagtagaatttcttccaaccaaataaccttgttttcttcgaaatgatgtttagtctagtcaaagtaaccgaattattgtatactaatgattatttaaactgaaaggtaaatatcattttagaccatgtgttttgcaaaagttactaattagactctctattttgttaaatgataaaacggattctatattttccaaaatagtaaaaataagaccatgagctcaattttcaaaaaaaaaaaatattttttaatataaccaactttaagacaatgtctaacatgaacagatagaaaaaatgtaatcagttctttcataacatccctagatcagattaatattaatttttattttgacgaaaaatcagttcagggtcctatttgtataattttagaaaatacaggatctattttatcatttaacaaaatagatggtctaattggtaacttttgcaaaacacatggtctaaactctaaaatagtatttaactgaaagacattagcagaaatgaaacttcattatagagtagtgtcctgcttaggtctagaaaaaagaagaccaaaccgaaaacaggatcagacaatagagatatcttgtgtttataaaagaaatacatttttgctgaaatttgaacatttactctttggttttgatctgcagatatcaagagcaagtcctatataacttaacatctctatgcaaatcaagttctgttgtttttttctgccccaaaaattgatataaggatatatatggccaagatctgcatatgtggattgtgggcactggatttggtgagatcacagcttgaggaacttggacaattatgatgagatcaaagaaggaggcggctgctgctaccgagtcacacacaaatccttaacgggcacttggagtcgagccgtaaggttgccaatgccatggttccttttttaacattttgtccatgtacatataataacttgcacaatgataaatcttctaactttataaaaatgtttctgtttagcaatgagagaatagaaacat

SEQ ID NO: 20865 - DNA, 6105 bp, Cannabis sativa
cattaatttattacaggcatatgagaatggaaagactacaatgtctattcaagaaaggaaagcaactctaaaagagttttacagttaagtatagatgaagaatcagtatttggacataattacatattactttatatatacaaatatagtatgtttaattttattagcaacactttcttctgtcctcaagaacaggtgtcatatttccttctttattgcaacttgaaaagggaatcacagaagtagaagaaagaaaacagaaggaaatgtgtgcctctaagtacaagaaaaaagatgaattccacaaaggaaaggtgtccgaaatcgaggccgaaagagaagaagaatgtggtatttgcatggagatgagcagcaaggtcgttttgcccaaatgcagccattcaatgtgtatgaaatgctaccgagattggtatgtaaaaaacactaaacaacatctcacctttatatacttttctctatatacagtgagtgaccattgaccaaccaagcatgtggacaaaataaatgaaacaaacatatggtcaaaactttcccatatttgttgtcccatatgcttgttttggttgattaatgcattaagatatatacaacatagaatgctgtactttttttctttagttttagtttaatgtatacttttatagaagactacacttatgttaagtgtaaaagaagattaaatagtgtaagtttcatgtgtaggcgaacacgctcagaatcgtgtcccttctgccgggacagcctcaaaagggtcaattcatgtgacctttggatctacacaagttccactgatattattgacttgtcttcaatctctagagaaaatctcatgaggctcctcaagtacattgataagctacctcttattgttcctgatccagcttttgtgtcctgtgatccacaacgatgagaagtagaagcctttcttcacagcatcatattctactaccaagatttgtgttgggatataatttgtaagtagataatatctggttggttggttgattgtatataattcttgaaactttcaaaagggtacattttgaaaggtgtaaatatgtgttcttttttattttactggctctttctcattctgtcattggaatattttacttttttagctcaattgtttgattaatttttttgttaatagaaaaatgagagatgatattgtgacatttcggctgcttttctagattgatttcccatgagatagttctgtttagtcttgtccagataagacttttaactttattttttattttgttttttagataagaccaacttaaacagcataataataaatgacttttcaaggtggtattgattctgaagagtttaaaaccagctaaaaagaataaaattacctttttagacattggaataagtaatgaaaagaaaacagtataagagttactgtagtaactagtaagggttttgtggtgctcgtcagaagcattatattctctctaatatcatttgcaattaatcattcaattctgcttaaaaaatatttcaacagttcaaaaaaatttacacaacgtttgttttcctttccaagctttttcccaaaattcaatcgaagatgttaataattacattaattagattatgtttacagccatttaatatttgtctattggaaaaaataggtgtaataagaagttgcacacccacaggtcccacacattagagatagcctaggtatgagtaagaatcattacggtgaaaaaaaaagtaaagaatcaagtgcctataaacatagtaattattaggtaaaaaaaaatgtaatgaaatctttgagcatacatatgcagagatatttctttactttttagattagctaatttaccatgtaaatatataaactagcaaagaaagctgcctttgtttatacacacactaaagtaaggataatcaaggcagtaaaaccaaccacatgttctttgcttcaaaaggttaccataaggcaagctaagaaccaaaatatatggacatataaaagatagcatcttgttcttggaatattaaccatccatgctcagaacgtgtatgatttcattcatcgtcgtcctcctcctcctcgtcttcatcttcatcttcttcctcctctggaggtgcttcctggttaaccatggagtaaactcaaaaatcaactatatgcttaaagccaattcatgttaagtcataaatgcataaattgcagcatatataattagtatcacctctccacttgcctcatcttcatcatggacttcagactttgacctatctgactcctcatcgccatcgtctgccataccctcctgttatcaaacaagcagagtcaagattaataataattccaaaaatgaaagttgaaccttaaataaaaaccagtaattagaatgaacagacgaacctgtttcttattgtaggtcttcatttgcttttcataatcgaccttccttttggcagccttagcttcataaggagctttatcctgtaaagaacaatcacaaaaaggatcaataataagaaagtaaacaactgcagctgttcaagcatttgtattactattacaaaagcttaaagtgcttaaattgaaagtgggaaacaacaaaactcagaacacttacagccggagtcaatgatttccatctctctccaccagcttttccaaccttcaggtaaacatgtacagggatgagtatcaattttccataaatcaaaatatttttctttcagaagaacaagtaacagccatatacttacagctgatacagccttcacattcgggttatctctcttgaactctttcctgaattcctcactatatcaccacaataagtttcatggtcaaataaatcaataaaagttagcaaaattcaatacttttcaaagaaacatatttgagagagatagatggtcaaacaggaaaacaaagaaggcactaggtggcctcttgggtttgttggggtccttcttggctttcttttccatctttgcctttcgtttgctgctcttgtcagcttggacagcagtagcctttctcttcccaactactctgaaaaagaaaaaagatatatttgatcggtcacaacaatattccagggttttctacaacatcagatataattaagccagccctctcaacagtagccatgaacatatccataaatacagagctacaaaagatatactcttagtctcttttacatggttgcgtaataagtaaaataatctaaactaaccaaattaaaacaagcaaagaaaaaataaataaatgaaacaattgaactaacctgtcatccacaggtttcaaagcatcccttgaactttttggtgcccccttacccttgacaaccttcattataatttttttttggacctgtttaaaaagaaactgtaatttatcattcaaatctcagctataatatttgtacagtacatgcaaaatatacataataagttcattctatagtcagttttccctttacatattacgaaacaaggaccaaaaagttcatgacattaggtcaacaaaccaaataagtcaactcaaaaacaggaaggaacaaccataggcacttttgacctcttacaacatcatcaggatgagttgacaataattcctatgcagattttaaacacacatatgtatatttatagaaaaattaaattatatacaagatgtttagtgatgataacactaaaaaaatgaataaataaataaatcaataacggcaccataaacaaatgcagaggagcaagaatctaaactctatgacccatagctatattgaattaaaatagtatcaatttccaagtctgtattcgtctattattttcaataaataattaaattaccgtgaattttaaacataattaattattattccaaaaacataaaataaatactaaaaatttaaacaaccacaaaaactacggagtttgaataaataaaacctaaacacgtaccacagaagaagaagacgaagaaaaacaatgatattgactcgagtttcatagaaccaagatatccacacaaataataataaataaaaagtacgccattgtttaaacctttaatttatctgtgttcgtgagattttctaggtaaccaaacaaaggtagaacgataaggagaagaagaaaagaaggggtttacctgtgaagcgaaagagaaagcaaagagaatcaaaggcgatcgaagaaccaaacaaaaagaaagagagttacacgaccgaaagaagaaagaagagagagaaattggggttaaccggcttagccggtaacactaagaatcggttatgagcaacacgagtcggtgtgtaccaacgtggttttaccggtattagccggtgtccgaggttttcaaaattataaattaattaactaattaataatattattttgaggaggagaataaaataaaaacaaaaaaatatataattataatttataattagtggagtggggcaaaaaggaaattatgatgattattgccgccaagttatcccatataggcgaagacaacttaggtatttgtgtcccaccccaccttatgacacgtgtcatttcctctgtttcccaccttcatctacttatagttgactggcttttgactttttcctgaactcaaagtcttttgaattagactctcatgatcatttaagtagttttttatattattttttatagtaatttattatttttttttaatttttatttaaaaattaatttaaatataccaacaaaaaaaataacacgtgcttgaagcataagtattttccgcagacttcaatcttggaggctaaggattatcatggatcgtctcatctgtggtctagtctcatttggggtctcgagctgttaaaaacggggatgaggaaggttgtgggggatgggcggagtattcaggcgtttcgtgatccttggataccccagcctagaacgtttcgaccaattacagctgcaccgagtggtagtgtgatggttcaagagttgattgatgggtctggggcttgggatcttaatgccttatcccattatttcttacggttggatatcgatgccatcctcagcatcccgttgcgcaatgggggatgtgaggatcagtggtgttgacattacacttccaacgggtgctatacggtgaagagtgggtatgtcgttgcgcttgatgtggcgactgaaagaaatggtgggttttcggtgaatcaagcttcttggtggaacgacctgtggaagttaaagataccacagaaggtcaaaatctttctctggcgaatgtatcatcgagctctcccgaccaattcccaacttatcaagcgtaatattccagttcaaccaatttgccacagatatggtgaggccatggagactccgaaacatgcgttagtgttttgctcttccttacttcccatctggtcagagcttcgggtttggagtcagttcaatcggtgtaggaatggcccgttggcagagctgctggtttgcttattttcgatgattgagcagagtaaatttgagttgttgggatggtttggtggtgggtgtggtatgatagaaactccgttttgtttaggaagaaacaatcaagacaagaactgatagtggagttagcaaaggatgtgttggaggagttccaaggggcatcagggcgttctattggtcgggttaggtggccctcgcggtgatgtttccggggtgggtgatggggttgttggggggtgttgggacgagccgagcgagggggcggtttggtatgcccgactcggtggtgtccgccggagatgggtgagttcgtgttatcggttgatgctgcggtcacgtcgggaagagggtttgctaggtttggtggggtgattcgtgggggtaagggtgtggtgtgggcggcatgggccgagggaggggtcggggattatcaggtggtagtagcggagctccttgcggtgcgtacgggtcttttatgggcggccagattggggtataacttggtgcgggttgagacggattcctctgttgttagctcttggataaattgtcctaattctattattatgtttaaaccaattgttgaggagattaattctcttttag

SEQ ID NO: 20866 - DNA, 3148 bp, Cannabis sativa
  modified_base (36)..(71): a, c, t, g, unknown or other
catgcaacataaaatgcgatttttgatctttattannnnnnnnnnnnnnnnnnnnnnnnnnnnnnnnnnnntagggcacaaaacccaaaaaatacatctcaagagattctagaataccatacgaagagaagactctggttgaccatagataccaaaaaaaatgccacgacaacaccctttccttgaaaataagaacactaatatggccacgtgaaaatccaagtagcataaaatcaatattatctttccaaaacaaacacaatcccccactacgacccaccttctcaaccattaactttccaacgaagcataagttgatctgcaaaagttccatctatgccacagtactaagagttttagaaaaaaaaaaaagaatatcaggattaacctctcaaacattggcgttgagaactcgaaacgtcctattattgcccacacctagtacgttgcatgccaacacatttatattaattggctgccctccaaagcaggcaccaccaagctatcagagacaaccccactgtccaagttcttcttgataggtgccacaaaaaaactatcaaaaacttttgcatcacatacactagccgtcgcatcaccgacctcgtccaccaaaaaccccaaaaaagaaatccatccgttcctgagaaacaccactctcacaagccaatcttttagctaatttaattgaggaataagtaacataagcccaactggaccaagagatttatcctaaactttagccttagaaccattaacaaccataatactcaccttgaccttagaaatcgagcttctttttcccatcttaacaccttcaccaagtaaagaagctgatagaactctcctcttgacacacactactcaccttggccttagaaaccgagcttctttttcccatcttaacaccttcaccaagtaaagaagctggtagaactctcctcttgacacacacaacaggcagccaattaccatacttagccttaaaaccattgatcttggtcaaacgaagttccttaagagtcgtcactgcatgcacagagaatgtaggaggagctagggtggaagaagaagcctcatctagaggcatgtgacttttaaaaagtgacctgtgatgagaagaaagaatgggccaagaagaagtagagcacgacccaatagcaggatctttcaaagtttcaaaaatactaactttttgagactaaaagtttcctcatccttattttatgcctaaggtgtgcctaaattcgcatgagtagataataaattatctagaacaagggtttacttaaattagaatgagaaatatttttagcatttatatttaaattgtcatttttgccattacaagaaatatgtaatttattattaattgctaaatttatctccttatcaaaattattcaccaagaaagatggtgattagtgttgaggttttgactttcctttattaatttccaatttcaccaaatcagataccaatgaggaggaaacatcaatatccttaccacttttttcattaacaatcacaaaaataggaggtgattttgaccacatatgtggagatttaccttttttggaaaatccaatcgagcttcctccacaagaaaaatgcatggaattctaacaaccagccaccagtcgtgaagaaccactactgttgttacccacaacctgacattattacgatgaggtaccacccttctccataccaaacgcacgagataccttctcgacatccatacgagacctttttgatgtaataaacatggatagggtttgcccaaataaaatttccatacttccttttatgaccacacgaaagtgaagctggtaaagaaatgcattcccgcaaagggtttctaataatatcacaacaaaaatagagatcgggggacgctcatattttagagtaaatttagactttttctttcccttaatcaaactaactttcatttgtttaggaagaaattttgtaatatcaatttcaaattggacacacgtaaaagactcccaaaatagtctttcaatgagtgctcatcaacctgtattaccgggccaaggaggcccccttattccattcccatctccacaatcatacaaaagataggaacaagatgaatttgaactcagaatttgactctatcaaaggccaaagagttataatcacccacacatgaagggacttccaaagccaaaaattgatgttccaataaccacgctccatcactgaaaacctatcgtttatccctaaggtccaataatctaaacaaaaatatattatttcccaaggccttgacagtcgtcaaaccattaattttccaaaaagcctcaataaattgcaacatgtgctcgcccgagacaacttttgaagaattcagctttcccaccaaagttcacccaacactactttgtccaacgtcaatgaaagccgccttaaaattacccttggaaaaataatcatcacaatcaaaagaatcattcaaagctacccattcatcacgatccatggcgagtaaaaagcccttcaatagccaaacctcaaaccactagtattgacctcaaaaagttgatcaaccgacagcggtattgtatggatctgatgcttgccatgtgttacacaaataagaataaacagtaaaaaatacaaagatttgttatagaggttcggcccccttatgatagcaggtaatgacctactccccttttggttgtattgatacctagagataatactatttagatcgttataggtggaatctgatatagctctctataaggatacaaagtatgaatcaagtaggcagatctctaatgagagagatgaacaacctcagaggcgtgtgaaagatgaagtgagaagagagaaagagccatattgggcgtgagctaaagagagagagaagagagagactatggctttcaaacttagagctatttggaggctaagtgacttagaggccacttaggtttctaggctagggttaaggcctttatataggaggcctaaaccattgattacaagtttaaatcctagatatttacataggtttttagataattacaaaagactaaagtgccttggatatcgatattattcagccattttgttcagcttttagggtccaatttgcagcccatgccttgtg

SEQ ID NO: 20867 - DNA, 2810 bp, Cannabis sativa
ggcataaaacccaacaattagatggttgtggaacgtgttggtatattgatccatctcccactaatatggattagtcattgcctctcgctccatgcctcgagcttcttgaactatcttatctacattgtcaataatcatttactttgcgaatatacttgctttagccatggtagaaactggaaaaaaaggaaaaaaaaaaacaaagcagttaatgccccacactaacaaataatagcaagggtatgggagagtcctccccgataactacttggagaggtccccaccagacctagcatccagaaacaagttcttcggggaatattacctcgagatgatgagatcaagaacacaagaatatgaaataaagtctcacaaaatggatcatctgacaccgtaagggtcccaaacagaggaaagtacagtattcacagagcctatgtaatcctactgtagggcaaagtttctaaacttctccactctagtcaacctataagtttcactgacaagcaaatgtcctaaacaccgcccatcaagacagagcatgcaatagaagtccatataaaccttaaacggcatggctagtcaccgacaatttctactctaaatgtaatgacttcgagaaagattaaattgcaaacgtgaagttaaagatacttacgaacaaaaattatagcttagggtatttgattatggagtttgagcctcacctaaaaatctcgaacacgccccaataattcatcaacttttgcttggaaatccaacgagcttgatggctctgaaggatcaatggtgaaaactgggggtggtgcatatgggtgtagccttgatcatactcgaagaagaaggtggagaatcttggttgtaatgtaggacattcattggaaaaactttaggggtttacacttggccaattttctctctcgagaaaatttaaactcaaagggttgaaatggcaaaggtggtaactagtcgtccctcgccttatttatacatcaaatcggcaatccacgtgctttcaaaatctgacgatccatatcacattccaaaaaatacaaagagatctaatggtctgggtatacagagggctcccatttaatgttgtgtatgggattgaggtcaattaatgatgacactttccttggaaatcccactaacataaactagttgtcatctcacatccccaagatctaagtgctttctcgaaacacgtaattagcacagaccaagggattcacgacatgtgtgtcctactctaggaagatgaaaggatcacgagcatctaccacttacttccttggaagcctaaatggttacacgtgttcatggttccacattcagtaatgaattcagaagtaggctacaagcctccgcaactctcgagccatgaaggcttgggggtaaatgttatttgggtttctggcttaatgaaatttatacttccaaggcctaatattatcctagactggcccattcctaggcccaatcaagttaacaaagcaacccacagtgaagtcagactacggcttaggatttggatgcaagcccaacatataaacgcaacaaggtcagaccactttggtccatgaaagactatctacctagaagctgaaaggtccatcaagacaggcctgaatatcctcatggagtaatccggaatgggaaactaaagagacatccgaaagcctttggataccatcctacatgacatcctccaaacacagggtcccactgtgtcagggattcatcccctatgtcaggcctaagaagtacgcataccaccaaaaagaagccacctttttgtccaatgccatattctttgacattctcaggaccaatatggttgtgcacgacacttgtcatcaccaaacggtccccactcctatggatgaccattacctaatgaattgggcctcgcctaactggcccaaagtcaatatcaattgtattttaccccattagtggacctacttgatacatgaaaatcctactgggtccgggttcacccaaacccgactctagcctataaatagaacattcttccttcaagcaaaggattagaaaatcatttttgctaccaagggctaagaattagggttctcaaactttgacaagagtacttgtgtaaagatattttgaagtttttctaactcaataatattgactcatggattaaggctcattaatgccccaaccacataaaaatcattgtttatccttctttattttacttctttcttaagcttatttattttataatcgatttccaaaaatctctacaaacaaataaaaatacaattttacttttaccttaattaaacaattttgtaaaatagttatttaactaaaactaaaggtagaaatcaatatctatggccatcctacaaaaactattgggacaatataattttattatgttaattcatgcccaaagttcttaaattaaaatatctttttaattttaccatagttaaataattaaactaaatagttaattaactaaattaaatgggttaaatcacttgtatagccaaataccaccaagtattgggccatactgatttttccattttaacttaagtactatgaacttaaattgtatgccatacttaaacaactttgtcatttactaaactctttctcattttcttttctcttataaatttcactacttagtaagaacttgtgaaattgtccaattcaagttttccaattctaattgataattaaatttgttgaccttgcttttagccaacgacaatgagtcttatttagtaagcgataagtgatttatagaaatcaatatatagtaa

SEQ ID NO: 20868 - DNA, 2906 bp, Cannabis sativa
tacaggattgagaatgagcacctaaacaatgtaggaaagtacagagctgtaaagactgttcccttaccattccgagagactgattcggatggctgagtgatcattgtgttctgttgtatacactaaacaacatatacacccggggatgagaaaagcaaagcaaagccaagcagatcaggcagagagttggagttagatccgcattttgttatttgtaaggtgtggactgcatgtggacttccctctgccactcccatgatcctatcattactacaacttctactattcatctcaacctatgaatcaacagctagcagcagcagcgccaactgtaatgtagcaaacaagcgtcgctcctataccaatacctctcctttctgttctctcttgatttgtacatttttagtatttttaacattaataatttgctgctgctaatgctaatcaatatgtactatatatatacaattctaaacttatgctacttcttcttaaacttattctctttccatttaagtaaagaaatcgtttgcatgaatcaatctttaattctgatgctatcaagaatcatgaatcatgtaaacatcaaataatactaaatctttattataacacatgaaatcatcactaaaagcattcatcaataaatgataataagagtaatacgatgataacgaatcctcatgacttatcaaataaatagtttacagatctgtttttgttctggtcaaagattgagcaattttcttggagagacaataggcagttgactgaatagtgatcatgggattgacaccaatggcactaggaagaacactagcatcacaaacaaacaatccctctgcttcccagctctgtccattctcatccacagctccttgtttttcattgatccccattctgcaactcccaagctgatgagcagaaccatagttagtccatttctcctccattgacataggccctttagcggcataaacagagtccaaaaactcctccaactcactctcactaatcccttcacacttcaatctctgcccatcactcctatgagtcccaacttccactgctccagcagccacaagaatcctcaaagcccgtctcaacccaactgtcatgttagccctgtctccatcatccaactcatagctcaatctcccttccttcttcaccactcccgacccgcggtctctgatgatggtgatgaaatgggcagtcctagagtacttaatcatcttattcttcaagtcagctccagagatccacggaccaattgaagcaaacgcacctggccccaaagcaggagtttctattatagccttaacattattatggctaccaccaccatcatcaccatcagagccaaacactttgtggactgaagtaattattcctccttcatagttcttccctgtgaattctgaattggattcggggaagtaaccccatgccattaaaacagggtggaggtgaaggtttcttccaatgttcttgttcttcaaaccactattgatcatcaatggtggagtgtagagagctccacaggctaaaattgtgacttttgcctcaattcgaatcattcttttgaccccatcacccacacttctggccattactcccaaacacttgttctttcttccacttctactgatgccgttgtttttctccaatataagcctctcggctttacaaccagtgagcaaaacagcaccgttttcaacggcatcgacgagccaagtggaatcagtacccttcttgtcccctgttgggcagccataggcacaagacccacagtaatgatcctccgagctatttctggggacgaactcaacatccagacccagattcttgcacccttttctcagaacttgattctgaaacccttcttccttacatttatcggtcactccaagtctttcgcagacagaatccatggccgaaacgtactcctcgctcccaaaaagactcaatttttcgtcctcgctccattctttgagaactgatttcggggttcgaatcgaagccgaccaattgatgagtgagccaccgccgacggcggttccagccatgattgccacggttccgtctaaggtgccgaaagtaacgccgtattcgtacatgtgatcggaggagggaccttcgagggaggagaaatctgagggagcaaaatagttacccttctcgaggacgatgaccctttggccagattgggcgaggagtgcggcggcgactcctccaccgcagccggagccaagaacgagaacgtcgcatctaatgttgtagatgttttggtggagaacgacgtcatttaggcctttttgggaaagggcgttgagaaaagttgtgtcgttttcgtaaatggtttggactgttgctttgtccaatggtctaataatagtcacttcctctttttttgatttgtgtactttgtatccaattgctttccatgttggattctctccattttcatcaacctgaaatcaaattttttatctttcaattaatttaattcatttatataattccaaaacatagcaatttaattgaatagtaattttttataatattgaagaacattgtcccaaatggattaaatgtaaaagtattgagctatatataaagaatatggactactccatttattagcaattggttttgagatggaacccatgattctcaacatacaaatattacataataccatttttcaatgagcaatgggaataagtattagttattccttcaactttgtttagacatctaaaaattgtgctatattgagcacattttattgcaaaattatgatatgaaatttaatatctaattaatgttttattaaaaaaaatctaataactttataatcaatttaattattattttaatatgtaagacaataaaaaaataat

SEQ ID NO: 20869 - DNA, 4182 bp, Cannabis sativa
acttctaaattgataactaatcaaattgtaatgagttttatttagggcataaaacccaacagggttgagttcgatattgaggatgagagggagggaaggaaatggaagtgtggtcgaaagggagctattaatgatggaggtgcagcttcggttgaaggggacacgttggtggagatggtggatacagggcgatttatgctgggttatggaagggaagtgcaaggggacgggcaccacagtaaggagtctcggaagagagtttcgattaaaaataaggctcgggcaaaagctaaaatgggtggatcgcaagcgggttgtcttgtccctgagaagaagaagatggaggcaggtgcggttggactatccgaagctggttttgtagatgggaatgaaggagacagagtttgtgatactaactcggaggtaggtgtttctaattttttggatttatcttcctcttttactgaaattgaagtggcgagccttgttaatcaaggccgccgagtgaaatgaaacttttaagttggaatgttcaggggattgggaacccctggacgttgcaatcccatgtgcgtgatattggtccgagtctaattttcttagctgaaagtaagttaaaccgggctcaagctgaaagggtgtgtagtgttcttcaatatgagaatttgtggacagtagatagagtcggattaagtggtgggttgttgttaatgtggaaagttgatattcaggtgcaagatttgtccagttcacctggacatatacttgctactgttgcagggagcgggttttcgccatggtttttcactagattttatggtaatcctgaagcttgccaacgtcggttttcctggcagcttttacgggatttgaggaaggaagtgcaagggccatggctctatatcagggactttaaggaaatcgccagtttctgagaaagtgggtggtagagatcgtctcccaggggttatggatgggtttaaagaagtgttagatgattgtcgatttattgatttcatttctacgaaacatgagttgacatggtgcaatgaacatagtaattcaccgataatggagtggttggatagagggttatgtacagaggagtggttggaccaattcgaaggggttgatattacgttgcttgactggtgggagtcggatcatcgggcgttggttgtggatataccggttagagtggatggagttaaatgtgggaagtctaaacggaaaagtcatttccattttgaggaagcatggtgtcatgaggaggagtgtgctgagattgtggaccgggtgtagcaagagagaagtggcagcggccgaccgggttcatttagatgtaagattaataagtgtgggaaggctctacagaattgtaatcggaaaaagaagcatagactaaacaatgaaattgagaagactaaaaaagcgctccatgagttaactatgatgcaacaaccgagggtgtgggagactatacgacaaatggaagataagttgaatggattgcttgaaaaggatgaacaatattggaggcaaaggagtagagctctatggttgcaattgggggatcggaacactaaatattttcatcataaagcctcttcccgacgaaagaagaatgaaattaaaggactacaagatcacatgggtatttggcaagatgataaggtcttagtgtgtaagattgtggaagactattatggaaagttgtttacaggttcagatataaatgaggctgctctagatgaggtgcttagtgtggttcaaccgaaggtttccttagctatgaatgacaatttggtggctgagtttagggaagaggaagtggtccgagcagtgaaagagatgaatccaaccaaagcacctggtgcagatggacttccagcacttttataccaaaaattttggtcaaaactaaaagcggatgttatagctgtgtgtctaaatgtgctgaataagggggcagatctgaagtgcattaacgatacggtggtggccttgatacctaaagttgataaaccacaaagaatagaagagtttcggcctattagtctatgtaatgtgatctataagattgtctcaaaatgtctggcaaataggctacgactttctcttggaagtgtggtttctgattcgcaaagtgctttcttgaagggtcggctcatccatgacaatgccattgtggggtatgagagtttacatgtgatgcgaaagaatagattccgtaatggctcaaaagttgctttgaagttggacatggagaaggcatatgatcaggtggaatggaggtttttagaagccatgatggtgaagttggggtacagtctgctatgggttgagaagattatgaattgtcttacttctgtatagttttcttttctcattaatggtgaaattcaggggcgagttcttccacaacggggtctccgacaaggtgacccactttcaccattcttgttttcgctatgtgctgaagctttttcatgtcttattcaacatgctgaacaacaaggtaggcttcatgggattgtgtttggaaggcagagagtaacggtgtcgcacctcttctttgcggatgatagtcttctgtttcttgaagcaacagaaaatgaatgtcggtggttcaaaagttgttggaaaagtactccattgcatccggtcaacttgttaagttccataagtctgagatgtgttttggtcatactgtttctgcttcggttaagactcacttggatactttgatgggagtgaaagtggtagataattatgggaagtatttggggctgccatcttttgttgggcgaacaaagaagcaacactttgagttcattaagaataaggtgtggaataaactaaaggggtggaaagggtctttcttttcagttgctggaaaagaggttctcataaaggcaattgttcaagctatccctacgtacacaatgagctgctttcgccttccaaagaaaactattaatagtattcatagcatggcagctcgattttggtggggatcattggaaaaggatgcaaagattcattggtgtaagtggtctactctttgtaaacataaggagcaaggtggccttgggttccgggatttgggcctctttaatcaagcccttcttgctaagcaaatatggagatatatacggtacccgaattctttatggagcaaagtgttgaaggcaagttactatcctaatgttggggtgttggaggctaaatgtgggaatcatgcgtcctttgtttggagaagtttggtgtggggaaaaaagatcattcaagcagggtatcgatggcgaattgggaatggaaattcagtgcgggttcttgaagacccatggctgcctaggccggttaccttcaaaatttatgacaagccttcgctaccggatcaacttcatgttattgatttgaagaaagggaatggggaatgggatggggagttttttagagttgtcttcaatccaacggatgtcgagttaatccttcaaatggccacttcggagtgtgatattgaagacaaggttctatggcattatagcaaggatggggaatattcagttcgaagtggctatcgtatggtggcggctctacaggtccgggacatccaatccgatacagaggttactgagaagtggtggagacaactttggaagctcaaaatcccaccaaaggtgaaacattttgtttggaagatggctcattcttggataccaaccaattcggcccttgctcatcggaaaattcaagtagagcctttttgtacttggtgttctagtagtgcatatgaaaatgttttccatgcattatgggattgtaaagtaaactgtgatgtttggaaaacaaccgggttttatggcaaaattaaaagacaaggcaaagaggatgttcttgcttttttgatgagaatggtaggtagtttggcaaaggaggactttgagttttttctggtcttgtcttggaatctttggtatattcgaaattcggttaaccatgggggacacaaacctcaggctgctgctattgttgaatggtgcagcaagtttctttctgattttttagatggtaatacaccgaagaaggatggagcaaagagagaagctgtaataccctagaaataagaaatggattagcgaaaccctaattagataattatgaataattgaggaatta

SEQ ID NO: 20870 - DNA, 5000 bp, Cannabis sativa
  modified_base (63)..(65): a, c, t, g, unknown or other
tcacaagtaacattttgttatgactaaaagtcacatttagttacaaaaaaattatgttgtgannnaaaaattgtcactaaaaatagcagatttttgtagtgatgacctcaaattttacccaagggagttatagaaataagctataggttaaccgcagcgggtcccgctgggtttcaaaaaagactatcagcctcaaaagttaattttcaatgttagatcatcatctacgattaagaataatcttgttttttttttttcttattttgtggaccttcacctataaaaggagagcttttttagtacctacaaggtgagaacatctctctctctagaaaccagagcttaaatttatctgtaattaccatcactgagaaataaaaactcgaagtagacgtagcttcattaccagtgcgatatggggaatgaactactataacttttgtgtgtctctctaaattaaattatttaaacttattattcatctcactaatttagcgagctggtatttgtcacttttcagcgtcaacaaatacaatcataaaagtaattgagtataattatctgaaatccaaaaacacaataaagtataatgatataccaaatttaagggtttaagactatatatatatatataaagatatatagcataattaataccacacgtatacagtaacgttgtgcatgcttttgatataatatataatctttatggaggaattaattaattaattagttaatttgtgcataattagatagcatgttcaccctattaaactttatttcatttccaattagttattgcaactggcagaaagatacgattgccacatatgacatacataatatgcatgtaacaatatagttatgtcaaattattgttatttttactgaatttgtaggaaatgaccgatggaaaggtaaaggtcctcaagattatatatcaataaatatttataagatttagggtttagaaaaaagataaaaaaaataatagggctcatatatacccgtacaagtccattaatatgaaccacacaaatttaactctttcgagcggtgtagcaattgtattttttctttttccaaattgtatggcatatatagttcagtgtactaattgaattgttataattttgcggtttaaatcgcactatttgaaatatattactttttgagcttctaaattttctaataaattgctaaaaattaaatggctttgttgaaactttggttgttttgttttgcttttgctttggaaagaacaacttcaatgttttatcatgtaggaacttaatttaatttatttgcttttatactttctttaatttgtattcaaatttttgttgtattgctgaattcgaaactgaaaactttaattttgtcttcttgaaatttaaaacttttgctgtaattatttaatatttttaaggtttaatgtttttagtttctgtgatgaatgtttcaacttgaatgttattaaattatttgtataaaccgctcacacaaataccctaataaacaaagctggagatggcaatatatatcaattaaattgagtaatttatcagatctgtatatatgtatgacgtatttacatgatgaaaatacaagaatatatatacagcaaaatcaatttgaaccccaaaagaccaaagaggtagtaggattaattgtgaggtgttgctttatttcaacgcagataatcagaaactgtaataataaagtcaagtgcgaataaagaaactaaaggcatatatatatatgggcctctctcttattccatttcgatatatatctatagatatatagggattacaggttggcagatatacgcgctatgatagctttgctcatataatgatacaattgcagaacaaaataaaaagtttttttttaaaaaaaaattaaaaaaaaaaatagcaaagctacacctacacccagtgcaaatgcacaattatatacataataatataatgtatggtagctattattacccgcaaaaacatgatcaccacttaataagctagctatttattaatgatcatagctataattaattaattaaggtagtagtacctataaatctctcattaatgttttttttttttattttttaaatatatatgtaaattattatatgatgatctaaattctaaattgaacgtcctatgtatatatataggtcacctatagctaattgagttgcgaagaaggaaagcgatttaacagcaagcctgatcagctgttatcagagagaaagagagagaaaaggtccaacggtttcacagagctgtaaatcagatatacatatatagctaaaatagctatacataaatatagatagctatatactattaactagggtttagtgtggggttgggttggggtacttcatttatttttaaaagaaatatatattattatatagaaaaaaaattttgtatagaaggtggaatggtggctgtagctgtgaactgtattatgttggttctggtgcaggcaagtgcagagttagatgggctatgttgccgccctccactacggccacaccttacacagtacacagtttccacttgaaaataaatcaaaaaataaaatacaaaagggaattatttgggtattctcacctccatttttaaaagcttaattacccttttaacattttgttaattgtgttccctctttgccttgcacatatggtcccactgtccacctatatatacctataaatatagtttttattttccacttttggtgttttgtatatagcaattaataatgtctacctctctctctatgtatatatatttatagatatacatgcacaaaaacagtttgtataagcatatgtatacaaaaattgtttgttttgtgtatttttatacatagttgataacagcttgcaattatatatcatcatcaccaatattcatgcatgctactaaatatatattggtagtacttgatgcagacacatcactactatatatttgtatcctttttgtggttataattcaaatacataaatgagtgaatcaattgatgaggtttatttaatttatcatatagatatacaaagaatttttatgttgagtttgtgtttgttgcatattgactatgtgtatcatatacaattaatagtacttaggttaggtatattatacataacaatttatgatatattattcttcatgaatacgtagtgcagggcttgggtcatttttcactgttaatgctttaaagtaatcaattaacagtactgaatgcttttagaatacaccatactaataagtgtattaatgcaaactgtttcggcatctaaaagaaatttttagtctaatttttttacataatcatgtacgttataattatttaagacaccttgtaaaattttaaaaaatttagaataattaaaaatatataaaatttaatgttaaaaccgtctattttacatgcgtatgaaataaaaaattcacgcgtgcgacactttttgaaccatattttttgtcatgttaaatttttttgaatttttcaaaattttacaagatgtcttaaataactacaatgtatacgactatacaaaaaattcagactattttttttttttttttctaaataccaaaatagataaagatacatcatgtattgttgaattttacaatagtagtggttaatttttttcttcttttactaattttatagaaataatatagggtatatttaggtgtcaaccactacaagaaatggcttattgtaattggtgcattttgaaattttatattttaatttaataaataatataaaaaaattactaactaattataaaaataccacgtgcacatatagtgttggatatattacaatgccaaataaataataagcgtgtttctataatgcagccccttaaaaaggatgtaatgatgcatactctatctatttcgacattcagaagagtttttagtccaattttcttttatattcgtgtacttatagttatttaagatatcttacaaaatttcaagaaattcgaataatttataatatagaaagaagtgttcaaaaagtctattgcacatgtgtataaaataaaatagtcacacgtgcaatacattgtttgaaccctgttttcggcgtgttaaattttttagaatttcttaaaattttacagaatatattaaataactataaacgtacatatatgactatgagaaaaaaatcgagtcaaaaattatttcaaatactgaaatagatagaggtgcatcgttaatcctttctaaggatgaacattgtaaaattttccaataaattatactcttaatttgatgggtttagtttattaggttataattttagtaaatattgatcgaacaatcatttttatataggatagtaataatatatttatagccacaaatatcaaatctctctttgattatataatttagaaaaattctacgatgcaccacttaaaaaaggatatatcaatgcactttttatctctttggcatttaaaagaatttcgtagtctaatttttttaatgatcgtctatgttgtaattatttaggacatcttgtaaaattttgagaaattcaaaaaaatttaacataccaaaaatagggttcaaaccatctatttcacactcgtataaaataaaaaagtctcgtgtgcaatatacagttttaactctattttttgcatgttaaatttttctatatctctcaaaattttacaggaagtattaaataattataatgtaaacaaccataaaaaaaatataagacaatttttttttagaaatgctaaaacagatagggtgcattggtagatccctatttaggggtgcattaaagaagtaccctgtgatttatataaatataaaaagcaataaagtgtaactacaatgaaccccactgaaatgggtgcaccagtgcaactcttaactatttcggtatatagaataattctttagtctaactttttcatatttttgtacattata

SEQ ID NO: 20871 - DNA, 2280 bp, Cannabis sativa
gttctccatcagcaggagctgcttccattgtggtatctgcatcttctgctttagtctcatgattttcctttagaacatccttcttggtttcagtatcatccttttcagttttttgctcaccttgtgtttcttcacctttcatttccaaatttccttcagggacagtttctttttctttgtcatactgctttgaagctgatgttttcttgcttcgtttcttcgggggctcactttctctttggggagctgctttgaccttctcgcaaattcttgcagatctccttggggtctcaccagtgccccaatcaaactcagatgatgctggaccaccagggtgtgctttcaggtacttttccaactgtttcttactactgatctcttccccagttggagctgtgaatacgatctcatttttcttaggggttccatcttgctttggcaaaaactgtcaaaaacaaaccagatcatgacaccatgcaataaattattgtaatttacaataacataagcagactacgaacaaaagaaatcagtttttatagaaatttacgttatagaatgccaaatattttacatttggcttgacataaactcatcttgtaaaatatcatttaacgtcctttgtttattattttctctcaggaataaacatgaattactctgacattgattacttggaagagcatggacaataatgattgattaccgattctttggacatggactggatagattgtgacaagttcctaatcatataatatcttcctctaatgcatacataacaatggataaaataaatgtaattttgcctgcaaaagttgaaagagaagctaatcttgtcaactttgtgcagggtaaaaatctatggaagtctaacaaaatcaaagaataaaagaagggaatgttatcatgcatatgatggcgattacactcattaaagtgcaaaattattcctttagtgacttcaggtaagtaccaagatatcttaaaatgacataatgcaattaaatctaaatccataaatatagaaaacccactaagaacaaaggaatgcacctctttccagaaccaaaatttcacatgcaattaaaaaaaaaaaaaaaaaatcaaatgcaataaaccgcaaaaactagaagcaaagccctttaattatttgaaacttcttcaatcccgaagttaagaataaataaatttgaacaatgcaaaaatttgaacaattaacggaagcctaaacacttgagcatgaaattacgtaatggaaatttttattcccggaaatgttaaaaaagagaagtatccaataagtttaattactaataattaagcacaattcagggagcaccgagaaaccctagctggaaaactgcaccagaacatcaaattccccctacagaagctcacgtgtttagaaaatggaagcaaaaccagaagaaatttccaaacaaaacaataatttgagactgaaatagctacaaaatttccaactttcacaaagcccctttctaaaatttaagtttgtgaaggccctttttttattttagttatttaaaattcatgaatggagacgaagaaataacacatattgagagatgaagagagaaaaaaaccttctttttccaaccaggaggagcaggcaactccatggagacaacttcctcatttgaaccaccaccttcattctccactgagctagccattttccaattccacctttatcccaaattaaagaaagttaatactgaggttttcttttttttaaaaaaaacatatttatatgtataaatataatcgtaatattcagtagagaaataaaactaaaaaaaatagaaaaaggaaagagcttcaacttcttactcacaggcaaacaaagtagggagaaggaacgttgctgaatcagaacataggttgtgttgtggttgttgaatcagagcttgtgttttaagtcgtggaactaaggcatctggaaaaagtgacggtgcagtaatgaaatgacacgtgttcagctccaaagtaatcgacggctctgattgtgttttgtgcaattcacatcacaaacggttggcttcccacttccaaccgttaactttttttaaaaaaataaaataaaattattttggaaaaaggaatatacttatttagtaccttattttttcatgaaaaacatatttgatactttgtgttttcaataatacttattggtacctcatatttttaaattgtacatatttgatatcctaaaataaaatttaatcaattcagttttatcaatttaaccaaata

SEQ ID NO: 20872 - DNA, 4877 bp, Cannabis sativa
attttacaaaaagtaccttatataattattccatataaaaactttataatatcagaagaagcaaagtaaactctattttttttttcaatttatgatgtaatataaaagttggaagtaaaattaaaaaagtaaaatttaagcgatatattgtagaaaagcaaataaaagtgctctaaatttgcaaatgcttgttctaagtgaggttaatgacctaagatttttattagatgatattacaagtttgatatctagtttttcgagtgtgtatagtctatactcatcctttaacaaatatgatcgtacatattacataaatagattattgacgacaatttttttttatattttgattttatacatttaatatatttaattttgttttttcgtagcaaaattcatttatgtttattattatttttatgaatttgagaagctagttggatataactattaaatactaactgaattatcattgttttagtgtccaagttgtattatcacgtataaataattgtacacaatggttatttagttgatatttgatagtaatattaactgacattttaaatttataaagaaaaataaacttgaggagatttcgttaccgaaaaataaattaagtatataaaaattaaaatataaaagagtttcaccgtcatttatcctatataaattagcctcaattagacacaaagtttgcctgatcttttctttcttatgaattatttagattgtatgcaggatcgacacaagcattaaacttaatttttttaaagcctatttctttcaataaaagataagaaaaagcctatttttttaaagggtcaaattttaaacttctgcacaacaccccaaaatacttgagcatgccaaattgtatgacattctgattatattttcaataaattttcaccatcacaaaatgaaagaaaaaccttttgtaaaatgaaaagaaaaaagagtaagatttaataaatttattaaaatagttgtgggtaggtttataatttattaaagagttgggctgtaagtgttatttatccaaatttgaaggactaaaatgataattttaatttattattaattattatagatgggctttgccttgagctctactcagcttaacctttctttcacttattctcttctctaaaatttcttccttactttttctccaatctccaattccggccaatctccgatgtcaaccgaatcggaagacgttgtccgacgtcgcaccgtcaccacagagtaccggaagaagcttctccaacataaggagctcgattcccgtgttcgcgcaggtcagattcgaaaaccccttttgcttcaacaactcgaaccctaaatttttttctttcaaaatttatatttttgattccgtttggatcgtaaagtatattgttttagatcattggtaactcattttggtagaaagtatcgaaatttatttatatgtatgatatgtgtatatatttacggaaaagtagtattgagaattttggcaaaatgggaatttgagatgatgatgatgatggggtttgtgaaaatgcagtgagggaaaagttgcggactgccaagaaggagttttgtaaaactgaagatgaccttaagtcgcttcagagcgttgggcagatcattggtgaagttcttaggcctcttgataatgaacgctgtaagttctctctcttatctatatatgtgtgatttttatgtgtatattatgtggattaggttagggaattgcctgaggtgttttacaattgtggtaattgggattattttcacttgaattggtgcagtgattgtgaaggcaagtagtggtcctaggtatgtcgttggctgccggaataaagtggacaaggagaagctaactgcaggaactcgagttgttcttgatatgactacattgactatcatgagggctcttccacgtgaagtaatttcttgctcttattggatgtgtttgattaattctgtgttctattatatgatgaagagctgtgtttaatggtttaatgtctttgtcaaaagatttttctcaattgacttgtggttttttaactttgttttacaggttgatccagttgtatacaatatgcttcatgaagatcctggtaatgttagctattctgctgtgggaggacttggagatcagattagagagcttagggaatctatagagcttcctcttatgaatcctgagctctttcttagagttggaatcaaacctccaaaggtaaatttttgataactgcctcgctgaatctttcttcagctgattagagaaagagtatcttggtgttaatagcagtccttttttcggtttagggtgttcttctatatggacctcctggaacggggaaaactttgctggccagagctattgctagcaatatagatgctaactttttaaaggttggtttggttccttgcttcttttattagaaattgtatttgtagttgtatttttcttccatggaaatggaatattaatgtgcctaatttactatatgggcctttaggttgtatccagtgccatcattgataagtatattggtgaaagtgcaagattgattagagaaatgtttggctatgctcgggatcaccaggtaaggcttcattaaattgagccttttgactttgtgtattctcattttaaaacaatagtaaaatgatttcttctactccttgtgtagccttgtatcatttttatggatgagattgatgctattggtgggcgccgattcagtgaagggactagtgcagatcgtgaaattcaaagaacactcatggagttgcttaatcaactagatggatttgaccagcttgggaaggtatactggatattcccctctcatttattcaaacttgacttatgcttttatgtcaacttttaaacattttttaaagttatactcaatattatcacttagggactttagaaggctaggttgatttttagtttaattgatgagatgtctaatcttaaactgggtgttttaggttaaaatgatcatggcaacaaacagacctgatgttctggaccctgcacttcttcgtccggggagacttgaccggaaaatagagattccgttacctaatgaacagtcaagaatggaaattttgaaaattcatgcttctggtattgccaaacatggagaaattgactatgaagcagttgtgaagcttgctgaggttagctgagtttaggtacttttctaatggtgattggtaattataaattgtttgactgattgtatttatctcttcgttccagggatttaatggggctgatctccgaaatgtttgcactgaagctgggatgtctgcaattcgtgctgaaagggactatgtcatccatgaggatttcatgaaggtagagtaatttttttataagaaacaagtactgttttattgatttaacaacaaacattcccagagacccttacttattcaaaaagagaataaaacaaattccttgacatgctttctagcaatagaacaatccaaagttcaactctctacaaggcatgctccagctgattctccttttcttgaaaaatcatgtcgttcctgcccagccaattagaccacataatatccaatactccataattccaaattaattttctttttgattagagtcacttagcccgcattaaggtagaataatgaacatggttaacttctaattaactcttccggacagccagttctatgaattatctttcccaaactgttggcatgggctattagtgtcttacctgctgcatgtagaagctattatgtacacggctccatctatattcattgtttaggcaaggatggttctggtttgtattgtttttaattttttttctctttcgcaattatcgtatgcgccagtcctatcccctttcttgcacatccctggtttttctctatttcttcagagtggataacttttatgtagagatattcatgtctagagctgtgtcgttcttgtttcttcgtgcaattgcaaatcagtttccacgtatattgttctttccaatcgttgcatcaatatgtgccaatctctaattattttgcttgttgatatttcaggctgtgcgaaaattgaacgaagcaaagaaacttgaatcaagctcccactacaatgctgatttcggaaaggaatgaagctgaaatttaatctactgaaaaattgaacaaaaaagtcgaacttaaatcaatctggcagtcggatttttccattcttcataacgagaagatgcagatggtggcaatgcaatacattttcttccacaatgtgccaccaaactctggtttggtacatggataaaacagttgattgacaatgttcttcttcaaattatcattttgtagttcagctatataattgtcaagctcccagttgtgtgtttccttatttatcattaaaacccattatttttcagtcttttagtgttaggttttaacattatccaccactgagacttgttacattatcaatttcaatttttttacatacatcaaaagtgacaattttattgttcagtgtttgaggtgtataaatgaacatgacaataaaatagtaagtagtgataagtagaaaccaatactcataaaatacattatatgcaatttttttatgaaatatatttggtgttcttacactgtaatttgatcaaaaaatatttatgtatgtgattattaagaataactgggataaatatgaaatatgaaagcctccgacagtactcggtcaagagtgcttataaatattgttcgaatttttagaagaagatgttgaatctcaaggttttaccaaaagtcagtaattttttatggagggcagcttcgggtttgcttcatacttgttttcagttgaa

SEQ ID NO: 20873 - DNA, 3955 bp, Cannabis sativa
ttggaagatttcaaccaagcctcaatgacgaatttcatcacaattttcttccaatggaattagtttatttaacaatcattaccttcttacacaattgaaccctttaagaggtaccttattctaaaacatgtggagttgttaatattgctttagtgataaactaaacatagactccattgctaattgaccaaactgtttggctatttataggtaatatatcacaaatttgatgctaactaatccaagtcttagtaagtgatcaactttttgactcaaaagaaatcaaatgagaaaaaaccaccatcacctactcaataaagtctcctcaaatcacactataaaatgttagttattttaccacaaacaaaaaggtgaagaggtcaaaacttcaaacatcataaaataaaccactctttggatgacttaacaaatcctcaaaacccaacaactcctcccttaaaggcaaactcttcatgttttatatatataatcataaactcttcaaccctttttcattccatatttttggcatcttcaccacaatggctcgccagcttcatttccaacatttacacaacactaatcactttcaagttggctttgccggaatgacattttttctatgtgctattgcgttgttcaagtgcgcttcccactcccgtgcatggcgacaatggagagcttgctatgaacccgacaccatcgatgatcatagtgtgcaacacattcaacatggaaacaaccgacaagtcatggatgttgatgaagatgaagtttcggtttggcagaagaacatactaatgggtgggaagtgtcagttacctgatttctccggtgtcataatttatgacacgaatgggagtgttatggcaccgtcgaaacctcctcgcttattactaccatggaagtagttttaagagaagaaagtgaaagaaaggaacttttttaaattactgcttaattagatattgatttcatgaattagtaattgttgtctttctcttaattattggctttactatgtaaatggttattggctaaataacagcaaaattttagtgtgtaatatttaaagaatcattggatttggattttggataataacaactccaaagagtggcaataatactagtaaaattatataattaaaacaagaaaaaattatattgatattacaagagaattttggatggaaaacttgcaactttgaagattcattgccccccacaaaaaaaaaagtaactcaaaattgcctaaaattatctggacagtgatggctctttcttatttgaccaagaactctgtcctctaaacccgacaacgtttagtttcaaagaagttgatttctctgcactcgacctcttactccctaattgtttccttccactcgaagaagcttttcttgggctacttgggcttgaagaagaagctcttcttgggctactagcactcgaagaagaagagcctcgtcttggtgaactcgaagaagaagagcttcttcttggtgcacttgaagaagaagaacctcttcttggactagacatttttaccgactttgataacttaatacctgagtttgcagatttagctggaccagctgatcttctggatttcaatccttgactctgagatgatttctctgaatcagcttttatcttgcctccctgctttgcaattttaaacaatctttcattctttcccttctgctcggttattttatccctggcgatgtctctttgaacactatttatggagagcgattcaagactttcattcttccttattgcctcctcaattcggttagctaaactaacattcttcttagcaactaaacttgttactttccctgtacagaatgaaatttctttcacaagacagtctaacaagaatacagaaagacccatgtaaagacaaactaattaaatggtatggagttttcacacatcgaatttcaccaggcacactaagtgattttttttttgaaacaaagctgggcccaaccctatcattttggggattatgaaactatagcaactgctgtacatacaaccttatatctcgtgggagcacacctgaccatttgagctacccttcttaggccggcaagccaattgatcgagcaaaatgttcatcatttcttattttattttaaaatgtactctctatcaaagttgtgaagcattccttgtgtgtttgtcctaaagaaaattaaaataatgcaagtgaatgacacaccttttgcgcccattcgagcagttctccccgttcggtgaaggtagtcaatctacaagagtaataaatcaaggttaagcttcctcagtaagtgagaacgattgaaaaacatgaacaaaatattaccagtggagctaagacttaccgagttggatggaaaatcaaacataataacatgatctacatccaagtctagtccccttgcagccaagtctgtgcagacaagtgtggggcagtctccatcatcactcttaaactttttgaggttttcaaccctgtatttcaaacaatacaacatagagcctaagtactgaaacttgaccttcatagtattttctcccacatatcgactctcatcttaatctaagaaacattaaatgctttaataccaaattggatcagaaagtgatggtcgggtgttctttacataaatcggcacacttctagttcataactggacaaagattttgttccaacagagtggaagaataaaaggctcaaaccatacaaaatcgagcatatgtaataattgtgttttgtcttacctttgttctgctggcacctcaccatggtaattgacagtagaaatctgattttcactgagaaagtggtccacagcacggctagaattcagtgtgttacagaataccattactttgtttccttttgccaaacttggttcaagaacctgcaatttcaccacaagggttctccctctgttagactaaccaatacaatagtgtaatgaaaatttagacttcctctatttttcacaatttttctcctatgttttcctccagtttttcccaatcttcctattatatcttccgctatcaattgtttatttcagattcatcttctttcttttcgtttagtttgctcagggattactctttggtcttaagaatgagtgattgctcttctctgacccttactgcccaacctgaaagcagacagctaaagcgttcgacttactgaacatgtttctatggttggtctgcaaccccttaccaatctgattgagtaaactaatccgtacaaatgcatcactttcaaaccaaacctaaaacataattatacattttgcttactattgcttctataataaaaataccttctaaccttggagctgttcatttatagacatttatgaagccgtggtatccataaaaacaggtaagagctccaccttttacctaattctatggaagaaagaaaaaacagtgtacagaaatactattatttgcccttttactagtttcttgtctttacaatagtaccgctcgtgatttacgctgttgcatctgttgcatgtacaaggatctaaattaatgagtaccaaaaaataaacttaagatgcttcttcctgagattaaaaaacaaaatattggcaggacaagacttatatttagttataactatgaataaacggaataataacaaacctgtaataatgcttccatcttgttttcggtgcctgaaagtttaaggaaatcatgacgagcagatgcaatttttttatgcaaagatgatgtacgtaaatgctcgatcccttggaactcctcatcaactagagtttgcactccctgcaaaacttctcaaaagtcaatcatccaactttattataacatcacaccttgtgcagaagaacatcaaattccagcaaataaggtaaattcaaatatttatcaatcatgacattgcattagaatcctatcgaatt

SEQ ID NO: 20874 - DNA, 2854 bp, Cannabis sativa
  modified_base (46)..(56): a, c, t, g, unknown or other
  modified_base (1304)..(1305): a, c, t, g, unknown or other
gttatttctggtctttattagtaagtaaatttgattatattgaaannnnnnnnnnntagggcacaaaacccaatagtttcttgctcatcttgagctctcatagtaaggtctcatttttcaacttctatcaacagccttctagtagcaggaaatgggctccccaagatgtttggaacttttctaacttcctcatagtcaagaagaatgaagtttgtcgaaagttgaacttatccacctttactagacaatgtcaatcttaccatccagattggccatggaatgattcaccaattgcaaagtgatagttgtagaccgtgcttatctaattcctaattttttgaaaatgtgcatggaataaaattgataatagctctaaaaaagagctctcccaacatctccacccctaatagaaatttgtcaagctacccagatcctttaacttgggaggaattttactcgttaacattgtaccacacccttcagttagggccacagtttcaacctcatcaaacctccacttcttattaaaaatctcctttaagaagttcacatagttgtccatttgttccatagcctccaccaatggtatattaatgtgaaattccttcagatcatcaagtaatcgaaaagttggtcatcttgatgatgcttttgaaatctttggcgaaagggttgaggtggctttgtaattagcttccctggtagatttgttgaggaatttgtgaaacattttctttaggatcatcttttgacatatgagaagctcaagctttgtcccctttttccacattacttttgattgaagtgggttcattttttcttgtaatattttcctcatttaactccagatttttgccacaccacattgaccacaatatgatttccttgaaatgctctttaccttctctcttaagaatttaagtgtcactaggcaaatgccttgtggcctattccacatctcatttgcaaattgatgtattagtttaatgtaatgtaaaatgcatttcatgtgtaatttttttctcgtatgcatagatctatgttagatgttatgtttgaatgattggtcatatgcatgttttctactaaaatttcatggtctaatttctaacgggtttgatcatgcctcttgtttacaaggatcttatttatgaagaggcattccatcaattaacctaaatatcagaatttccagaacatgtttttttaaaactgaaactaaacaccttaagtattagaatacttcaacagtaatatagcagaatgactcatcctatcactacactataagaaatgtcactttnnccagcacatttttgtgctggcaaatatatggtactgcgctggtaaaataaaatttacttctgatgtgttgacaaaaagggttggcaaatcaacactgatattagaacttttgccaacacaaaaaaatccaacctatttgaaggtacatacatgttgtataagatcaagtttagtaatgaatttctcagctgattcattaaaaaaaagttcaaactagttgtactgtaaaggtaaaatagtattttcccaatctaaagaaaaatgttaaaaggaacctatggtgcatagtagctttgtgaggtataatattgctattgatgaaatttaatattttaactaatttattttaatttaataaaaattatacgaaaccgctacccaatgccacttcatagtagtgctaagtaccttggtgtctcaaattcattccaaattaccccatctaatccaattatacctactaaatataaattacccaatccaactgtatgtacttataaatcaaattactcctaaaaataaaatgaaaaaatgcataagttagagaaacatttattcctactattgttaattagtttctaactagtgcgttacaaagaagaattgttgatgaccaggggcggagccaggataagaaatttggaggggccaaatatataataaagaaatttacaaaatacacttaaaagtatattttttttaatatatttttacagactttttttattgacatttttacaaatttttattttagaattttttttctagaaaaaatgtaatttttacgttattttcccataacaataacgtcaaaataacattgttctgaaacaatagaaaaacaacactctgtatagttataaaaaaattattatttttcttgcaacgtcaaacaacattttttttaaagcattaaaaaaatagtactctacaattttgtaagaaaaatccataaaaaattcataaaaatgtaaaaagaaagaagtaaattcataaaaatataaaatttatcatttttgtatatttatgaaataattcccatataaaatgtgcatatgatatatttttatattcattatatcattaactatcacccgaaataaaaaaaaattattagtagaattatttttttcactttagggaagatactcaatttatatatgcaaccatacaaataataacatataaagttaaaattatcaattatttgtatatatatatttattatttaggagaaagaagacaattagaattcaagttgaattaataattaaaatgtgtatgtcattttttataaaatacctttatttattatttgaaatcagtcactcttcttttatgtggactgctcttcaatttattcttgtaaaactgctgccactaattgataatacatgttatctttttatcttaatgagatttatttgtacaaatagtaaaaaaaaaatataatttaatcattttatttgtaaaaatagtaattgatgtaacaaatataaaatacaaaatgaagaagagaatgataaatactaaattatctattttgaaa

SEQ ID NO: 20875 - DNA, 6798 bp, Cannabis sativa
  modified_base (1246)..(1248): a, c, t, g, unknown or other
  modified_base (1274)..(1275): a, c, t, g, unknown or other
tatatattatagggacacgattttatcatgtgatgcacaacaaccgttagatgggagagttctttgatctgagggctgggattgatctaggagtaattagggttaaaaaatgataacgtgcactaagacccatccaatgtaccttgagactcatctaataccacggaatacattccgtgaaaatacatacaagataaaatcgtgtccctatgtatagagcattgttattagttactagtagtacctaacactttctcgacatgtagtaatactttctaaaagttattatattaaattatatgagatctgatacttagttaaaccaataacgatattaacatataagaagatactaggtagtaagcaccactagtaccatttagtatttctcttatatataatattggaattttattacttgagactaacaatggtagaatcatgaatgtttgcgtgatggttcgatttccaaccaataaaaaattctatgacacaattactactcatcatcatcatcatcatgaattaatgatctggataaaaatgcacgtttattttaatttaatatttgaaaggaaaaaaacgaaattattggtccaacaatgtgtaattagctagtaatcactgtaattaataattagttaattaagtttcatgactatagagactggccgctctcatatacaatatcatgaaatactgtttgaattggtgccaaatcctaataagttattagatagcatttgattagaagaaatgaaatggagcagaataaaaaagaaataactttattctatttctttatttgattttattttaaaaagtattaaattgtcattattgttctagttatgttttcatttcttttaaccaaatgtcacttaataggatgtttgctatgtgaatttgagttggaaagagtatacttgaatcgggagtaaaccatagagagaatatgaaattcatgcttttaaggaaattaatattacaattattttaatttaaaatataatgtggagattgttatttttatggatgtttgctttagagttgctttaaagtgaatccacattaagggatgtggacgtggcatgcagacagtgacggactcaaaatttttactttgtgagggcttatttatcattaaaaaatatttatacatatattataatcactctaactagatttatttaattttatggggacttttctattagtttagcctataattatcaaattaaaaaannnacatttaattttttaaaagacaatanntttgttagtgggggctatagccctcacattgttacttatgggtccgtccctgcatgcagggatggtgccacatcagcttgtttaaggacaattttggttccattagtgaaagaagaggacccatttcatgttcctcctatcctctctctctctctctccactactttgcttttaataagtacttaccccattggacactctcatctcatcttcatacaatatgttggttttggcctttgaatgtagtcttgttccatttcttcatttaagtatttttcatatttttaaataaacatgtttcccccaaaaaatatatattataatcattttgacatttaattatactccatattctgtcttgagacacattaaaaaaaaaatcacctattactcgatttttttatatttaattttacacaaaattacaaaataatataattgtatatattcatcaagtagcacaacttggtcaccgttcaaaaaaaaaaaaaaaacagaagaacaagtagcacaactatatctaaatatatattacaaattatgaaatactcatatttgtgtatgttcttaatctagagtcctattagtgtgtcactatatttcatttttatttcatgtctaatttaagaatttcttggctggcttttgaaacactaagtttaattttacacaatctatatatttttatatttttggacgtatttaaaaagtcacggtttaattcaatttgtgtgtaattgaaaataattagacaatttaacatatttgtctgattatgtaattacagtatagcaattgaaaataattgagggattataatgttcatgacccttcatgagaattgagtataattacattgtgtaattattataaaaaaaaatttcctatataattactaattattctactaaataagatattagtaattcatatataattattacatttctaaagacaccttatattttaaaataaaatgtaattactaaacactgtaattaccaccctaattcttaattcttacataatttcttccaaacatattaacttttaaaagtctttcaaaagaagatacttttattctttaaggcctcaaccattattgttgtaaaattattttagttttacaacaatatatttttgagaagtttaaagtctaaaacccaaattcaaagtttaatcaactagactttaaaagttaaaagttgcagtaaaaatttagcaaaataaattattaaaatattttgaaggagaactcgaaatacctaagctcaacaaaatggaaatactattggcatttgattcataattatgcccatttgatacatcattttgtacacttgatacattactagaccataaagctaattggtttaaaaaagaaaagtcatacaattaactacctaaatatatgcataattatattgtatttgtttgtaccaacccctacccattattttattatttaatccaaacacaatcatataaaactttcattgttattttgttactctttctccaattatttcccataatagtaacgtttgacttaagaccttatgttataaacaatatgggcaccaataattttttttttaatataaaatttagggtacaatgaaacatgatctaatttagattgctttcaaactttagatatattctattctattctaaattttaataattgtcgagatcttaaaaaattaggtttcaatcatttcctaataaataatatagaaaattattagtctggtttaattactactgtcttatgtttaattaaagagaaatagataagatttaaaattcaataacaagaattataataattatttaagtaatttttatgatttttcacgtgtcaaccatagcattattttgttagttgaactaaaaatgtctaatcattagacaagtcttttaaattaaattaattgatttgaaaagcaacttcacctaataataatattatcacatactattattttctccaacatccaatccaaacaattcccaattaattaaatcagtaatttatatatgttatttgattaaataaaataaaataaaaaaatcaactaaaaaaaattaaatgaataaaagttcatattttagcagaaactatagttggtgtagcaaatttcataataaactcaaaaattggtataaatagtgaaacaaaaatgagagttagatttaaagaataattatctatctcaactttctggtttttgtgtaaaattctcttctaagttctagcaatttctttattttatttttatatttgatccttgttctcttgccaaatcctacttttgaagaaaaaaatgtatagatgacaaaatcaacatcagtagtccatgcctggtgacattgcagagggttcctcatccttgggaagttccacaacaacagcttccgtggtagttaacaacgacgcaacgctacataacaaccgaacaataaaaacgttaagcttgaattttcgatttttaggaagaaaactaataatgtcgtgtgagtttaccttgcagcatcaaccaacgccgtcctaatgactttcaatggatcgatgattcccgcctttatcatgtccacgtattcacctgaatgatgcagagaaaagaataaatgttcttgtctataataataaaggcgggattacatcacttttgtccgtactggtagagacgattctagaaattatctcaatttttcttatatatgactgtgtatgttatagttatagtagacatagtagacactccacctgttttcgaaaaatttaaaataatttttagtgtcaaaaacaaagttcaaactttcaactgaatgcttactatagctataatgtagaccgacataaaaaaatgagttataatttcttcaaatgtcgaaaacatagatgtctcgtcaaatacttttggtaatgagttgaagacaaaccttttgctgcatcatatccgaggtcaagattgtcttgctccaaaagcctagcaacgataacttccccctctactccggcattagaagcaattgtacttaccggcatctgtcaaaatcatcgagtaaagtattgatggacagattaagatttaggcctaatagtgaggaaataaatgtctttattgaaagtaaccgaagaaaatgagcaggaaaaagaaaatgttgggaaccttaagtgcattttgaatgatctgaacgccaatcttttgatcgaaatttgcagtctgcaacttcgaaagctcctttgaagcatataaaagggcaacaccaccacctataagtgtatgaacttattaatttaccgataaatgatttcggtcttacaaggttaaaccaatggcacttttaaacgagaaatgtaccgggcacaattccttcctccacggcagccttggtagcgtttaaagcatcggtgactctgtccttcttctcgctaacttctgtttcactagctcctccaatctaaatgaaatagtgtattgtataagaactgataaaacatggcccgattaacaaaacaaaatataatagacaacttcatttggagagaaaaaagtcaaacctttaagacagcaacaccaccggaaagctttgcaagccgctcttgtaacttttctgtatcgtaatctgaagtgcttgattcaattgatgacctcagctacaaagttcatgatttacatcagttaactaaaaaaaaacaaaaccaaaataaaaggaattacagcaaagaaaactgtatagacctgttcacatctttcttcaattgctttcttgtcaccagcaccatcaagaatgacgctatcatcctttgataccgtaatctacaaaggcagaaactcggtcattaatcgaaactaaaagtttactttgcggttagcacgcaagaaaaatgtttgatgttattttatctcacctttttgcatgtaccgagcacttctggtccgactttttcaagatccataccgagctcctcagttatgacctgtattttatataaatggagagaaaatgtttcaattgtttctttatcacctagtaattccatacttcaagagaaaaaagttttatagagtggcgcacctcccctcctgtaagaacagcaagatctcgtaaattggccttcctgctttctccgaaaccaggggctttaatggcacaaaccttgaccaagcaacacaacatagaatgtttaatctcaatatcttacacgggaagaaaaaagattaccgaagaaaagattaaaacttaccttgattccagctcggagcttgtttatgatgagagtagcgagcgcttcactttctacatcttcagcaacaataagtagagacctttgattctgagaattcacaacaaatcagttggcaatcaaaagaacacattttaatcaaattctataaaccccgaaaacaaataaatataaattaccttcaaagccaactctagtatcttcactatggcattcagattagagattttcttctcatggattaagataagtggattttccaattcctgttataaataataacaagacctgttaatatccaaaatgaggcatgttttcttagaaaaaaaaaaaacaggtgaatgagtacaaactgtacaaagatccaagaaggatgagcatatgaagaaactagcgattaacgggaaatatattcttacacatttttggtttttctgattggtgatgaagaaaggggaaatatagcccctgtccaacttcattccttcaaccacctctaattcattttccaaagttttcccatcctaaaagagataaacagggtaaggtttcagagaatcaaacacaatgacaacatgtacaacaaatgacatatcacaatcctctccacaagaaaataaaaataaaaatgtatgctcaacacagcagtgaactaagccgagtaaaatgttttatttacagtcgggatgataaaaccactcaacattacatgaaaaaatagagaagtccaaataacttactgcaatggtgatgacaccctccttgccaactttctccatggcttttgctattagctcaccaatttccctttccccattagctgatattgttccaaccttccataaaatttatcatacaacaatgtcagttaaaactaatatttacatctcttaactagttttaaacaaaattagagctttttacccacctgtgctatttcttccgatgtactgatcattcttgccctgctcttcaagtttgtcacgacagcatcaactgccattgtaatcccacgccttaaatccatagcattcatccctgcagctactgacttgcagccttccttaaatattgcacgagtgagaactgttgcacacgtagtacctgcaaataattacacagacctcacatcagtaagaaagctcacaccaattaatacacataaagaatcccatcttctgataacaaccatttgaccacaatatcatccaaaataagagctgaatgttttataaataaaaaatgataagaacattacaccaaat

SEQ ID NO: 20876 - DNA, 7775 bp, Cannabis sativa
  modified_base (82)..(83): a, c, t, g, unknown or other
ttttttttttttttttctaattaatcatttttctttttgaaacatacaagtaattaaattttggagtttttttatttttacnntttaaaataattttttttttgcatttttacggaattttacacaaaaactcctattgcaattagcgaaaaaatagtatagaatattgcaactagcactgcaacaactttagaaattcaaaccgtaaatttaaaaaaaaattaaaaaaatagtatatgtgataatttttttaaatttatgtgcttaaaaatttaaaaatatgtgagcactagtgaaattatcattttttttttatcttttcagggacccaattgttggattttactccacgcgtataactgcatctgaatccattatgatacaattcagtattcactgccttttcaattatcattattataattttttatataataaaatgtgcattaatagcactatcttttttgtaccttgatttttccatgtttccaagaacatttgtattgtgggaacttggttgaaaaagaaaagactaatccttatcacaacaaatcaccacattactatgttattgagtattcctttttggttattgaaaaataataaaaataaagcaagagaagaaaaaggatttttattttttttaaaaaaaaaaatctattgcaaatcttaaaacttttttactagccacatgctcaattttgttgtttatgagagctgttgaacacctaaattattgtctccctcaattatggaacaagggtagccaaaagaattaataatagatagagtgaatgattaaacaattaggatcattatgagctatataaacaaaaaaataaattcaaccacatatgctatatatatagtgacaagaagatttatataccccttatgtttacaaaaatttacataacaaattaaaaatttgaaaaaaaaaaattcattttagactttaattttttttttataaaaatatatctttagtaaaattaataatttttttagttattttataatttattgtaaagattaattttttattaaataaaatatatttttatagttttacaagtacagctttataaacataattttataaataaaagttttaagttgtaagattataaataaaatatttaaatatatttttaaaaattccccataagtttattagctgtacttgattaaaattaaacctaccatatactgtaatggaagctttataatttgatggacattatatctaccacttcccccccaatatgacaagaaaatccacccagattgtgaaattatgagaaaatgtcagaaatactctcaagtttatcaaaagggtatcttggtcacaaataatttatatttgattcaggtctcacatggcaagaaattactctcatgtgcccacatgcttaggacctctctctctctctcccatgttataatcccttttagtagggcataataaggtcagactaacaaagcttatctctatttgaatttgactaatcaaatcctatcatatattaatgaattgctatcaatactctataagctagttcaagtttcttcttactccaactttttatttcattgtctgtataaagcaaaaagatcactgcaaaaatctttaatgcaatttcctttaatacataaattagtattaatttaggatatgcctacggcttcattattcattactattattagttttttcaatgaaacataaaaggtcataataagaagagtagtaccatattgccaatctaagcaaaacttaaaacagatttcaaaacaaagaaaacaaaaaaaaaaagtgatttttttttctttactctcattgtattgggattgaaaagaattaagaaagaaatcagaggtaacctattgcatgcaagagaatcaaataagaaataaaaagtaaataaaaataaaagccttttgtcatttagttcaccaggtgtccatgtgataaaaccaatattttaaaacaaaggcttaactctctctcctgtttcaccagaccactctagttttttcttctcataatctaaccgttcaaaaccttacaaaatggttaaaagttgataagaattagatagaggtgatattttgttcccctttatatatctcatgcatttttttcttctcattacactaaaaaacacttggcttgaaagagtaaaaaaaaaacaccttcttcctcctcttgtcttaaatccaaaaccaagaaaaaatggttgtcctagaaacacctcaagcagattctagatctcttgaaccaacttctagcccaaggatttcattctcagctgagtttttagatgataacaacttcatctctattagtccaaactctccaataatcaaaagagaaatagtattagagagtgaaaacaaagctcatcaccaccatcgtcataataatcatcaacaaagtaaggcacgtaatccagagtttgagtttctctcaaacaacagcatagccagtcacaacaacatgataactgcagatgagcttttctttgaaggtaaacttcttcccttttggcagatgcaacatgttgagaataagcttaacaagctcaaccttggaaccaaagattcagagggacaacaagaacaacaagaagaaaaagatggaggaagaggaagaagaaaggttagtgaagaagagagtaatactgatactaataatactaatactaataatagcaatagaataaattggtcttttgttgatgatgacccttctccaaggccaccaaagtgcactgttttgtggaaagagttgttgagattgaagaagcaaagagcttctactctgtccccttcatcttcatcttcatcatcttcatcttcatcaagctcactagctgatatagcttcagctgatgaaggtaccaaggaagggattagacaaagagctgagaaacatgttaaggggataaggaaaggcttggaaagaacaagatcagccactattagaataagaccaatgattaatgtacccatttgcacacagatgaagactagcagtgctttgccaccattgtttcctttgaggaaaggaggaagattagagaggtgagaatgaaagagagtttgtagctaaaaaaaaaagatggtttgatctgtagtgttgtttgatatatgttattaaatcttttttttttttttaatgtttatttcattttcaagttttcttatgttcctccattagaatgttaattaatgtggatctcaagtatcatagtgtaaattctgactttttagtcttgctggtgttgttgggttcttactcttcttcatcatcttcttgaaaatgcatgcatttctatgaatcaaacaagctacaactaaagctgagttttcacagtagactgagtatgatctgacattgcaacatttgaggtagtacagttacatcatttccttcttcataagaagaaattaatacacccccaaaagacaactaataataataaaataggaaaagtgtaaatggacaaagggaatcaaatgatggtgacacaaacttgtccacctaagctatgaacgtgagaggcaggcataacaagttgactactcgtgtcaacgttatgtttgaggtagagctgagcttttctaagacaggacactaaagatttttcagatgtaagtgaaggggacataacggacacttactgtcatcatgctcatcttatataatataataatcctactacgataattatataatacgaaaaatgaaagaaaatcgttactctgaaaaatgagttaaatgtatatgaacaattaatagtggtacagagccaagaaaacaaaagaataaaactgacaaacaattaactaaaactatataactatatgaaaattcctctctccttttcctttttacacacagaaaatggccatgttacaagtatacagggaatttcgtcaaaactaaaagctgagcaaaagagctttgttgattcgctgatgggagagctcacactaagtaagaatatgtactactatgagaaatagtatgttgggggttcaattttctgtacttctgactcgtaaatcttatcaagtaggtggaggtgacgagagttgatttccagtgaccctgttaagttggattgtaacaattagaatatggaagagaaatgggcacaaaaataatgacagacacaagtgaagcactacctcaaatccagtccaggttttccatttaggctacttggaatttgaccagtcaggttgttgttttgcaagaagctgaaggacaatgaattaggaaggtacatcaataattgaatagaatagtgtaaaagtgcagttttttgtcgaataaaaaaagacttgagtaggaaatatctcccttaggtagatacaactaacttatatgaaatccaatacacaacaatattcaactaagttactaaattgtggttaagagacattccattagaatttgaaagcaaatatataatccacaaaagacaacttgaacttacagttcacgcaagttatcaatgagcccgagagatgaaggaatttccccaataaactgattatcctccaaatgcctaaaattgcagagtaaaaggattaagaaaaccagacaccatattccacaaaacagttcatgacatgagatacagtcaatgcaattggaaaattccaaacaagcaaacaccaaagagatactgattactttaggctatgttcaaactagtagattcagaggaaaataaaactaaataaagtgattttactttttcttgttttgattcgaacaaaagttgcgaagttcttataggaaaagtgagaattcgatttgatgtaattaaagaattatacaagagattgaaaaattctcttttctttttcctagtcttttccctagaaaaatctttccttatcaaaatccaaattccaaacaaagccttatagaacaaaagaaactaccacagtctaattcattttaatgaacagttgatctaaaaaaaagtataagggttttaataacttacagtatgtctagcctctttaaaggactgagatcaggaatgggtcctgataatctgttattcccaagccagctgccaaaaccatgacatggtcaatgataagggtactctctctaaatttaaattagtgagtttcttagtgtttgaaaacttacatgccattcagggcagtcataccgctaataccagatggtacagttccggagaggtccatgccagtcaaatttctgaaatggaagtaaataaaataagttcttatatttaatactacgaaacacaaagaataataaaaaactagactttctaggacgcagcatcgaaaattgacaatgctataaaaagcgcaaactcacaaggtaagaacacgaaaccgagggccttctgaacaagtgatgccaatccatgtatactgacgaggcaaacaaggatcaccattccagccagggggaggatttttcagactgtctttcaattttttcaaagcaattactgtgataagaaatgtaattttcgttagcaaatgcaaataacaactcaacaaaacaaagagtgaacaacactaggcaaacaccaagtcatgcgatgtactagttttatttgctgaatgatagcatcataagttattatgtgggtgagctaccactcagagactttctagcacaaaaacaagtttctgagaaccataccatctcgggtgacagttcttccttcaatagggagcagtgccaaaacctcccctgcgttaactaaaggacctaagtttgatcctgcagatgaggtcaaactaatctttgtagtaccatgtagaggccaccgagatgcaaagacagcaacacctgctttagtcacttttagatcacggtaatagggaaccccatttatgctaatgttcatcaccctcgagttctctgatgagttactaccatcagcaaagtacaacgcaatatagtactttgcctctggaagagacaacagaggccagttgaactccaagggttgtgttgggtcacttgtcagctctgtttggaaaactttcaaaggtggaagattccaaaaaccagaaacagatacgtttttagctgccaaggtatgattgttttctccaaatggcacccaaatccgatcaaattcatcgtcagggtatctgagcatataaaacattatattacaataaggaattagtaactgtgtcctactatacaattcaaactaaaaacagaattgattttagagcaagtcttaaaagaatacatggtgatctgggactagattacagtttaattgaattcacttgttgttaacaactatatagatcaaacattttcaattatcttgcgtatcaagaacataaaagaaatactttataaatattgttcagtttaaccctcgattatttttttttctgcatgaattggaagaaatggaataagcccagttcaaacaatcaaggagcacaatgattaaagaaaataaagaaaatgaattaaactaagttgttcataccgaatgggaggtccgttgtacccaaaactatttcttgtagttaaatgaagaccataattctggaaatccgtggaattatacaaagaatcacccaatatgataaactctaaagaggatataaaagggtccgaatccgtatacgtattaaccccaatacagaaagtcataacattcgcctgagcaagaaaaaccccttcgtaatacgtcgacactccattagcataatccgtcgtcgtattgaccactgtccagagagttccatccaaaatctgatcaaacaccggcggcgaatcccgaccgttgatccctccatagaagtacgtcgaccgtaccatatacctagctccgcggtaagcccgaatggtgtagcaaaacttattgtgaagattgttcgcgagagggaacgatcggacggtcgagagaataggaaccatgaccggaacggtcacattcttggaaattccgccggtaacataactttcgtcggaaatccatcgccggccttcaaatacagagtcagcaaccgcgccacaatcaatcgcaacacctaatagaaaagaacacagaaatgaaagaaaaataagaaattaaaatgaaaaaaatcaatctttacgagaacgaagaaagaatcgaagagagtttgattcaagaaacgggggctacacttacctttgggctcggacaaggagaagggtaagagagaaaataatgagagaaggaaaaagaagaagagggaagccattgttgggaaattgtagcatagagaaactaaattctagtaaagaaagacagagattttagagagaaagtgggtttggtctgaattggtttgaaaagatttgaatgggtcttcgattgagtcatgcatgagaaaagaacagcaattggagttggccaagaggatggtattaaatcattataatatatatttaaataaataaaatactgaatttactatttttaattaataaaataataagtgattgaagtgaggaagtaacgcgggaaaaactgagtccaggtcagagttggtacttactttttattttatcatattcatttgggctgagtcgtttagatagttgttaggtagttttttttttattattatttatttaaaataagttgtttattttttttgaaaggaaaattcaggggtgagcaacggtcggtttggtcggttttttacacaaaaaaaaatccaaaattcggttttcggtttttatggttctaatccgaaaaccgacc

SEQ ID NO: 20877 - DNA, 2631 bp, Cannabis sativa
taagtccaattttaataaggaaagttaaacatacatgaaagttcacgaaacatgatttaaaaaatatcaaaatttaaggaacataatttagtagatatcaaaatctgtagagcatgatttagtacataaacaatcacttaattagtaaaattaaatgaaattagataatatttcttaaatctaacaatttcaatatttcaggagaatttttaacgattaaaaaaaatttaaaatacataatttaatacatgtgaaaatttaaaagtcataactaacattttaccctaatttattttagaatttcctaaaaaagcatataaaagtttattataaagacaatgaacacaattgtgcctacagctttttccacgtgtgtaaaactgagcttgcactacaatataatatatatcaaatttatattcatatagatatagtaataagctatccaatgagtaatatataacaccttcgaactatctctacagactctaccatcgattcatcgtgcatgtgttttagttctgcatttttcttgcccctctctcctaaaattattgataaaacacaaccgcaaaattaataaagaaaaccaaacaatttaaggccacatgaccttcaatttctaattctctgattacgatacgttttaattatgaagagacgttcgaaaatagaatttgatgacttcaacataataacgatattttttttttcctggaaaagaaaaaaaacaaacaaaataatgtatcacgatatatgcaaatttctaatatcttcaatgaacagcttcatgtcgagataagaagatcctccttcctctattgccttctgtgccatatcactaagccttttcactctttctcttctctcctctccttccttatcttgtgccattactttttctatagcttcaagaatatccttacttaatacaaacactccaaactcttcttctctcccatatggaacaacaaacttagggcccacactctcaccaaccttcaaaacttgaacaatcaacttctgattatagaattgctcagcaaacatgggccaagttatcattggtttgccataagtaatcccttccaatgttgagttccaaccacaatgagttaaaaagcctccaactgaagagtgtgacaatatcagtacctgtggtgcccaaccaaatatcaagagtgccctgcttttagtcctttccttaaaaccactttctgaaatccatttctctatctcttcttcctgatcgtatcctcttattacccaaatgaatggcttgtttgatgcttctaaggccacaccaagctctatcatctgtggaattaaaaggcggctgacacttcccaagcaagcataaaccacacagcttttaggccaagaatcaagccattctgtgcactgtttttcatcaacagcaccagccgggttgttccctctttgagccacttcaagctttgttttgttgaaaagagagaccggaccaatacaccatgctttgcctactttttcctttctataaccttcaacgtacttccattccaattcctcaaagctgttcaccaaaaacccatctgctccttcttcagattctcttattctgtcgtgaaatttttgtccaaattctaaatttggatacaaatctgcagctaattgatttctagtaaactcaagatgatcaggcataccaggaaccacaaagggtactgacattggtacactcaaatggacttgggattttctaatcatgtgattgcataacagagaaaaacaactcattccatcaaacaaaactcttggtatcccaaacttggtggcgatttcggctgtccatggaaggtgtttgtcagctataatgcagcttggcctaggcttaagctcactgaccacttgctcaattggctgttgaagctcgtcaagcgcgatgaagaaactcaatagcaagtttcttgaagggactaagtccacagtgtcacatccctctggtaagccgaattcatggagtggcaaagagacttggactagctggattttcagattggaattttcggtggcctgttcgatgattggccttattcttgcagcgataaccggcagggtgatgagggtgatcatggcgccgtgctctgctaattttctggccatatcggccatggggatgaagtggcctggagccatgaatgggattacaataaggtgaagcttgtacggttctgaagccattttggtatctgtgatttttctttgaatttcgaatacttattaatgattactatattgtttgatttttctacaagtataaaacattagtgtctatttattaagaggtgtaagtttgacttttctatttgttaaatttggatggaagatagagtggcttcgtggatgtaacacaatctccaatgtccctgacacctgatctaaatttatattaaattctactaacagtgaatatttttcggaaaaaaaaaatatattgatatagatggcataaaaatgtaattacactaattataatattttttttaaaaaaacttataaatatgaaaaaaaaagtcacgaggaatgccataaaaaactttaaatttgtgtttctttttaatttttcttttaaaaaataaaacactaaaa

SEQ ID NO: 20878 - DNA, 3364 bp, Cannabis sativa
tgctcgggttcgggtcaaacccgttcaaaatgttcagccctaatggacactcgactgctcattgttacaacagatatgatgagtattatatgggctttactctaggcaataacaactccttttaaaacacaaaagatcctagagcatttgtggccacacccgaagttgttgatcacgagggttggtatgcggattcgggtgcaagcaatcatctcacctcggatcaagaaaacatgaaaaacagatctacttacagtggtaaggataagctaactgtaggtgatggtaatcaacttaatatcacttacattggttcaggaaatttgcactctaactatggttacaaccagcaattaaatgatgttttgcttgtgcctaaaattgccaaaaatttgattagtatatcaaaactaactactgataacaaagtgtttcttgagtttttctctgatgtgtgttttgtgaaggacatagcaacaaagacagttgtactgcgggggaagcttaaggacggtttatatcaggtggagggttctactgtcaagaatatcaagccatttgcaacttgggcttcttagccttttttttaagtctattttaagtccttttactggtttagttgagtctaatagtcagtcttttacctttgttagccgtgaacatgtgtctaagaaggatgtgtggcatagaaagttaggccacccttcatccaaagtgataaatcaagtgttaagtctatctaatgtaaaagtttccactaatgagaatccaagtttttgtgaggcatgccaatttcgtaagtctcatgctttaccatttaaatcttcatcaaatagagctactaatgttcttgacttaatccataccgacctttggggtcctgctcctgtgatgtccaacaccaacctaaggtactatatccactttgtagatgacttcagtcgctacacttggatttatcgcctttactcaatttaaggccatggttgaaaacccatttgataggaaaatcaaagaattgcacactgattggggaggagaatactaatctttcagcacttaagttgctgaaaatggaattgtcttcaaccatgtcctcacacttctgagcaaaacggtcgtgctgaaaagcacagacacattgttgaaatgggcttaacgctccttgctcaagccaatatgcctttgaagttttggtgtgatgccttccaaacttctgtctatttgatcaatagattacctactcttgtgcttaagggaaaatcactttatgagactcttttcactaaacaaccagactacactttcctaaaggtttttggctcagcttgttacccatgcttaagaccataccaaagtcataagtttcaattccattccaccaaatgaatcaatcttgattatagcgaatctcataaaggcaataagtttctaagctcaaatggtagactatatatttctaaacatgttttcaatgaaaatgagtttccatttaaaaagggttttctaaacaattataaaaaagaacttgaggttacagtccaaactcctaactcctggttttatctccctgtgcagccactcaatgctcagaatactgatgctcatgtgaaagataaaacaacaaatgttcctcaaagtaattctcagcaaaatacatctcagcctagccaagcttcaactgatacaaaccatcaagaaaatcactatgcagcactacagtctgtgatgtcaggttcctcacaatagcagcaacatcaggtagatctcactaacaatctctttgttgagttagattttggcacaccacctgtcattgatcaacaacacactccaacccgagatgaaccaacaacaaaaattcctgtctctaaaccacaaactgagccacaacctagtcatcctatgatcactcgatcaaaggttggtacctttaaacccaaggtgtattctgctcaagaaaagtggccaggaaacacatctgaatcaaagactctcagtgaagctcttgcccacaaagggtgggacaaagccatgtcagatgaaaatatggctctgaagaaaaataagacttgggttctagtgcagagaaagaaagggatgaacattgttggaaacagaagggtttacaaggaaaaataaaatgttgatggacctttttagcgctttaaagctcgacttgtggaaaaggggttttaccaaagacctggcatagactttggtgaaacttttagtctggttattaaagccttaaccatcaggattgtcctcatagttactgtcacgaaaggttgaaaggtccgtcaactcgacattaataatgcctttttgaatggaaaactcgaggaagatgtctatatgtgtcaactaccttgttttgaggacaaagataaacccgattatgtgtgcaaattggaaaaatccctttatggtttgaagtaggcccctcgggcctggtatgactctctgaaacaaactttaatcaaatggagttttgttaactcacgtgttaatacttctctcttcctactgaaaactccaaagtttgtcatcatggttcttatttatgctgacgacatagtgattacaggtaacaacactcaagaacttaacaagttcattgacaagctgcatttaacttttgccttgaaagatttgggcactcttaactttttcctaggaattgaagtctttagagatgccactggaatgtatctctctcaagggaaatatgttatggagcttctttcccgccttgatatgacaaacatcaagccgtgcacaacgcccatgatagggggaaaaccgttgtctctgcaggatgaagaagaattggctgatcatacttagtaccgaagtgttataggggcactccaatatcttactgacacaagaccggacattgcttttgccgtcaacaaacttagccaatttcacaagtatcctacaacaactcattggagtgccgccaagagaattctacgttatctaaagggtaccattcatcatggaattcatataaagtactgtgaccatttgtcaatcacggggtattgtgatgctaattgggcatgttatctttatgataggaagtctatagcagggtactgtgtctactttggtgagtcttttctggcttggtcctctaagaaacagacagtggttgcttgctcaagcactgagtttgaatatcgagcattggcctaagttgcagctgaaatcatttggattgagtccctgcttgaagaaatgcatttcaagctgccttctacaccagttatttggtgcgacaatgtaatatcccgataagttaaatggtaaataattagggtttatattgatattatgaattaatcaggtaata

SEQ ID NO: 20879 - DNA, 3609 bp, Cannabis sativa
taattttgaactactacttttacaatatattgggaactgttttgatcatatttcaatcacctgttgatgcaaagtctcaactcttcctttcttatgatgtttgcttaagaactgccatgcagagcttgtaaaagaaacaatcaatataatatagttgattacttttttttctctcccctttatgcccctcattatgataccttcattgtaatgcctgacttgtggcaagaatacttttatgtgaactgtatccatagtaataactttggctatcccccttgctctaggtcggtgcccttcaagatgttcgatcagagttgttgaagctgagaggaatattattttataaagttttggaggatttgcatgcacatctttacaacaagggagaatataggtactagttttgaattttcaattgttgttataattttatatactaagacttgaagtggtactaccttagtgacaccaaaataattaaactttaggtgaaaaggctgtactctaagtatttttgttattctatagtataagaggtttttcttacctaagacaatactctagccaccattaagctattaaaacctaaaactgatagaagctcatcttagcttttcattttcttatgttattgttggtatagctgtttgtattataactttctgagacacaattaaccggcttatttcattgaaatatactgcattttgagaagtagaaagttggttctttatttttgtaagtgaattgtttctgagttgattctttctgcagctcagcttccttaggcatagatgaaaaagatgatgatgtaccaaccaccacagctgttgcattttcaatgaataattcacaatccttatctcgaaggaccaggttactgaaaggcgataatcatgttaatgctcatggagatggatcatatagggcagcttctattgatggggggtgagttttgaatgtattttgtaacctcctaaaaattctagatacctctctcagcatcccttgtatgtggttctttagttgtttagaaataaacttattctactaggttttatggttgcttaattcatgtttaatcatcagttgtctgaaatattgtgcacttagatttttttttttttgctaattagtgattgctaaactctaaatttcacaaagttctttatgtgtcacatatagatttcgagtgttcaataaaaagcgtatagattgacatatctgacatgcaccagtgcattggaacatgcaaggtttttatatggatgtcataattttcttcttaattttgatgtttgaatatgcatttcagttcatcttttgatggccatgatgaggatggtgctttggaactacatgatgaagttacctcagatgggcatacaactttagttagggttaatggtggtgaaggtttcccaaaagacgtcaaaactatttctcgtccaatgccaacctggcttttgaattccaccccagatgaatttcttgtatgaaaagctcttactatattctcatattaattttttatgaattatttcagcttccggattgacattttggggtgatacttgatttcaggaaacaatgaaaaagagtgatgccccacttcatgtaaagtatctccagaccatggttgagtgcctttgcatacttggcaaagttgctgctgctggtgctatgatctggtttgttttctaactgattcactactctttgttcttgaagcatctgtttgattgaatctgcacactctacttttctttgtatattcttatatttgagtgacactatcctatcttgcatgctgaattagaacttgaaatctttacattgtgtcatatgtttgttagaatctgtataatctacttttgtttatatattgttgttatatttgatgatggtttcctatcttgcatactgaatgaataggtaaaatttcttaccttgcgtcatctgtttgatagaatctgtattctctactcttctttatatattggttgctatatttaaatgttggttttcttcttgcacgctgaattaattagtacgtgaaatatcttacattttgttagctgttttatggaatctgttttctttaattttttttgtatacttttatattttaatgacggcatcttgcatttgaaattagtgtgtttctagtgtacattattctggatcccccatcttttccccgctagtgctttttatgtgctatctatttttctgcatagtatttttactctgggttggtttatctgtatttaacatcgttttgtatgtctcccctatctctctaataaatttaatttaagttaagttggcctgctaattagcttttatattcaaaagtttttaaatacactgaacacttgataatgatttattttatatttttcttctttgcccagccaaagactgcgtcctacaattcatgagactatcacgtccaagattaaatcccatgcagatgttgttaattctttgaggtatggcattggccagactgcacatactgcaacacctggtctgcatttaatgaaggggcatttagaaagctatcagttgtcaaaacagaagcgtcaaaatggcatatcactgactgggaccctattgacagtaagccctgtctcgcctgtaatggcccccacaggaaaagcacaggcttcagcaaaggaactcttagattcgattttggactctgttgttcgtatatttggtgggccacaattttcctttttcctttgttttggatgctgatacattttctctgttacatttgattttggatgttaaagctaattttcctactaaaactgttcagaaaatcatgttgttgttggggagattttggagtcaaaatctgttcagtttgaaaatacatcaaaatcattgccagtagatgtaaattggaatcctgattctgaagcatctcaagtaactggaggctacagtattggattttccctgacagtattacaggtgctcaacatataatcttctggtagtcagttattaagaagtaatcttctcaaaaacattgtattttacgaaaattttaacacacacactagtccttagacttctcatgaacattctatcttttctgtctttcccttttttatcctttgtgtgaagagtgagtgccaacaactcatttgtgaaattctccgagcaactcctgaagctgcctctgctgatgctgctgtacaaactgctagacttgcgaacaaggtgccttccaaagagaagaggtagtaaatttttttctttcaactacatcatttggaattccaggtcctctgattctaatcctggttattttttgagttactgtcttgaggttgcattgcttcttctagcttttgaaattgtgctatgtttatgctaaatattgcagggatggggcagaagaaggtctcacttttgcttttcgcttcacagatgctagtatatcaatccccaacgagggtatgctctctctcctattaagaactccaaaactgcgttacctatttatgattcttttcttttatgtttcaattttaaacatgttcatctcatgatagcttttttgtcatcaatgtttctgttggtttg

SEQ ID NO: 20880 - DNA, 1724 bp, Cannabis sativa
aatgctaaatgacaataatgtaaaaaaaaaaaatgtattaattatgtgtcaaatatgacccaatgttatattttgtgctaattaaattaacattaaataataattacaataatttctttaaataataatttcttttataaaactatcaaaatatagcattacttattacaccattaaaagatgctctcaataccatacaattgattatgatttcccttaaattaacatgcacataaacaatttttacatattttgcattactgagctccttttctacacgcaagggactaaattaagttgtcattttggctacaaattaaagctacagcaaatcaatattatttttacatacgttacattcattttataatcgaaaatacaaaaatgtctaaagaaaagaaaaggaaattagaaaaatacaaataagcatcgatcttattacatagtcttagtactgttatatatacaaatgctatattagggagtttttatcctatctagtcgatataaaacctgaaaaataaaacacataaagatatattattatacgattatatatgtgtaagttatatgaaagtaaaaaagatatttatttggtttggaaattaattattgtggtcataccagaacagagtggatttcttctagaaaaggaggaaataaagaaatcaatgtctgaatttcttcttttagggtttcatatttttcttcttttgccaagagcacactcatgaaaactttcttctcaggcactagttttacagctacctgaaataaaaatacaactaattattatatatttagttgtgttccaaaagtaataagtaataattaatttatggtatgtactttataagcagcccatgaaatccagccatgccatgatttgagagtagtattataagactcttccactgcttgttccatgttcagctcagaatcctttgtcaagttttgtaacaaggccactgtgaaatccaatgatctgggaaatagtacgtaattaaatatatattcaaaattattgttattattatcattaataaagaaaaaaaaaaaaaaaacagaaggtcgtctattgaacagtaatcgcacgcttatatcccagaacaaaaattataataatcagtacagtagaaatttattagaataacatgtgtgtcaatgccaataatgatcatcacatctatatttatatgtatataattctcacaaatatccatgcactgcaatacatttcaaatcaatcaaaaagattcatttcatactttatattatgttaggataagattaattttaatatgtttttgttttttaattcaggcataagagtcttactatatacaactctttttctttttctttttatataatgtacactgaatagttaatttatgaccattactattatatataatgtttaactaaaaatattttcatggaaattttttcatatagatctaattactgtgattcatgatctggatctatctggtcttcgatggttgatatataaactttttcaaaaaattattaagaaataagattaaattagggaatatatagatatgaatatatgcacaaaaactcacacactaactcctagatagagaaccactctagcctcaaaagtgacgatagaagggtgtgtgttggaggtagttcgagtccaaattatgtataattgtaatatataaacgcttaaatataaaaaaaaaaaaaaa

SEQ ID NO: 20881 - DNA, 7343 bp, Cannabis sativa
tttccatcggctcattgctatctatccgtataatattaaaattctcttcattttacggctatgacatcccaatctgtgtttttttctctttctttttgtaggggcattacatcgtagcaaaaacctgtcgtgtgatagtctcgatagatttgatagcacattaatgtggttatataatgacattgcaaagcaacagatgtccatcttccaaattccaatagcaatattgataataaagaaacacttcattcaattgaaatgacagtaagtaaaatcaatcaatcaatcatgctccctaatctttgtgcgttttggctggctacgacatgaattgtcactgttcttaaagttgtaagggaatagaaaaaaaatgtccaactattagaaagaaaagttgccatgatgcagtcacacaaaccacctcgcttacacaacgctaattggcaagacgctaactcaatttacaatgcgaaagtcatctttacatgtaaaacaaatgactctcttccctgttttctgttttcccttgtaattttaatcgtctactctttatgagcagacaggcaaagaaaaaaatttgtgaaaaaactgtacaatgtactatgaaagctatacagatcggtatgcagcttcagtaatgactcctttcacattccatgtactatgaaagctgatcttgttttccgtttgagtcagatgttgacgaagcagaaggtttcaatgaagtaggttgtgcctgtgatggtggagctggaagggcataagtgagccttgatgatgagttttcaattagcccagctactccagctgcagcagactgagcactcgaagggaggaagagatcgtgtttctggtctttataagcactccaaacctttttcaaatgaacaaagcaactattaagatatgttgcaaaatggagaatatgaaagaacattcacattggattcagtcttctattttaaggtttaagggtctccttgcacatgaacggaacaagtatgtgtttgaactgggaaaagtgaaagatttccatgtagaaagaggacatcttttaggtcaataacaagaaacaaaacagaaaattattctccaaatttttaaacagaaacaatcttgtaacaagaaatgaaaataggcagaaagaagtagatatttttaggacttacatcagaggcatctaatatatcacgcactttagtacaatgggctccctctgttgcgaatgcatgcaatacctgaatccagttcaccgtaagtaattatgcaaaaacttcaaattttctgcattgccaaagcaccatataaagaaagcaacgtagcatttctaagtgagtatttcaagtctaacctcaatagccagcactctgccaatggatgcttcagattcattccacttcatctgagagcagagaccattcctacctccagccctccaatccagaagcccaagaagtacttccacaagaccaaccctgcattgatccccacatataattattatgcacagaccattactgtttcaaactaaaaataaaatagaagtcaacaaaaataagcaatcttttttctataggtgttgattggagccgcattagcacataagatgataaatgttgctcacttgagtccctgtgcaacaagtgcatccctagctcgatttccagcaaccacaacacgtttaagagtctcaagagcaagtatgcttcccccttgccatcctatggctttcatgagaagaggcacaacctgaatcaaataaaaaagataattggattagcaagtgacagcatatagcctatgacgagttcacaccaccatttcatgaatatcctaattaatttaaaactaaataatgaaatttcgagcacattgattacataaaccatgtaaacttgtaaatatccataatataaaattactacattactcccatgtggtctgcttaaatacatgattacactcctatgttttatatatcagtataaaacttttccttaaatcttgattttggtcaagattaatttaaaacattagagaggaatcttggtactaaattaaataaattagaaggtattttggtaaaatcgagctttaagggataagtttaaaattgtttgcagagcacaaagaggtgtttaagtattaactcaaacacagggatgtaatttataattgaagcaaaccacaagagtaaagtggtatgatatttataatataatacgcgaagcagtgctatcacacgcaacagaaaccaaattagaagataaattataaatacaagcaacctacctgaggtgttcctacactagttgcagccatagcttcagcacatgtggtactagctgcaagctgatgtaagacacgtaaacaacttaggcgtacacgttcttgtggtgtttgtacaggttgtgatgatccatcttcaggttcatctgttttgtctgcaaaattgccattgttcggctcacctgatgacattgtttctcgtctcccctcataagccacagccgccacaagcttgggcacatatccaagatatccaacatgatccgcaagtgcgggatgcactctcaataatgaaaccaaagcagcagatagaagcaatggaagttctgggtcaacagcttgagtattataatggctagcagcaatggaggataaatattgatctaacagtccttccaagaatctctttggatttctgaggggaaatttaggatctttcaagaatagcctaacatagattccaccgacctgcatgaatttggaaatcagaataaatgaacaaagaagacacgttaaaatcttacaaataaaatcaactgtcaatacctgtggttcatctctcatttcttgctgcccggatgcttgctcaggcacatcccaatcaacgacacggcctttcatctgttctcggtataaatctgatgccatagttgaaatttgtgcagataaagaagcagccattgctggtgtccatacaagttctggtgtttctgtagtctgctcaacggaagctaccactgcctcaccaggaccatcccgaattattgacaccaagccgtcaggaagaaaccttgctagtgttatagcaactctaggcccatgcattggttgtcctacaagcttccctaacaaagaagctgcagcagctctttgctgcaagggaatctcttctgcacaagtacagtatcagaagaagtaaagaaccatggtgttgaaaaaaaaaagactcaacaaatcaatcacaatgacaattcctaccttgcaaaggcaacagaagttcgagaatgtagactactccaccatgtttggccgcagcccaagcaagttcagcagtgcttgctaatgcataaagaacatgaagagcaccttcacgacaacttggagaagagtgtagcatttgtaacaaaagaagaagactagatccatctgcaaccatggcctccaagcaggatgcatgctttgtcaagagcgacaagacactcagacaaagctgaggaatgttactttctgttgccgcaggcacagaaaagcattcaaaaagaggtaatagcttgtctttcgtagaaaatattgatgccaaatttggattgcttgtgagtaggttctacaaatgaaaaggacaaaggaattaattaacaaattaaagggcacatcaaatggataaaatatacaagcaagcaacatacctgaagagaggtcagcgcaaatttcaggttcaaaaccagtttcaactcttttttttctgccaattctccatcagttacaggtgccaaattatcagattcttggtcattacccgatccactagcaatatcattgcgactctctgatgtctcaagggatgagcccgcgagatctggattatcctgaatatcagaatctggagcacactgattgcttaataaatatgagataaaatcaaccagggcaacacagaatatctccggttcgctgatctcaaaatctggctgatcattgtagactcttaagtaaacattgccaacataaagttctttagatagtgccttgtacacaaaaacatgtgaattcttcagatcatatgaaccatcaggaccctgagttgcacgctgctgatccacaaatttcaatagctctgctcgggttgaagagttccagataatctaaacacacaaaaaattgaaaatttcaatcaatgttttcatcagccaaattgtttcaaaaaaatcacacataaatgaccatgtacataacgaagaacatgatatatcattctatgcacatcatcaatcaaacatagatctaaacacaaaccccatagaatcataacattgaacaaagccaacatgtaaatcaaacttcattaatagaaactcccagcaccaagtatcaatatgctcaagctttactcaaccctgataaaaatctaagtgctcaagcagtttcataaatttagaaaagaaacttgaacaagtcctctgagttcgtctagaattttgtcctcgaaacagggggataaatactcttttgtgccagaacattcaaaagcaagttgaaaatggaaacccttgctgtgaagcttcttggtcagtacagttattgccaagtgagaaaacacctagaagaatgttgttagagcttctcttcaattccaccacagatggaacaaagccattagaatttacttttatccgatgcttcagacatttcaaaaaggagaggttcatggtattctcaaaaaccaccaacaatcctccatgcctctgcttcaatgcatttcatttctccagtttacttagagaatgaaacctttggttgtaatctaagttgatccctacctttttccattgaagtagatgatacataatcatctgttgtaagcctaatggttttttttccttctctatctaatacaatatatattatttcaaaagcatctaaatagttcacccacaaccaacatatacacatttctctggggggagacagtttacctcaggagattccaggttggaatttaatctggacaaaagatctttgtgtacttgatctttcaacatactggcaagtttgggggtgagcatagctcttaaggcatcaactacagcctgattatacggtgttatattctcatcagcagacaaaccacttagccgtgatagggcctgggatgcacgtacagcatgcaaattttttgcaatttgtacactagcaccaacgccatgtgactctgtcgtatctgattcgtctgctgttgagtcatactgaagcagcaaaggtaaaaggtacctaaacaaaccaaattccaaagttaaatgagaagtcaattcaataatgcatgcttgaataagcagcaaatacaaaagtagctaactaaagaacactcaaacaaataattaaatgattgtgagaaaattagtctaaaatacagccatctcctggagccaatatttggaaaaaccgtgtaataaaatgataacttaagaaattaggccatttaccataacacgccagcctttattaaggcatcctgcaattcaggagacacggaaatatgagctattgtctgaagggcagcatcaactgccgaaggtacaagctcaagttcagtacagtgcacgatgtcatcaaccagtccagaatactcgagcatatcagccctagcactctcaaacttactcaacacagaaaacgtccgcatcacattagtaacaataatggctgatggttcacttgcaggagtagttgattgaactacacacatgcaacgggaaagaagagtcgcaataagttgaatcccaccatctctcacaagttcttcaccatttaacaaagaagatgcacatctaaaaatgaaaaaaaattacataaaaatagagttcagtgcatcgagctaaaaactaacacagagcacattaagcttgaacgagtaaaaaagcaagtatgaggattttacgtcagccaaataagctctgatgctgccacaaggagaggagctctatctgaggcaaggaaattgctgtcatctttatctacagtaactgcattgagcaacatgggataaccagcatatttaaatggctcaagcacacttccataacgtctgtacaggatgcactgccctttcaacaatagcaataaccgccaaggctgaggaccttgcaagccttgcatggtggcctataacaatcatatttatttcgttagaaaacttgaaataatatgaaaccataacttgacagctgatatatgacacacaaggaagtcaatttttgcagctcatatttaaagtttactggaatatttctcacttggggatcaatgtcacgtgtcatgagataaaaattgtacacccaccacattgcaaaagttgtccacaaacaaataataatataaaacaaactaacaggttttctcagagttttaagacttgaggagacaataaaaatattgatccatcatgaagaagataaagtcataggaaagaaacctatgctaaataggagggtcaatcaccacccaatatggagtgctcaacgatcatgcatacagagagatttcgagtaaaaatcaaccttttgggagatctttccaccagttgaacacagacatacatacatattatatacatcttcacatcagaccattatttacctgcagacgctcgtaagctttctgtacagcaagaaacttttcccttccttcgggatttttgtcaggatgatacttcatagcaagttttctatattgtcgcttaagtttctcttcatcaatgttttcaatctgctttgatatggatagctcatcgccaatttctaaggattgcttcttattgccatcactattagatacatcttctaaggatatttctaatattctgcaagcttcttcttcagagagatccataggccttcttgtcaactcttcacgccacatcaccagtaatgattgcagaaactcaacatgctcaacaataggccagtttggaaaccgaatttcatcacacaagttccgcaggtaatatcggtgacaccacatttcatcccgtagctctgggtaagtaactggtggcattggagcatattcatacagagtatggcagtgctgtgataatttctggggaaaatcaccaagatgctgcaagacctgtgagaaagaaaagaaattcataactatgattccaatcagaacataatttgtagctttcgattatgcttaaatgtgggggaaaaaatacataaagattttaaggtcatgagcattatcagcataaaaacttctgaagtacctgacagatcagattttctgctcgcattttgtgagtccatataatctctggagtatcagaatcagaa

SEQ ID NO: 20882 - DNA, 1839 bp, Cannabis sativa
aaaaaaaaaaaacaaatcatttataatctcttatactctattttatattattctattcttgcatattattagtatctataaatatcaagtagtgtatcagttgggagaaatagaaatgaaacaggggttcttgcttggtaatttttacactataatggtttatgcttccttaagtgcactacataataagcaattaattaatttttacattcattaatgctaattaaaaccgtgtgtgtgttgttacaccctgaattgatgacaccaaataacatcttcgtgaaaataattttgaaaacattgtttgaagcatccaaaatttataggtcgactaaaccacaattgatcagttaacaaaaacaataataatttttatgtattactttccaaaatgaattgctggttgaatgtaaatgggggaatggcacgcaaacttgcaaagccagctgtatggggtgtcatttaacaaaatcgtacaagttccccaaatgggttgattacctaccatcataaaaaggtaaaatggcatcacttgacactaaacaaaaatcatatgatcctttaatttaattattaaaaaatatttgaagaaaaacaaaaacaaaaccataagcatttctttttagttaattcgatctaccacaagttagtggtgaggaattttaattaacgctatataccagaggagagatatttcagcgaaaaaaaaaacatagaggagagataagtggatagagaagggtagagggggagagacttgaaaggaagaggtcttagaaaatgtcttaatttaacactattttaagtcacattttatggaatgattttattatgatatatttgtaattagtgaaatgccttttgaaatgtgttctccagcacgactacacaaaataattataatttatatgataaattagatatttttatcactttaattcgtaacacgacactaataattccatagatatttttttgagacttctaataattccatatatattgaattttatatacgacatgattgtgggtgtttatacgtcgtacaatctcaaaaattctaatttactgcgtaaagcttcttttacaatttcgaaatgaatctttttttctcttctagaatattctagaacactctagaaacgaatatggaagatcatgtcaccatctaaatatataatttgtgattaattgattttcttgttctgttttttttttttttttttccttttttctgaacactgtaattagttgctttatattctcaaacatttagcttaaattaacctattgattttttattatttttcgaatgataaacttaattgcttattctcaagtagcagtaacttgaaatttaatataatatcaaggtcacaattaaatgttctattcaaattgctacaaatagagagttcctctcttcattgttcaactcaccaaaaatatgaaattcactagttactagtctctctctttgaattttatcttttctgcctttgttagtagttgaagctaattataagttcaattccttcggtatcgaatagctttggatctattcttcaatctgatcttggtagtgatttgaggccttgtttaatgtgttgggtgtataacaaggatgggttttttttttttttgatattatctactattttacaaatttttatcaaggagaagtaagtatttgaactataataattttcattaatttaccttaaagttttactttttttttaactagggaattaagccgcgcttcgcgcggtgttgtcaaattttataattttttttaattgatttacatttttatactaattgaaaaatcatataaat

SEQ ID NO: 20883 - DNA, 2507 bp, Cannabis sativa
taagattccagtatatctcattttaaaatattaaaaattggacatcaatacatataatttaatataataacttttagggaatattattagctaatcgtaacgcaacatgtagagaaagtgctacgcaccacttgtgtttaataagaatgctgaatacataacaagccacaaggtagtagctccaagtaacaatctaaaacattaatgatattatattgttataattgtgtagttaattaagtacagagtttgtattagtaatagtagttgtcaccggggcatgacacttgaaacggtgacactattaatggagcaagagtcaactatgaatctccccatggagaaggcaggtggttttggttggcaaagagctgtggattccccgttcaacattacgacaacagaggacatagttggcctctcatgtgcatctttctgaacgcacatcaatcctatttggagatatctcacgaattcatcttggtcacatgaatcaatcaccaatggatccaccagctccaacgcttgtcctccttgacatagctgccacgtctaatatcataccatttcaatcatatcattcggaaatacaatataataatgttgcttaagaatatatatatgaaacacaaacaaacatagaaacagtctcacgtatgaaagaaggcaaggagcgagtttcgtaagataaaagcatgcgttccttttcccggtgatgatttcaatcaacaacactccaaagctgaaaacgtcagacttgatagagtataacccctccatggcatattctggtgccatatatccactaattaatccaaattacagaaattaattaatgatttaggaactcaattaaaatgttttgaaactcatggcttaatttaattaagagcacaatggcttactaagtcccaactattgtggcagtattagcttgactttcagttcctgcaaaaatcctcgccattccaaagtcggaaatcttgggattcatatttaaatcaagtaatatgttactggctttcaggtctctgtggatgattcgaagcctagagtcctcgtgaagatagagaattcctcttgctattccgtttataatcttaatccgtgtgctccaatctaggtgtgcacgttttcttgaatctaaccatcacaagtttgaaaaaattgcactttagctgtaatataacatgatgatactggaacctgaagtagaggatatatagttcagagaaaagaataaagctattttctcaagttatatgaatagcaatatataggcaccaatgataccttttaggatttctcttattttattacctaatagaatggtgtctaagcttttgtttggcaagtattcatacacaagcagcttttcctctccatctacacagaaacccaaaagcttgacaagatttttatgttgaagtttcattatcagtagaacttcattagtgaactcttctgaaccttgctcagataatatagagagcctcttcactgccactttctttccatctcttagtaccccctgaaaacaaccatgcattttttgttgttgaataatctaattgattagatatttgacttccttttcagattgaacaaaaagaagaagaaaataaaaatattgtactaatattaattacctggtaaacagggccaaaaccaccttctcctaacttgtttgaatcagaaaagttgttagttgcagcaagtatggatgccaaaccaatatatggaaactcctgatcatctccatggatgttcttactagaaatttgtcgaggattttcattattccctgaataaggaatcaaactgtagattaagtagagaaaaaaataaagaaaaagacaaggcaattatgtcaacaaaatcttcattactctttttatgtcttctgttaagtgcataacagcaggcatatgaaccaagaacaactatcacaaaacatgatatagcaacagctaccagtgcaagtttccatctttttcttccaatatctgcacttgaaatcaattaattaggtgatgaatatatagattttaatattatttgtgatgaatagatatatacaaaccttccttattcttatcattagccatagaagcacttgattcacccatataaaacgcgtataactcatatctcaagtagcagcttcgactaagaagtctagctccaattgagtaataataaacatccaaaatctcttctgtggcacttccaaggcaatccttacagtcatctggggacaagtctctagagcattgcactaatgcgtatacagtcttatccatataggaaacttctccagttgcatacgacaatgaatcgtgattataagcagccgtctgagtcagattacgcaacgttttggtcataaacgatttaaactcttctggctgagaaatattttgcaagttacgtagtggaatgtcaccagtgtcgtcactcaattttccgaagaagttgtcgttggagtagcgcaactggcataactc

SEQ ID NO: 20884 - DNA, 1727 bp, Cannabis sativa
aatgaggaattaataagttgagaatttacttgataaattctagatctacttattaaaagctcggttatataggccatggtcctctcactagttgagagaatagtaatatatttattccttcttcaatttttctctaacggagactttatagtaattttattaaaattgacacatgtcgccattatattagtcaaaactaattttcattcaatagttattataaaaactaaatagtaccgtttatctcaaagatgctgattggtgaaattattcttctccaaatgatgtgagttggtattgatgtaagattgtcgcgcttaaagatgctcaaacatctccctgattttcaaaacccaagtataggtacttatcgtattgcaaaagtatataaatcttagagtattttgcagatcaagttgtgtgaaatagaattgttatttctaaacatatgtttattggatggttagccacctctaatagacttcatactcgagacagattgatgaacatggggattattcctcataacacgtgtcttttttgtgattgaatttcagaatcaattgagcctattcgattacaatgttgttatggtgcgtattgttgactcatttaaaagtttggttgggctggaacactacagcaaggtcattaactcagttagttaggtggattactaaaagtagaatgaattatttccgaaaggttgtgtttcaaactacccttatagttgttgtctatgtgatttacaaatactattttttaagagtataaagtttagaagagagattattgctagtggttgtcaagcatattctacataatagggaaggcaaattcattcccataaaaaccaaaattttagtaggtttgggctttgaaccatgtatggattgtttgtgtcctttttggggggttttatgtacggtaaccttttaattgctttttggtggtttgggagattcttctcttgttttgtacagttttttgatatcaataaactttttacttaccaaaaaaaaatagtaaatctaaaaattaaacttaaataaattatatttttcaatatagaagacaatacaaaagagttaaaaaataatattaaatattaaaataataatttaaaaatgatagatctattttatcttaaatttaattttagaatagaaattatattcttttaacaaattagaagatacatatattcaaaaaaatatgaactctttttgtttaataatttttaaatatattttaattaatttttgttatatatatatatatatattatttttaaacatgtgtcattttagtcaaatttaacacttttagcataaaagagtgaattgcaacaaaattttaaagatagagagttttaccactaaaaagtaaaaatattttgagtaatttgcggcaaaactccctcaactatcaatttacttgcaaaaaaccatccaacctcatatttttggtaggaaaatcctccaaagttctgttccatttacttttttaaagtgttctctgtccagcctcgttaagtcctaattttgtgcacatggcaatgacaggtcactaaaaaattatcctacgtggtaatattttacaaaattaaaataaaaaatttgagtaatttgtgacaaaactctcccaactatcagtttacttgcaaaaaaccatccaaccttaaagtttttttgatggttttttgcaagtaaagtgatagttgagag

SEQ ID NO: 20885 - DNA, 1865 bp, Cannabis sativa
  modified_base (1668)..(1670): a, c, t, g, unknown or other
agaatttatacattaaatataaatatgaaataaatcatgtgaaccatgcaacataaaatcatttatgatctttattaattagtaaatctgattatatggaaattggtgttatttagagcacaaaatccaacacgaaggggacaggctaatgtcccactttttctttgacaacttatatccaccacattcaagaatccttggaaccacttggatgaccttttacacataaggtacgcattgatgagaaatactaagatatctaacattttatatcacgtaaaaataatttataaattgtactaataataatatgttaaatactacaataccttatagcaatgccataagatttttcaatttttcaattttttgcttttattctttatatttttttaaggaaaaatcataaatagacatctcaaccaccaagacatagataataagaggactaagaatggtcctagtctcttaattttacataataataaaaaaaattaatttttttttcttattttttatttaacatgtcaattcagagtcactaactgttaatatttataattcataaaatgagatatattagaatgattggtggtaacaaaatatgaaaccaaagcaagtttagtatcactaaaggagagacaatgaagtgaaaaggagaagataaattaattaggtttagtttgaactgcagaaatggaaaggaccaaaaaagaaaagcaagaaatgatgtttaatttcttatcttatctttagttttagctttaactttaattaatttggtgtatatcatgagatttgagataagtctagagttaataacccaattatctcttgcaattttttttcattctttattgcaagttgggttttcctttttactcatgtgtagttaagaacaagccaaatagaaaccattaaacgacaaagcataaatgatgtcccaacccaacatcatggccacactctcccatacctaacttttccacttattagctttgccactagtggtacttgtgtttttaactatgtttccattagttgataaattttcaaataatcttaatatttacaaaacaaataatcacttgttgcaaattttgtttgtagaggaatagtgttatttttggaattttatatctcattacttcatgaaatgtatctaaaattactcatatttggtgaggtatacatttcatttcaatttgttcattcgagtgtaagactttaattttaggtttatattaacggtttaattgctctattaaaatatgagttgattgatagttttcttcttaactcatatagttagtgatttatagttaatgagtttaatatctgtgtcaagtttagttaaagtaaaagtataaattttttttaattaattgaaactcttgatgaggagggtcagtcaattaagtttttttgctaggtctatttcctaattctatatatatatatttttttttattacaattatatatttcgattattcatttgatatgaatcaatatatacttcatttttgttatcgatatgaatcaatcaaataagattttttatagttttttcaataatatgtgatttagtatctctggtgttttattgattttttgaatatatacggaggaaattacattgtatacccattttattttatttattttnnnttttacttttatttttatattctttaagatatacccacttttgtagatgatgtctccattataccccttaagttaatataaattatgtgctagacttatgtaaaagtgtatattaggcaatcttctcaaaaaagtgggtacattttaatgaaatataatatgaaaatgttcttgattaatggatacaaaaaaata

SEQ ID NO: 20886 - DNA, 2466 bp, Cannabis sativa
aaaaacataaaacttactgagatggaacaagtggagtgtaaaccatgtttggttcaacaatttcaccaagaactaaaatgccaccaccactattgtctcctttaaagcaatgagaaaaaacatttggtgctattccttgtgaagataactgcgaaatcgccgacatttgttgctgaccaaacccgaaaatcccatcaactgctgcatttttgctagttaagtccccagttgctgaagtactacatctgtttacaaaaagtaaccggaaaagacttaattttgataccaattcggctaaggaatttgtttttcgagtttcgttttaatgtgaaaactagttgaaagcacataaattcttggtgggttttgaaggaagaggtaaaaaaagtaactttacactagtagtagggagtaaatttgtacttcaacttatttctgtgattaatgttgtcttttgtcatatgacacatttatcgtttactaaaaactgacgtctgtaaaaagtgaattgttatatagaggccgaccttgagtatagacaaataggacttaaataaaagtgcaaaatttattaaaaataccatcattttcttataaacaaaagtatctaaatttttcaaaaataccattttgtagataaatattacaaaaatatcactagttgtcttgacaccaaaagcataacccaacacttggcgatagaaaacttatatagtttccaacattacaatacgagtcctatttattttaatttaatttaaaatatatgaaagtaaatattaaaccagtgttactttttctttttactagtgataaatgggatcgaaaaagctcacccgaaaacgatattggccgacgaattagtattagtcggatcgtcgtaatcggcgggaacggtgtccatatagagcaaatcttgaacatagtaaccagatgttccactaccatctccatattgaaatgagtaaatacattgatcaaagtcagattgaccagaacaagcagagtcacctgattgaagtccaagtttacatatttggtctgaacacgaaaccattgaagctgtgtttgaactcccaacatcaaaagaattcaactcaatctaatcatcaaaataataaacccaagaatcaaattctttgcttcactaaaaaaaagtcaactttttttcaattaaggtaactagttacctttagtgaagttgattttgggcaacctttacaagaattacaattgacccataaaacatcacttcccgtgtcgatttgtacatagaattcttgtgaaggagaacccaatttcacacgtgtgaaatatagcctgaaaatttaatcaaagtttcaatttttattattctttaacaaaaaaaaattatatggaaaattactattttacccaacgagatatgggttgaaggttccggcaacggggaaatcgacgaaagattcaccggtggattgtaataaccggccgtgccggagtctgtctcgagctctgagttgactcagctgaactcggtgatttgttggaaatgctctctccaaattcattgttgccggaaaaccgtacaatactgccgccgcctggagcagagtggcggcgattaggattcgggctcgagtagctctggccatggttggtttctctctttctctctctataaagggagagactttatagagagagaaagagaggaaagaaggtagttgagaaaggagggaattctgatgtggctaggaaataactgttaactgaatttcaaatattgaaacgacactgtcttttgccgtttcaaacttttatctttaatatttaatgtattattattagtatgtttatgcttgagttttattttagaaaagatatatataaaaaataattttagaaaattctaccctgacctttgaaggaggtgtacgtaccgatgcacttttatttgttttggcatctgtgaaaaaataatcatctatgttgtagttatttaagatattctataaaattttaagaaatttaaaaaaatttaacatgacgaaagtagagttcaaacaatctattttacacgcgtatataaaataaaaaaattacacgtgcaacaaattgtttcaaccatatttttactatgttaaatttttctgaattttttaaaattttgcaagatgtcttaaataattataacgtagataactatgaagaaattagattaaaaagttcttttagatatgtcgaactagataaagagtgcattgtatcccttatgactttttaaagtatttttttttgaataaatgactttttaaagtattattattattattaattgttattattatttaaatgaaaatctatatatttaggttttaattttcaaccgtgactatatatatttagttaaaatatgtttatttttaaataatttgtattaatgtaacgagtcacaaagtaggagcacataactttttcaataat

SEQ ID NO: 20887 - DNA, 4151 bp, Cannabis sativa
actaatcaagataaaaatacttacaacaatttttgtgtcgttctcaaataagcccatatatttttgcagtgcaactttgcaagtgattttcccttccatgctatccacattgtaattctctggaagaaaattatcttgggaaggatcccaggtagagctatcaaatccaaaaggagaaatagccagcttgtccctgcaaaaaatgatagaaaaggaaaaaggaattgaatgtgattgaagattttatttacaaattccaattccattactggaattcaggtgttacttacttgtgaatgttcaatgtgggttccaaaccctgattttgactactaatgactttgctttttgactgtatggatgacataattataattttgttggcgtacacaattccaccctgcaaattatgaaaaacttcaatggatgatgcaatgctaaaaaggtcagagcctctaacaaataagtgattttgtagcgtgtgctgcagtttgtatccccctctgtcataataacaccttaatagcagtgatttcttttccagcatacatagaatctaaacccaaacataagataaagatgggaacgagctcattggacttcgagctcattggacttgcaaatcttgataaataccaatgtatattttcaatacggtatttaattaaaatcctgtataccatgttatatgacaattacacttgaaatttctaactagcttttaggtgaaaagggtctaactgcactttgtgaatcataagattgatgcatataaacacttcaacttaacatcaatctcaaaaaacgataatattgttattaattttgaaaggtgtaaggagttgctcctaacatactcagacaaccagttcttgacttgcagttgtatttgcttatctatgaattatgatataacaaatcaaataaaactcatccaagtccgaggttttatacatgtatatgcaagaaatgaaatatattactaatgttaattacaagtttatatagcatcttctgatgaaacttcttgttaaataaagaaaattatctccataaagaaagaatgaccatgcatgagaaacatgtgtaccttcaaaatgttgacaaggtgtgtcttttcattatcttgcaaacgatcaggacggtgaagcctagcaggatccagtccacataattctagtttatcagggtgttcaagatgctatggtgtcaaaacatggagcacgtcgtctaatgtcaaatagatgtttaaaaatatgtaacgtcagaaaagaaaattcacaaaactcaccgacatattcaagttatggcatgtccataataatcttgtacctccaagcccctatatatgaggtaaaacaatcattagcatgagcatagggaaaagggaaaagctttcttttgagaaaataaatataattcattgctgttataaaagtaaatttcactaaaacaagtcagttgccccatttcaatggcagaatatatcggcttagttggaatataccagcacctttcacttcaggaagtctttgcttttcttcactctaaaacttttaagcatatttactaattagtacatttgatcccttgactatttaagattgacaatttggtcccaaacatttctattctggcatatttggtccttgattattggtctctgaattttcaatttgggctcatttgctaccttgacaatttaagttatgatgatttagtctccataattgttacttaaccaaactgatgattagtataaataacttacttcagggaacaaatcctcagtcatcacaaccaaagtcaaaactgaaaaattggagatcaaattgtcaatggaccaagacgattaactacttttaacagactgctaatgataatgtttggattcctctttccttcatgtactaaagcaaacttcctgcatgttacatgctaaagaacaaagacttgtaaaagtcttcatattttttatttttaataatatacaagtcatagtattgacagaagagatccatcaaagtttgagctaacttttgatcattactgtttaactattaagtgaaactaagagcagaatctgttagatgcacacaaaattaagacatctctataataatattgctatttccacctgattagcaaaaatatcccaaaaaagtggcccaatgatagcagtctcccaattgtggatgtgtaacacatcagggtgctttcctgattttactatgtaatccaaagaggctcgagaaaaataggaaaacctgaaagaaacgagatgtattactgatactaggattgcatagaaatttatcgaaagccccaacattttcacattaagaaatgtctatagtcccagagagagggggaaagcagtgcctatgataaggccaagtaggaaaactattaatatgatggtgtagtgaactagcagactgtgttaagagagtaacttttaactactaaccgttcaaagtcatctggatacccatacaccctctcacgactgaaaaaggatgagtagtactgtggttcaattaaagtaactccaatgccacagacaacactgtaaaagatagataaagagtccttatattgtgtttgaaatgtagtttgaactaaccaaacaaatgacaatctccaaataaggagctgaacttacccagtccaaattctatttccatgcaattgaccattaaaatacgaataagattccacctcaatttcatgcagcccttgaacttcatttaaattgagggtctcatacctatttacatggtgaattccagaaggaaaccagagagtaagtatacaactactaccaaaattataattaaaaaaaaaatcttccttgcaattcactattattccaaaataccatgggcctacaatttcagattgtcttttcacaaaaaataaaagtggaccattgcaaattcaaatgtatggaatcaatttaatgctctcttgcctattatagttacacacttgaattcttctgcctgcctgaaccttaaagaaggcaataataagcaatgtaggaaagacaatatgcataagaggttgcatgcactggactacaatagaccagactttctatactcattactcccctaaaaggaaatattcaaaggcaggcagaaagcaacctcattatataacatttatgcatcatgttaccacaatctattcaggtacaatgaattatgttttgcaaagtaatttcaaatgaagagtatctcatcacaatgaagcggtatttatgtagtcgctattaaagaatgaacaatgaaaaggtccagagattactttggtaatatgacctccaccaaatgaccctttctctgcaatgcacgagataagcctgttatgtaagaagccatagatccaactgagatcaatggtgccatttcagtacatatgtggacaatgtaaaatccattcctggattaagaaatttatgttagaacagggggaagaaaaaggagaggaggcaagagaatagatagagtggaaagacgaaacataataataaaacaacagacaatggaggaaacaaatatattaacaactttaaaggagcaacatatcttaaaaatcttgaaaaacataacaaagacaaatgatagatacaggaagctttgattgtgacagggatgagaaaaaggcattttaaaggcacttccatacaatacagatttcatgttgcagtacaaaggacattctaaatcgcatatatgcttatgagattttatatttatttcaggtcaataactgagacggtcggaaacaaatttaaagaagagcccatctttcattcatgaggattacaagttatacaccaataaccaagtgtgatatttcttataatgcaatactttaccataggcatagcatccaaaagtttcaagggataaatgtgtaaatgaataacttcagtaagaaaaatgataaaatgatacccaaatatctagaagataattttacttttttcttctgtctgaaaagtgtcgaagtgcagctagaaactcaacatctttcttctgtagtgtgtcaacaagaagatcatctatactgtctttgtgatccatgatcagccttctcaagtcagatgcctcatcagtgctaatcatgccagtgaggaccat

SEQ ID NO: 20888 - DNA, 3463 bp, Cannabis sativa
atttaagtacatgttataaaaatagacgtcttaactatgttgatatgtatataaatattacatgaactaaatatgttgtgtctttatctaagagaagaggtttactaagaaaactagtgttgataattgatgattaagacaacattaatattattcaaacatttttaaaccacaaataaacatttggtttctatatatgtttagtcgcatgagtaacatccaaatattaaatgaaataaataataattaataaacagaacacccatatagatatatacttttcaactctttatataattataataaaaaataactaatcatgattaattaatttaaatatatgattatatgactaaccgtttcagatgatttttttttttggttggtgaatgcaggtgggagagttggctggaattgcagtgggagcaactgtgatgctcaataattttattgctgggtttgttgaaataaacataactcacttaataatcaatataattaagatccattaatctcttcctcatctttgtccctggttcccacaatatatatatttattatagttctatatatattatatgtgcatgcacaatacatatatacatatatacatacatgcatatgcatatgatgatgatgatgatatgtatatattaatatatattaatgatgcaattaattaattagtactagagataattgaaaagccttttaattggtgatatatatgtgtgtgtatatatgtatatgcttgtataggccaagatcaggagcttcaatgaacccagtgagaactttagggccagctgtggctgcacataacttcaaagcaatgtggatttatttccttgctccacttctcggagctcttttcggggccgccacttacaccgccattaagttgccggaggaggatgacggtgaccaaggagagaagccctctagggcaagaagcttctcccggaattgatcatgacatgcatgagaaaaaaaaaatctataaataattaattaagatgatgatgatgatgatgaagaagaattaatataatattatactattaattacgtacgtgtgtggtttaatacatgtaatatttatatatatatgtatgtatactactatacgtacgtactgaatcattagatatggaccatcatgtaatgctatagctagtgacgatcgtagagatataaaatatgtatacgatatatatatattttataataaggtcactagcctagaagctaagcatgcatgtacttattaatgtaatatgaggctttaattaatgtacgtatgctcttctgtataatatttattaattattgatattgaactctctatatatatagttttcatatatcctatatatcgtgatgaataacctaaaaaaattaccttttgacaagtcaatatacgtatgaatattaacatatcattactaaaaaaaattaatatctatcttatagtgataattttttattaacaatatataattattttttataataaaatataatatttaaatataaattatcactaatttaattttattcacaacgattaaaaatacatttaaatcagattttttgtgattaatattacgtttagtgaccttttaatcacataacatataatgttaatttctaattatttttaatatttttatttttaaatataaattttattgtaattaaaagtcaaaaaaaattgtagtgcttatatataaaatactaaaaaaaaaagaataatggtgtgtttaaaaagaaataattaatacaaaaggaaaaacaatgagttccatacctacaataatcagcgagatatatagatctcgaccatataaaccctatttttatatccaactaatttcaagttcgtgacacgtttattgaactcctatctacttataattaatattatatatattcatagaataatccaatcgatgatctaatgaccataaattattaatactctgatcattccacaatattaattactatatatatatacataatacatgtagatgaagatgtataaaaattataaatagattatgcaaaaaaaaaaaaacatatactaattatatatattatatccaagctggattaacgtacatgataacaaacagttaattattaataacgagacatcatcactataaatatatatatatatatatatatatatcaaaaatagtttatgcagaactatatacttgtttgatcaaatatgtgtataacaaaagttaaaagttgaaactaattataattttcacaaacaaaattaattagaaattaataagtggctcaaaacttacttacaaatagttggatcagtgagtagatgatgagatgatgaaattccaatattcatgataataatgaagattagtgaagagagaataattaacacacttcgaaaagacttaattccaaacaaattaagccatatatatacatatatataacctatatatatctcttcaggactatatatatatatatatactctctctctcaacttagctagtaacaagagccaaaagaaaagaatatattattgcactcaattatgtcggccaatgagaaagagagttttatatatatgtgaagagattttcgtggtggccaagcaatgagttgagtagtactaataattcttgtgctccaaggagttgaatattaatatttgatcttaccaaaatggaaaataaaaagagtcatgaaaggtctatttcattaatggtgagataagaagtatagtactgtagattaatactagccacatttttaccaatgtggttgctctccattaatttttcttttatgtatgaaacgcactatacattgttaattacaatcttaattaattaattagctctaatattgattaattatatatatggctatagcttgatgatcccatgtgttcccaacccaactaagtgccttacgaaaacaaacaaattaaaacaaaaacttttctactaatagggatatattttgttggaaacaatgggaatggaaagataattcatatatattcattttgtttggtttggaattcttaattttggcaatgtaattccattattaattattggaatcattattattcttaatttgcattccaccgttgcaacaatgggaaatgtataatattatataatttccattccaattctactttataataaaattgaaaggactattttgcctaactttctttgagaaaataaattaaattgaaacatttttgtcaatataatacgtacaatatatgttccaattaaccatggtttatattaggagtgtcaatgggtcgagtcggatctgatctggctatgatttgacttgatccagattatgtaaggatttgtcccgccccgtcccgctagatcagatactcggatcgtatcagatccgactccttattcggatcggataagatccg

SEQ ID NO: 20889 - DNA, 3233 bp, Cannabis sativa
taataaaattatattggaataaatgtaactataatttggaataaattaatttattttacataaattaatttataaattatatttttttgtattaagatatatatattggtatacattcttaagacggaacttagaaaatgtataactaattacaattttaaagttattcttatttataatttgtctaaattgggactttaattttttataataaattagagattattcttgaataaaatatttttatattattattattattatttgtggtttttttaatatgtacaaaggttttaccatgaatattgttatcggtataaattgtcggctactttttatatgtcctcgttggaaagaatcttataccgaaggactatctaccgatgacttgtgctcagtaaagatttttaccatagacattttgacctataccgagaacaaaatcctcgttaaaaactttgttattttttgtagttatgtactaacaaatattaaacttgcactcgtctttattcaccatatttaaattagtacaaagaaataactatcatttatttttatcaaaacacaagcatatcatgcatgaaaattttgcataatatcttctaacaataatgtaatattcaaataagaagatccttctttttgaacagccttctttgcctggatagcaaattgtttagctcttaatcttctctcttctccttcttttcctttatccatcaccatttcaataccctctttaacacgatccctcttaaccaaaaccccatatttttcttcctctccaattggaacaactacttcagctccaactctcacaccaattttcttcacctgaactataaatttctcattataaaattgctcagcaaataatggccacgtcaccaaaggcacgccggcacatactccttccagtgtggagttccagccacaatgtgttaagaatgctccaattgctttatgggccaatattaacacttgtggagcccaacctcgtataaacaggccacggcctttggttctctcttcaagcccatctttctttaaccaatcttcaaactcatcacttttgtaggcttttctaatgacccaaacaaatgggcttttcgaggcttcgaggcccaagcccaattccgctagttgcggaggtaggagtctgttcatactcccaagacaagcgtaaacgacagagcttggagcttgtagatcgagccatttcaagcaatcttcattgtcaattgaagctttattacctctctcagctttatccaaatagttttcgttgcataacgaaactggtccaacgcaccatacttttcttccttttacgttttttttatactctctcacgtattcgccttctaactcctcgaaactattcaccaaaacgccatacgctccttcttcagcttccataactcttttgcacgtggcctttaaaaactgttccgagcgtgggttaaaagctccggacaactggcatttcatgagctcaacccgatcaggcaatccgggaataatgaacggctcagattcagattcgatggtttcgtggattttagacacgtgtaagtgatgagcgcatgaactggcaaagcaactaagcccatcgaatgaaattttcgggatccgaaacttttgggccgtttgggcagcccaaatgatgttcttgtcggctattatgcaagtaggagtggggtttagttgttggaagagttgttctaatggttgttgtaataagctaacggcagacatgaaattcttgaataaactcagagaagggagagtgtcggtgctttcggatccttggggcaaacccgattgggccagtggaaactggagctccacgatctggatcgggtaacctgattgaatgtcacggtcgatgattgagttgaatcggacggcgttgagtggcgtggtcactatggtgaccatcgcgccgtgatgggctagcaatcttgctatgtctatcatgggaatttggtgaccttggctcattaagggtatcactagaaagtgaagttttttctgggcttgtatagccatatccatgctttttttttataactggatatgctcaaatatttggctctatggattatgtactcggttgtaaacatttttatatatataagagtgctgtgttgtctatccaattcatcgagtaggttacaatactcataatcgtataatatattataatatatgggacacttaaatttcctctaattgcacttgttgtttgattatcttccagatctaatctccatgttctgacgtaagagcatacataacaaaggttagaactattactagtcgtatataaaatctgaagaaactaataagataatttattgtacactttagtaacaagttttttttttttttttgatgcaacactttagtaacaagttgtgacgagctcgatcttgtgttttaataatgtcgtataatattaatacactattaattatgggataattttttttaaaaaaaataaaaactagagttagtactaattaaattttaaatatttttataattttatttacagaaaatatgatattttaatgtatttttatattatatttattgttaatgttttattatttaaatgttatttttattattgttttaatgttatttaaattttatttttctattatttttatataatttttttttgttattttataaaattttgtaaaagaaaatatatttatgttaattttttttatataaaatatagtatttcatatattttgaacactaataaataaattgattaaaaataataaattaattactcacaatattaaaacaaaaaatattaaaatttacaattttttgatatatttttatgattttttttttttttttgaaagagttttctttttttaaaaaatgatcctattaaagtcagcccaatgagccatggtggacccaggtaacataacaccggcccgttgtccttccactgccgagaacgggaggtgtttgttgctctgtgaaaccagcctcacgcattacactccactttaggagcccagtggatcatactttcgtccaaaccacaaggcccaactcccagcttggaacgggcaggccagtagatagctagttctgaatccagcccactaggctaagccaatgtcccttttcctgcatgcctccacttggattacagacccacgctacaaggcccggccacgatatatttttat

SEQ ID NO: 20890 - DNA, 3941 bp, Cannabis sativa
atactattgtaaccacatggtccagtccccattgatctaggcacaattaaatcattacaaatatcatctggtatagccttcaatactttccatgacatttcagtagtattatgattactctttggacaataactcagtgataaaacaccatgaaaatttagagtaactttgagataatgcttagaaggtgagacaattgcatcatctgattttgcaatgcatatttttctatcactactcaataagtacaaatttccttttgcatcaaagttgatttgataatcatgaccaccaatattagagcctattttatggtatgtaacaggagtttcaaaattgaacaaagatgtgaaatttagcaaaacattaccattttcatgtaaactaaacttgaattcacccggtgagaaatctgttaagcttttttgagaataaagcacatcaccaatcttcatggtctgagtaggaagcaatgtatcagtagggtgtctgaaactctcccatatgactgtcctattctcatcaagcaaaacaaagttgcctgtgtccttcatcaagccataacttacaaaaccgcccccacccccgccctcgccctcttttagctcggttttccatactacttgatcacctgattgagatgagctggtaataagcaccaagccagtgtggatattgagctcaagggtggatcctcttggcacagtggttgcatttgcatgccaaactatggttacatcaggaccgagtttgtagtaccatatggcaagcaagtaatgttcatcagtaaaatgaaaatcaagaacattatcattgttgtttagtctgtgaaatccaaaggcaaagtctttggatggtgaaagccaaaaggcatctttatcccctgcagtgagagtctcattcaatgtcactaaaccattgaattgagataacacaacagaaaatggtatgaagagaagagtgaataggtgactcatttgaacaacaacaaacattttgcctagtatgtgtctaagttttaagatataaatatatatttatgtatgaaaattgttagggagggacattatttttactcgtgtagtatacgaagcatattctgtcaatttttttaaaatttagaataatttacagtaaaatttaaacagttgaacgcttctttatttatttatttacttttttttataaatataagtgtaacttactaatttgaattgtatttttaacaaattattcataattttctaaaaacaaacaagatgagatgtattgtaacattcctgcttcaagcttttattggactaccctcacagactcatgactcttatacacgagtacgtcacttttggttgctttttggagtgacgactgaccctacaaaccaatacgagtatttacaggtcacacatcttaacattactccaagtccaacatgcttaattttagagttctcaagtgatgggccaccaaaaaataagatgcaccttgttgatataggtattacccatcaatccatttaagtcatttttaactgtgtagtctcatacttataccgtctcagaatcatcatacttactttctctagacgatgtggaattgcaacttataccgtatgtctccttactcacgagacttgtaacatgtatagacaatgttatataaacaacctctttacaatagtgatgccctacctaataagttaccaaaatatatataaatatatatttcgtttgtgtatgtgactatgttttttgtttgtttataattaggataaggtttttcacctagattttcccacctcataagattatttatatgttaatttccttaaaacatattgagctaaccataggttgataatgcctagtttggtgcgtttcctaagatgctttgtaaggaaagttcatagatagtacactccataaaaattgattcaaaaagcatattctaacaaaaagaatctcataaatgtgtgcatatatatattatatatatatcttgaaaaacatgggattaaaatacatatacatattactatgattgtatatgaccatagtatatacaagatggctaggtatgtagctatttggtagttaaaactttaatgtccatactaaaaaagtcaacaaacaagacataagtttcttgttctacctgtatagctgctggagtttgtttgtatatgtataaatattatatatatatgtatatgtacaaacatcaatcttaaatcattgttaaactctgaaagctagtcttattgttttctttgacatgatccacccaaagtcatatttcaatttgtcacaatataaatggtatttaataatagttttgtttttaaattttttaatcacaaagataaaagtaattaataaaaatatgttctgtaaccacttttgttttttaattttaaaaataaaaaataaaagtgtttctataattttatttgttgattttatttgaatcgggttcgggtctgagtttggggtcgggttcgtgtctggggtcgggttcgagttttgggtcgggttcggatctagggtcgagtctgggtctagggtcgggtccgaggctggggttctaggccagggtttgggttctggggctgagattcgagtttgggtctgagttcggggactggagtctaggtctaggatgagattcgagtccaggtccgagtttaggtcccacaatccaggttggggtcggaattcaaataattgattaagaaaaaactgtttagaaattttttgaagtgacttttttttgttttcaaaatttcttaataaaaaattaaaaagtgaaaataattttataaaatatatttttgaaaaatatttttatttttctatttaaaaaaacaaaaaaaaattaaaaaatattaccaaacacaccctcaaattaaccaaattaacaaatcattggaaaagagtaagatgttagctaagtggactaaattttttctatttataaggtatacaatatacattgatcaaatatggttagagcaagctaaccaaggccaattctgaaatttagtaagttaaattgtagtatttttcaaaatagtaaaaaaaaatatgtacttttaaaagaaatttttttcggcctttagactaggtgggtcctaagcataacccgcatatgcccaaggttgcgttagaggctaactatacttgtggattaggctaaacattgatcaggttggggtcacagtccactcatgcatcttcaaatgggaccgacgttgcgaaaaggcaacatgtggattaggcctagagtaggctaccgtggagtgggcgctatgaacgtccactccaaatagaggtgtattgttaggatcccacattgactaagtatgatctcggttagtatataactatttgggagtgagttctacccaaatgattgtaacaatatacatatggtgaaaaagaaaacatattagtaagcatgtaatacttaaatcaaatcagaacaagtatttgtgtgtattgaaatttgtagtaatttaggatgattttacttcctcattaagttcaaactcaagattgtcttactaaatacttgtctcctcttattctatttctctgtctttgtgatggtgctttgagtttgctattgctattttgtttgggtttagagatatcctcctgcaaagaaggaattttaactagaaccactttgccaaccggttatttgataactataaattcatatgattgaagagcactttcttgttggctttgagttttgagtgagtgatatacttactactttacaatctacaaaatagaaaaactcactatattccaaaggcatatagatacatcttatattctattcaaattttagtcctaacaattacatgccaaatcaaccattatcatataaacttcatcctccatcaatgattcaataaatttcctgcagcaaat

SEQ ID NO: 20891 - DNA, 1890 bp, Cannabis sativa
ctcttgacagcacatactttgtgccttctagtgacggttaccatagaccaatctatcaacaggaattttatgtttggtcaggatatcatcctgacaatcagagggcccaacagaaccaattttatgcactagaagatcatttctctcctatgagtcatgactactgtattccagatgataatcgatttcaatatgttcccttcaggaaggtattccaaaattaccaagcagagtttataaaccaagagtttcagtattttgtggttatagactttgaggcaacttgtgacaaagaaaagaatcctcatccacaagaaattatagagttcccatccgtacttgtgaatagtatgactggacagctggaagatcaatttcaagtatatgtgcgtcctactcacaatcaacatcttactgatttttgcaaagagcttaccggtattcagcaaacacaggtaatgagattttcttccatcaactttttcagaagaaaaatttaaacctcagcacttgttttgaagtagtattttctcttacttaattaatgtcaatacaatgccagttcgaacaatctacctgcttcactgatataaaaccagacactagagttttttttttttttgaagttcaatttatttgtttatgaattccgtgtatattcattacaggttttaacttattaatttgtttgtgaatctgttttgatccaggttgacaaaggtgttctattaagtgaagccctattgctgcatgataaatggctggaagagaagggtgttaagcaaaccaattttgctgtagttacatggtctaattgggattgtcgggtaatgctggaatctgaatgtcaattcaaaaggatccgtaagccaccatacttcaacaggtactgcttattctcatgaaagtaaagaagtaaatttgaaattcatatatgatgttttgcttgatagctaatgtaggctaatggtataaattttctgtttcatccatttacagatggatcaacttgaaggtcccatttcatgaggtatttggtgggataaagtgcaaccttaaagaagctgtgaagttggctggtattgtatgggaaggccgtgcccactgtggtcttgatgacgctaagaacactgctcgtcttcttactaacctcatgcatcgtggattccacttttccataactaactcactgacatggcaacctgtggagcttccgttaacaatgcaacagtttgtggggtgccaacctggcatttcccagcaaccccctagaacgaaggcccaattggtacctttagtccagtttcatcagatccaggttgatcaaagcaaagagcaacatgttttctgcttctgcggtgccatcagtagaaagctagtggtacaaaaaccaggaccaaagcatggatgcttcttcttcggctgtggtaattggactgccactagaggagccctttgcccttattttgaatgggctactgtctgatcgaagaagccctttaatctactctttaacatttcactaggaaaaagaaagggaaaaagaagaatgaaggtgcttctgggtgataggtgcctcattttagttgggctctaacttgtaaagttttgacttctttatcaaagaggggaattgatgataggacggtatttacctacgaaaaggagtgcatttccattagcagttttcagtttttttaattaaaaaataaggaaattcggaatttattacttattaggtttgatataaagaaatgggggaccttgccagcagtactcaaataatagttatcagggcatttatttatttattttttttttgtttttttgaaaaaagttatcagggcattgtttctatatttatcgaagaaaatttggttgttccttttc

SEQ ID NO: 20892 - DNA, 2756 bp, Cannabis sativa
ctgaacgcgtgcaaggcggtgctggttgggaggcctccctcggcggcgtgttgccaacgagtaagggtgactcatgttcaatgtgtttgccaagttataacgcccaagctggctgcttatatcgatctcaaacgtgctattcctcttattcaaggctgcggtcgccgtgttcctcgccacttcaagtgtgggagtaagtcaattaatcaattataaatactcttaattagtacatatgatcactcaacaaaactaggttccacacattaattgagcatcattccaattatatccatggcttttgtaaattattataaggttaataattggttattagttagttttcttttttattttgataaaattagagaatatataatagtgtcccataatcaattgaaagacaataatgagatgtggtacagttaatcttgttattacaatttcttagtcaatttccgtacttgaaaatacatgctggaaatattttttttttatttttttaataatgatgttcgttatagttaaaacatcattcttgtaaatttttaaaaattttaaataatttataatgccaaaaataagtttgaaatcttttgaatattcttgatagactggaatattagtaactctgttttcaatattgtgaattatttagaatttttcaaaaatttataaagacgatattgtaactataacaaacactgttatgaaaacttttaaagaaaatatttcgacatgtgatttctaatataaaaattgactaaaaaattataatgagaaattgtaattaatattcctcaaattatatatataaatataatacaattcattaatggtgatgaataataaattgatgaacttttgtatatatattatttagattttgctgggaattgaagtatttattctcattttggtatgtatgcaggcatcactactccatgagatgagatgagatgagaggctatatacatgcgtaggttattgaagagaggcgtttagacgtttttatctatatatgtgtaataagtggagtggcatgcatatgatgtctgatgcttaatataggaataaggaaggaatcattgttaaattaatatatatacacatgcatcaagttattaattcagatccatttaatggtgtcaaaataagctcaccttccattttaattttgatgttttgtcatcatgactacttgttccttaattaagttgctgagctcactacacacagccactgcatatatacaattgcatgaaatgaataatatcatgatttattaatattattcaatattcacaagccaacaaacagccaaatcaatacaactccaactaaacaagaatgatttcactaatatatgatatggacaaattaacagccaaaaaaattaagggcaaataaaggagacagaattactcatttcatcaccttaatttacaaaattttaaaaataataataaaaaaaacaaatcaaaaacttgcgtttgccgggagtcgaacccgggtctattgcttggaaggcaattatcctaaccgttggactacaaacgctgttgctgaaagttttaactttaataaaagatataaattaaagttcaaactaataacatattaaatgtttttttttgaacaatatatgatgaactgcttttgttaatcactacttgacaactaacaccaaaacaaaattcgctaatcttcttaacatccccaactcaagcttataaagataaaaataattggcttatttgtattttaggtccttaaattatggcaagctagttcctaaattttatttttgggacaaattagtccccaaactatataaattttggcaaattgatcctcaaacattatgtttgacaaattagttcccaaacttttattttcttgaaacataaagtcttcactcttccatgatggtattttatttatttatttagttttatattaattttaaatatatttatattaatatacgttattaaattaaaaaaatacatattttttttatttatatgtatttttttgtaaatatgtcaaagaagaaaaaaacaaatcaagacatatttttttaaaatatgctaaaataagaagaaaaatacatatattttttttttatatgtatatgtatttttttttttaataaaatcaagatatatattttttttaatttattttttttatgaacaacacttacacaaatatttctactgccgaataattcttttgcacttcatgcaaatattcattctcatcaaatagttagatgtgtatacaaaaaaaaatcaactatatataagtcaataaaagtttttagatgctttaatcatttcttaattatataaaagaacttaatatgacatctatttatatgtgtagtaaaatattattttgtagctaaaataatatttttttttataaacttacattatattaacttatattcagcgacaaactcatgaaattttaccagttgtaaattttaaataattaataaagatatagatacaattaaaaaatattaaaattataatactatatattcataaatcagtaataaaatatactataaatgttaaaatataaaaacgtgagggggctaaaatttcttctaggcattataagggttccattgtttatttttttttttattaataatatatatgaataaagcatattttaaatattttggtaaaagattaaatactatatgaatacttaaaaataaaaaaataaataaaata

SEQ ID NO: 20893 - DNA, 3559 bp, Cannabis sativa
aaccctcttccatttccatcgatcaatttctttaccctagacttaatcgctttctctcatgtcgttcttcttcaagccctctagacccaaaacccctcaggatgtggccaaggctatcaaggacagcctcgtcgccctcgacaccaaaaccgttgtcgaagtcaaggccctcgaaaaggttacatttgttttgtttcttttgtttgattgggttagttcgattcttttggaatactcttttatggattttaatgctggaagaaagttgtcttttgggtcttcttgattccagataaactcatgtttattagtttgcattttccagcattgattattttacattttatattctattgctcaatccctgatttttccaaattctggttcaatttcaggctttagaagaagtcgagaagaattttttaataatgaaatgtatgcttttgggagatggggaggttgaaccaaatgcagagcaagtttcccaactggctgaggaaatttgtaaggaggatgttatttctttgctaattcataagctttctttactgggatgggaagtaagtaatggaacattttccttttgttaaagaataaaaatctttaagcatatttgtaatggaatgattgaaatgaagaaaataatgttgtaatttcattggtattaggcaagaaaggatttagctcactgctggtcgatattgttgaggcaaaaagttggctccacttactgttgtgtgcagtatattgaggagcattttgagttgctagattttcttgtcgtgtggtatgttaaatttaattatgcaatcgatttcttatacttcttgtcattctgtttaccttaggctctagaacattggttgtaactagttaattctcttaacatacgaaatgttatgagattctttgtgaatggcatttatggaccgggacagtgttatgaaaactagcagttgataggtgcaccttaatattgttatattgagtttctgtcaatatatttttatcaagaacttttggctattttttttttaaaaaaaaaaattaaaaagaacttttggcttgtaaattgagccaattaattcaaatctgcctgctgatatgacatgttcgaggctgtaatctattttatgaattcttaatttagttaaattttccccaagcagctatgataacaaggaaattgccatgaactgcggaaacatgttgagggaatgcattaaatttccaacacttgcaaagtaagatattcattagatggtctcaatatagtatgtctttataagaagcttttctgttactctttcattagtggtgatttatgatttatcttttgttttgtctgttcgcaaaatgtacccctttttctttgcaggatgttttttttttttatttttttttatttttttattcacacacttgatttttatagtgatttttcagatacattttggagtctgcaagctttgagttgttctataagtttgtggagttgccgaactttgatgttgcttcagatgcattctccaccttcaaggtctgaccgctcctttattaagtgttatgtttttccaataacttcaatatttaaatgctgacttatgttctctcgtttccttttaataaattttttacaggatctgcttactaaacatgtgaatttggtctctgaatttttgacagcccgtcacgatgaggtttgctgttcgccagctccttgttttcttatatgtagtgtggtcaaattaggctgtggcaagttccttcagaactctcttgatctgtatgttgtttcaatattttaaacctaagagatctgcttggccaagaagcttcttggaggacttttaactatctgaatatttgtgttctggaaaaattcaagtctacactaccttgatattgaacgtttgcattatgcaagtggtgaagatatctatgcagttacatggtatacttgttcatttaatctttcagcttatctaataagaagttttctttctttcaaatatccttcagttctttgattcatatgaaaaactcttgacatcttctaattacgtgacaagaaggcaatcgttgaaggttagttttggaccttataattttcattttgtatctttttttggtgttactttttctcattaatatacaatatttaaggatgagatcatttttttactctagcttctctcggagtttcttttggagtctccaaattcccacataatgaagcgctacattttagaagttcggtatttgaaagtcatgatgacattgctgatggtagtaatttatctgtttgtctaaattttgcttttttgggtcttttcgggagttaaatattacaatacacttgcttggcctatttgattgtcagtatttattataattcatggcaacttttttcactagtgcttatattttttatttttctaaatgagcaggattcaagcaaaaatatccaactctctgcattccacattttcaaggtttgattttctctctttcttctcttagtgcttgtatgctctagttgttactgctactcaactgctattacaaaatggatattaagattctttgatttcctaaatttgactcgggtacaccataagtctgacattgttccaacaaaagagtttatcagaatacattggaatgtctgataataacaattgaatttgtgcccagaaacttatacgaattagatttgactagaaatatgagtgcattgcaggtatttgttgccaatcccaacaagccgcgcgaaatcaaagtcattctggctaaaaatcatgaaaaattgctgcaattgctagaaaatctatctgctggaaaaggttaataataagccaaccaagtttctaccctttgattctcattaaaataaaaaaagtttctacaatttgatgaatcttctcaatcattgttcgaacatcttgctgtttcaggtgctgaagatgaacaacttgaagaagaaaaagagctgatcatgaaggaaattgatagagtagctcgttcaacaaatcttgaatgataggttgctttttttttcttctttctaagatgttttatggcaatagcagatgaggatttatgtagagcctatatatataaccttgtaattttgtggaattaaaatattgttattactaagcaaattatttgtgattttctaaagcagttgcaagcaacctgattgttgtttcatttggggttatataatattaattaaagaacaagaacagtataatatagtttgtataatatactcaatttgcagtttcataaactttggtcatgtgctcctatcctattagactattactttaggcaacgcaatactacttttgcacactagtttcacaatgtaaatcaacaacattaatgaaagaattggcgcacgccacattaaaaatatttggtatacaaaatccccaaatttaataacttgtgcaactaaactttcaattccttagtatttttaaagttattttttggtcaatgttggaaggtggttagctggaagcaatattgtcctcatccctaagaa

SEQ ID NO: 20894 - DNA, 1921 bp, Cannabis sativa
attataaactgatgaattgtaacatatatatgtatatgtttctttcaggttgtatactgcagggattttggtggccatgagttagctgaggatgaaatgcttttgcatatatcatatatgtatgtccttttggcatgggctgtgaatcatgtcatataatacattttatttgggattttgttattttgtcatagacaatcaatttcgtatttatatatattgctagaacactatctatctagtggtatccctgaattttgcggatcaataaagcgttgctgaactatttaagatctttatttaatatagattaagttttttttaatgattattatgcaggtttattttgagattttttttttctttcacgatcttttgttgtgattgatctttaattttattttatatatatcactaaataatatagacgccttctgtgcagcgattttacatatttattattatttttttttgtaaaaagctttaaaacaaattagtataataaaaaagaaaagaaaatttcattaatacaaattatcttaaaaattttgaaatcatatatatctaattaaatattattattgattttgctttttttcttttaaataaaattatataccatatatattttataagaaattaaagaattaatagggaaatttatattttttattacatttatttttaatattattataataatactatatatctatttatacctcttttttaaaagtaatgttagtgtaatattttattgtattttgtattttatatcaatatcaaaaatatttattaaaaaaactattcactttcaattttaagttatgtatattaatatgtatacatatattaaaataatgattagtacataaatgagaagctcatctactaatgtgtttaatttttataatatagtgtataaacattaaacaattaagttgaacttattgtatatatttattaatacactaatatgtttattttgttacaaaatgtgtatacattaaatatttttgtttaatttactaaatatattttctaataaactaattttctttttttttttttactatataatttgttaatatactaatgtgtttgttagaatatgaatgttatttgttttattaatttattgtatatatttattaatatactaatgttttaatttcttatagtctactacatatttatatattgtttttgactaattatacttttacaaataaattttggatagaatctatcaaatatattatttggaaaatgtggtatgatgtattaatattaaatattatctatttattatttttattaattgtttaataatatcaatacataaaaaggaaactttagttgtatattttatacatttattaatttgatttaaaaaggaaggttgtttgattatgtggtattgattattatatggtaatttttttaaaattggagtatccaattgtatatgataatgtaatataaatttagaatatcattataatactaatttcactataatgtattactaatgaaaaggccctaaaatttatcagttaataaatatattttgaaatgaatatataaacatatattcaataaattatttaaaggatataaaagtagaatgaatatttaaatttaaatttatattagatatccttacaataataaaaaaatctatattataagtttgtataaattatttagatatttttagttgatattataaattatagatattttttattattattaattaaatttagtctaacaataattttttttttgtttttttcaaaaacaaacacatcaaacaaagcaaaacaaagttgtaaaaatttgtatgatttctttgtttggtcaagtcattcaaagttgtaaaaatttgcttgctgatttgtgtaccgttgaggttatt

SEQ ID NO: 20895 - DNA, 4904 bp, Cannabis sativa
tattattattattatttagaaaattaaataagaaagaataaataattaaataataattttattttaatacgcaaatcaactaagcatcaacctgaaagaaacttattaacaacttaaaaaaaaaaaaaatgaaagcaatgtgaaagcaatttagtatcaacgtgatatttttaggagcaattgacagatctatcaaaataagaaccaacggacttacaagaattttgagcttaagaacttttaacgttattttttgtggttggagatttatctccatcaaataaactttttgaaaacttttacttcaattttctaataattatattttcattagagagaggaatgaggagtaatttttatttttagatttagtatacttcaattggaatccctccatgcaaatatcagtaaaactgatttcttatgcctggattttatggctcttaaataaaacgactattataaaccaatattaatttgagaaagtaatcaggcaaatctacatcttcaatgaagactcgttaatttttttggcacttgttatacctgctattattgaatcctgcttattcaagccaaacaaatctctacaaactgaggtaaaaagaaaaaggtcttctctagaaaagcattatgtacaacagcagcttttcttccccattcagtcatcactggtcactgatcagggaggagctcttgatgaagccataaaaatcggctttagcgagtgtaatacaacgagaaaaatcgaaataacaaaatcacagctcttgattcaacaactgcatgatcttgatcacagctcttgtatgtttcatgttcatgatgccccttcagctttgatattcttacacaatatggcaaactttgtcaccactcctatacctatatacctgcacagaccataatttgatgagtaaataatgtttttaacgtattgagttcaaaattcttagacatgatggttaaaaaaaatgcttaaaatgtagaagaaaagtacttgaacggatcaatacttcttgagaagcaaaacttagatcgacacgaaaagcatagaccaataaaattggacagaaaagatgatcaaatgtagtttcctgggttttgaaccgatcgtatcaacggcataacataacatctccactattagacttaaccaagttaccttcaaattgaaaattttgctttcttcctgcaaaaatctttcagccttcaactcggagaatgttgttacatatgttgccctgggtaattgtttctctatctggatcaatcttccagtggccatcaatgataaatttaatctgcacaaaaatgaaatttgcatcaacagaaaacatcactagaagaacgttctttcttttgacagaacatgcttactgcataggaacttccaggagaactcaattattactgcaagttttttctataaaatcaacccagaaaattttatatatatatatttatatatttatatatacatatgtcatcaaatcattattggatggggaccaacctcatacaccccaggataaagccacagcactgttgaccaaagtttggatttcctgtaggaaaaaaaacaatatattttcatatgtggtttgttcctaaattactaatgttgaaagggaaaagaaaaagatatggaaaaagaaaaaatagtagagcagaaaaaagtttaggaaaataagacatgctttaacttttaagcttttcccatgcctgactttaataattatataactttgataagaaaaaagatcgattatagacctgggtccagagggatccgtagcagttgattgagggtcttgatccattttaatacaatgatgccaaccattaaaggtaccagttacctccacagtttcaccatccccacaatatgttatctccacctgaaaagtaaattgatttgtcaatcagaacatataactgaaattcatgacatacatatattcaggaagaaggtggatgtgttaacctccactagtcctgaaagggtttcttcagcagcttgtaattctgcatctttttcaaaaatgagtttttgggctttactgatttctgtttcagctttggcttgcaaaactgacaaatcattctgaaaacaagtaaattacagaagacccggttattatttcagtgaacagttcgattggtcactattattactagataatagctctcttataaagtttaaaactttgtggatggaatgcctcaacatagctagcagcgacagacatgaacgtagtgagtgtggatataaatagcttatgcaccttttgtttctcaatttcctctctcagccgagataattcctgttccttttgatgctaaacattgaaaaaaaaaacacaactattagtagctattgaagtcatctctaacaaaaaggtagaacttgataagagcacgaccgcaaaggtacacgaacatcagtaccagcaagaacttaagctcactaatcccaacaggcttcccctttcggatagtctgtatacatcaatgagcaattatataaataaacaataatagcaccaacgccaagaataatgatatcatacagacaaggaatggaaaacaagaataattacctcactatcccaatcattattgaactgagccctttcttcttcagctgataaattctcatctctgcagagtaaaacattgaaagaaactacacttgaggaaaacattttaacccaaggcatgacaaataaacataatcaactgtagatgactaatgtagtaatgtgcaatatccatttccacgagccatggacgaatttaaggtctctttacttaatgaattgcaaaaggcatgattaacaaaaattatgttataaacagagacagaaagtaaaactactgaaagcaagaagagaaaaccaaaaatataatttggtagagatgtacagaaaaacgaacctaagagaacagttccctgctacagcaaccacaacttctgtagattttgttgtactcccattcaatgttatagcctcatttcctccactgagcacattttccgagtgctcagaggtagaagccgcagcttgaacttcgtctgcatccacacattcaatatattccgggcttttttcagtaccagtctcacttagtatgccataggaatcatctgataatcaatactaaaacttagctttctcataacatcatgttgatagcactgacacacaaactaacaagctaacacagaatcaaagataacaaaccttcaactgtatctagatgtccatagtgcataaaatttgccaccttttcctccaaagataaagctgaaagatctacaggaacagaactaggttcatctgaattgaaatctgtgtccgtgtttgagctgttgagatgtttttcagtaatcagagttttgttttccaaggtaaagtcttcggcattactgttatcctcaatctgcaagttttgcaagatcttttcctccactggaaaaatatcagcagattctgaggctgtgttcaacattccatccccaacagttaaatcatctcctcgattgtgaatgccagtattgaagcccgaacttatattagaactaactgagtcacccttctcattgtcaacttctaaactatacaaggatgcttctacaggtccaggcttttcatcttgaacatggttttcagagttgaaaactggagcaatacttgaactagctaaatgattttccatactggaaacttcatttgctaaagaaccatcttcatttatatcatcacccttctcattgtaaccttctaatccttctacaggcacatgataatagtcatctgaattggcatttacatccataaccaaactgctagaacagtttccctccacagaagcttcaattgatgatggaaaatctccaaacacaacgctgtcctcctcatcctgacctttttaaatagtaagaagctatcaacaactgtttcatgtgccttttaacatatacaaaaaaggttcacaaacttaaaaagatactttgacgtgttaccttaacttcaccatcaccatctactgcatctttagtttcatttccccttttctccaaaataaacccttcagaatctgttttatttgaacttgcaagaagctctccaatcactttataccctcttcgcctaacaatgtatgcaagatcactcctataaaaaagagcttaaatttttgctcgaaatcaaaatacatatctgtagtgtacattggtcaattcaacaccttaaaaataaaatattcaagaatcaaaaacaaactaaaactgagaagaatttccaagaagaaacaaagcaagaaccttccacgctgggaaaaatctttcatggtgggtacatgactctccggtagtccaaccacagccataaactctcgtatttctctgcagagctccacattgtctttcatttttctacatatattttcaacatcataaacaaaaacattgttttcttgaaccaaaaattaacaaacccaatacaagaaattcaagagtgtatataaagaaacctggatttcttaacagaagatactcgaaatctgcagcgtttgtgaggtgggttttgttgggtgtaccgggctagcttcagttcttgccgtttatttgggttcaagaagaagagtttatacgggtgaagagagttaaaggttgggaagtggtaaagggtggctgccatggataactggtgcagaattcaatactcaatcaagtgttgtcgttttctattgtttattgattgataagggttgggttgggagggaaggagagggagaagaagaggcttagagaaatatcacacacacaagctttcactttacaaaacccaaattttgtttgttgctaagctattgctcataccattaaaaaataaaaa

SEQ ID NO: 20896 - DNA, 2582 bp, Cannabis sativa
ttaatgatttacggtcaactgatttcaggatagccgagagctgacctcaaatagtccaagtgacagttcagtaagtggtgtaagagatattagttctcctgatatagtcaatttcaatcctaattcttctccaaagagtcttcaccctgacaatcccgtgccttctgtgaggtcacatgtagcgtcagaccagacaaatatgcaagtaaaaggatctggttcagatgcttttcgagttagtgtctctagtgctcccagcacctccagtcatggatctgcaccagatgattgtgaagccctaggggacatttatctatggggagaggctatttgcgattatgttgttaagatcggggctgacaaaactgctccgtatttgagcccaagagcagatgtgcttctcccaaggcctttagagtctaatgtagttttggatgtacatcagattgcatgtggggttaagcatgctgccttagtaacaagacaaggcgaagttttcacatggggtgaagaatctggaggacgactcggccatggtgttgggaaggatgtcagtcaacctcgtttagttgaatcgttggcaactactatagttgattttgtggcatgtggagagtttcattcatgtgctgttacaatgaccggagaactttatacgtggggggatggtactcacaatgccgggctccttggtcatggcactgacgttagtcattggatacccaagagaatatcaggaccactagagggactgcaaattgcatcagtaacgtgtggtccatggcatacagccttgataacgtcaatgggacaactcttcacatttggtgatggtacatttggtgtgttgggacatggagacagggaaaatgtagcatatccaagggaagtagagtctttattaggtttgaggacaatagctgttgcatgtggtgtgtggcatactgctgctgtggtagaggttattgcaacacaatctagtgcttcctcgggcaagctgtttacttggggtgatggagacaaaaatcgtctcggacatggagacaaggaaccccgccttaaaccaacctgtgttccagcacttatagattacaactttcacaaaattgcttgtggacacagtttaactgttggcttgaccacatcaggacaagtgtttaccatgggaagtactgtttatggtcaacttgggaatgtccgttctgatgggaaactaccttgtttggtagaagacaggcttattggggagtcggttgacgaaattgcttgtggttcatatcacatagccatattaacttcccggaatgaagtttatacatggggtaagggtgctaatgggagattgggtcatggagatgttgaagataggaaaacaccaactctggttgaatccttaaaagatagacatgtaaaatatattgcttgtggttcaaactatactgcagctatttgtcttcacaaatgggtgtctggtgctgaacaatcacagtgctctgcttgcagacaggctttcggttttacgcgcaagagacacaactgctataattgtgggcttgttcattgtcattcatgcagttcccggaaagcaacaagagcagcactagcgcctagtcctggaaagccatacagagtatgtgatgcttgttatgtgaaattgaacaaggtgtcagaaactaattctaataataaaaggaattctggacctagactatcaggtgagaacaaggacagattagacaaggctgagataaggttttcgaagtctgtcccttctaacatggatctgataaaacagttagatagcaaagcagccaaacaaggaaagaaagcagagacattttcgttagttcgatcatctcaagcgccttctttattgcaattaaaagatgttgttttgtccactgctgttgatatgcggcgaactgctccgaaaccagttcttacatcatctggagtgagttctaggtctgtgtcacctttctcgaggaggccaagccccccgcgttctgctacacctgttcctacaacgtcaggactttccttttcaaaaagtatttctgatggtttgaagaaaacgaatgaacttttgaatcaggaaatgctgaagctacgagcgcaggtaaattgaaaaatttctctagcttttattatcaattagttatcttcacatagaggatctttcgttgattgataaatgtataatcaaatctgtagcatactgatcatgattaaaatatggagataggttgagagcttgagacagagatgtgaacttcaagaattggaactacagaaatcaacaaagaaagcacaggaagctatagcagttgctgcagaagaatctgctaaatctgaagctgcaaaagaagttataaaatcactcactgcacaggtaatttcttctatatatgattcttgtgttgcatttagtgttttcttaagtctatattattgcagcattggacagaaaatatgccgtttagtcacttcacataatcttgaaaagctttccccgtagaaaatatgacaaatatttgatgaacctagtgaattgtttatttgttcccgatcctaattcatag

SEQ ID NO: 20897 - DNA, 7489 bp, Cannabis sativa
aaaatcgtagacaaggaagatgaacacaaatgaatgtttataaaatagaacattgataataacaaacacaaggttttatagtagtttactctcttttagcggtaataggctacttcacttaaagttttattgatctcaatgctcaaaaagagttctccaacgttatgttttccaagagttcagttttcaagtgagtttttttttggaataagagcgtcaaagaaagtccctttacaattaacttcataacctttatataggcttacctcataagctagggtttcttaacctggttatatctttttcttaacccaggttaagttacatttttaattacaaaaataataataactaatcattcaaaaacttagatatcttcacatttcattagcacgtgtcctttgcactgggtggacccgaatggacatgggtagatctaaatagacaagggtagacccgaatggaggtgggtatacttaaatggacatgggtaacctgaacagacatgagtacacctgaatgtgcggggccaatccaatccttctataaggtgttgttttgttgtaaaaattaatatacgcaagtacacacagtcgcacaagtagtaaaatgataaataagatcgtcttcacagggattgcaaacaaaatatgatgtaaaatcaactaattatagcttaaagtaaaaggaaaaatatgagaatgattgagcaatgattcaaatttaaaaggactgtaaataaacttgcttaaaataatgctactattactagaaaattgcatgcaagaaatgtaatatattaaaaagtggcttgaataactaatcccccatagtcaagtttttcccagtcgctataccattacttcagcattttcgcacagaaataacagaaattcttctatgtttatgaaaattttccaaaactcccaatttaagttccaccacctagattaatgtattcctatatcaaaccacattggagaacactatttaaacatcatttctcaagttatgtaaggtaaaagaaatattcttattccttttataagaaatacctaaatctaggaattcacttggttcatccaagtgaaaactactaaatctagtccttctgaaataagatctagcttagtaaattgttacccatggccaagaattaacaatcaaagaaaatagcaagctcacttgaatgaacaaaggaaaaaatgctaaaatatgcttaaaaattaatcatactaaacataggagttcatagacattcaagcctcaagaactttagctcatgttcaaatcaaaaaataaaatccaaactaaaagtttttcatccatggatgctgcattttttacaaattgacaagtttctaacatagaagcccaaatcattttcaatcttggcccactaagttttgtctccaccttccacaacagccagctggtataactttgagttgctgctacataattgctgatgtggataagtgaaattcattttttaaacttcttccacatcactgcccaggatgctatagcattctggcagcatttcctcccaaattttagcttttatttccactttgtctttgcatcctttcctttttcctagcaagttaattcttctttcccacaacaaacaagcaacatttaataaatacaactaaaataacaattttattacaagacttaaaaactagcttactaaaaaaaaaaaataaaaataaaactaattaaaatgaagcaaacaaacacactttcattacttttctcacaataattttagtttaaggacactaaaaataactctattctatggagttatcaggtgcaaacatctcgggagctagatgcacaagaggcttagtgcctaggtcccaatttaggacccaccacctcggaccctttaatgatgtgagtagcttgggtggagctggtggtgtggagtgttgagaagctcacaaggaagggagttggggagcctcttgcgccttggcaactaggcaagtacttttgaggaactaggcacctcgattgctagagagctccatacgccttgggcttccttagatgcactaggagcatcgggtcctttggacctcgtcctctcaacaccagatccatgtggtggagcacctagatccatttaggcaaacttggtggctcttcaacatcttgaacaaaaatttatgcacatccacatcaaattttttgagggataataatatcaaactgtataaaatgacttagtatataaattatatgattgatattagtgtataggataagtaaattgtatattattttgttaatgcagattttcgttaacaaattaacaagcctttttcgtaacaaagttgacacagaaattataagaaatttgagaaagaataataaaaacgataatggcaacaaatttttacgtggttttgctgttaattctgcattgtccatgagtctatcttattcaaatatttgcggatatggtgtattacaattagtgatccttttttccaaggattttctgtcccttttttttttgtatattctgctcctatttatagtaatataggttggcagttaattacatttgaattcaaatgacataacaatatgtctcgaaatttatgggctttaattacgtcccatttaaacacgtataaataatagaattaaatcacacaactatgatttaaactatcttcaaagcggtcaacgcttaacaggaatagaaactcccttccaagggatctcgcttgaggcatcttgccttgtacatagatgagtgacttagtttattcatatgccttccagtaatggcataagcactagtgtactgggcaaacttaagaactgctctttgaccataaggccttgtagactggacaatcatgtcctacatgttcctaagttatcacacttagttattaattgtaatatgaattatacgctaagtgtttcaactgccattcacctcgtcaatactttcttaacgagatagatacctcactatttattatatgtaactccttcgtgttgcgaggtggatggctcgctatacatcatccgtaatgacctcggtatcatgctttctgagacaaaatggtttctcatcaatacaagaattgatagtttgtgtatccttgtcttgctcaagactatgtagtcaacgagttatgaatatactctattaatctcatatttgaaaagttattacattttgtattgaatgacataattatcattaaatctattggttcgtattcccttgattaacacgtgtcacttcctaaagtacagccaactttcaggtataacaattgcctcttaaaaagtcattttttaataaaaaatgttttttaaatgattatcatgggtatattcatcataattcaatttgaaaatatacatgcttttgaaattggcggtgttatggttccgatgcacatcattagcattaatgagccatcttttccaattctctcccatacctatctgttggatctctattcttttaatctgacggtgaccaatcttaaagtataaaactggaaaggaaccattttttcaccatttctgccttttcaaaaaaaattcgagctttgccttgcgaaaaaaccattctgatttctcgaagctttgcatgccctctttgtcattgatgtgtttcttgcaaatttccttggatttaaccttcaatctcaatcattcccagaactcgcacaatcgttcgtctcaaacccaaatacagaatcccccactgcacagacacacttttttaactagtaagtattcatccccttatttttctagtctttttcaattattctattatttgcatcttgccactccatttggttttggcgattctggtttaagttttctgggtaatttttagggtttgggcataatataaatttagttttatcatattcttaagcccctggtttaaaaaatttcatccaggaatcaggattgttcttttttgaaaatgtcctaatctggttcagaagtttattctccagaatccttagaaacaaaatatcctaaggaattaacccttccattcaaacccaaaattttcaaacctcagtccaaattggagataaacgatgccaaaattagagaccatttgattaagtcaaactaggaagaagttgatagtcattataggcaatttctacaagatatttctgagggtaaatgtctttttttgcgagacgtagcctggcctgaaccctcaatattattttctattctactcacgaggccaatatttttatctgaagtcactattactttttcaccacgtgaccttgaatttgacattatgtctcctaagcctcgcaaatcaaagaacccacaggatcccaatgtcaccttcgaggtggaactcatagaatccagggttcgatctattggggcttatgtttgtggcattctaaggtcctgcggtatcaagcagggaaaatgttgtatcataaggttcatggctcatggggaattcagctgttttcctcctgaaagagtaatttgtgaggagtgcagtggacctagcactaacaattcctcgggccttggtgcctagagcctcgagcatatcaaggctggggtagtccttcccctaagggattactttaaggaattttacaactatctcagagttgctcccttccagctgaaccccatttcgtacaagattcttgcaagtttaaaggttctgtaccatattttaggatgtgagtgccctactccgttggagatagtctatttctactcagttaaggcaattcttgtgaggaagcaaggtgcaggaggcttttactacctcgacactcacacaaatgaacgcaggatcattgtaaggcttctaaacaagattgagtttaaagaagacttctcctggatgacgggtctctctccaataaatacaaccatattttgcattatacgtaagtaacactccttcaaaatctttactttgaattgtcttgatttaattttatgaggtcgcttattaagcttgtatctatttacagcgattccccagagaccagttcttactcctgagatggccgagcatcacagaatcttgttgaatcttctgttcgagcaaagatcggtagatttcttatgtaatgagacaaatttgaagaatgttggccttcttcccttggatgaatttacttgtgactacaaagtacccaagtattctttgtggcaaaaggtcccggctccagccaatgaagaaagcgaggataatgtggctcacgcacattacctccaaaaaatcactcctcgagaagctgaagtggaaacatcccgaggtaatcaatgtgggtggtttcccattgtgcttagggcagagaatgtaacaccctggtgtctttctgagatagtcgatacaatttttacacttggaatccctttctcggagattgcagaacacatagattcaatatttggtacccacaattccacgtccagattattgtactagttcctactatgggattgccgagcagtatgagactatgttggatagagcgggtcatatagattcaagttgggatttagatccactaaacccttacgacatatttatgatcacaagatctagggactttagtgaatattatagtcctccctcgtcaccttctaaaaattacggtaactttctcaagtgggagtttattccccattttcccttatttattttgcttaagtgctaatgtacttcccacacctcagagatatggatctcgacttggagaatatgttcaagagtcttcccccggttgataagaagtctaagaagagagctgcccaagttggtgaggcttcgggttctattaaggaatccaagaggaccaaaaccacaaccagcaagaagaaatcatcaggcgaactcaccatcgagccagccaactctctagagaaggaggtcccaactgcgacgagtgccaatgaacaacccacttggtcagtgcaccaagtgaagttctctggttctcgttcagagatggctcttctcgagccctcctatcccctaccccttgaggctgggtctaaaggctcttctcacgcgaggtagctctgaggatcttgcaaaaagagttatgaacttttgcaccaagttagtttcctcttctccttgttctcacttttcttcattttatcattttcacttcttttaatttgtttccttcttgcaggcatctcttctctcctttgctacttagcataggtcgtctcagtgggccaaaatgctcaaggctgaggtttgccaaattagggagcacagggacaccctggccaaaaaatggaatgactctgtggccgaggtttctcacacaaaggaggaggctaaaaggcaacatcaggctgactagaagagaatcaaggagcttgaagatgcaatcaactccctccaggccgaccatgacaaaaggctcaaagaggcggaagctaaaaccaaatattgggtcaatagcattgcgaggaggaccatttatcagacttggtccgctaaccctggcatggactttaactttttaggcgatggagctgaggccatgcttgccttatgcgagaagactaggaaggaagagcttggcaaagaagatgaggtcgaggtagagcaagataatttatccaagtcaactacaatgtaggcttggcttttttttatatttaagaaaatggcccgttggtcgagacaatggtttgccccttgtggcacttttttgtaaggataaatttgcattgttggatggccaactttacttttattttctttctttttatttattgtctcacatctttatacttgaacttaatatatttgcttgtctgcattttcattcataacttaagaaattatattttgatcaaatttaagatactttaagtaggcatttccattgatctcgttcttcctttaatattgcttgagtagttaataatctactatgtatgtgagtagttttcacctgctatgctttttattcgcgagcagtttatcagttatacttcacgtaaacagttataatctgttttaagtaaacttaaacatactttgaataattcatcttgtgtattactttgtacatctttgattgcctatataaatagttaggcattctattcatattttaggttaagtatttttttaagacatcttggtgcctcgtttataattcctttcctatagaatgcgagccgttagatattcagcctcgcatgtagcttaatattgtttttatgagttaaatctcatttacaactgctaccttttgattttccttttgactttatattgtccatagacaactttaatcaatttggaaaacatctttaaagtggagtgggtttgtaatatatcatgtatttccagatagatttcaattaatcatacacatatataagcccctcaagtaattttaaggaataaaactttgtaattacttgaataatacttcaactttactaatagtaa

SEQ ID NO: 20898 - DNA, 4064 bp, Cannabis sativa
  modified_base (4015)..(4015): a, c, t, g, unknown or other
taataataataataataatagttgcgtattgggacgggtattcaaggaaaatagagaggagaatcacacatggacatatatatactatatagtagtagttaacagaaggaggagagttttggtgataattattaagagaaatgggtccataattatatatagattgctgataatttccatctgtactgcgtggtcaacaagcttgaattgggtagcttccattaaagctcaacattattctttattgctacaattctcttcctatatatatttacacatttagctggttaattctacccaaaaagtttatttgtaataattgtatttgaaaataatattattaattaaaaaattaaaaaaaaattcttttcatcttaagagtttttgcacttacatacaagctactcaatttccaaatgagtctattattgcgctaattaattaaagaaaattgcaaattatagtgttggaattctaatcatggataaattactaattcaaatgatgagttcaagagtgaaaaaatagaaatatatgaataataataataacagcaataattcatataaaaggagactttacattttgtgttgcaagtggcgactgatatctgttgggttatcctctgatcgaactgcatttagggctgtggtccatactgaaaaaaaaaattataataataataataataataattttggtgggaatgggacccacatttatcttttgccctttggccatacagatttcccaataggaaattgaagatttcctattcctaaatagagaattttaacagattgatgatctctattttgtaaaagtccaaaagcaaaaacaatttgaatttaaggtgtatattaatttatttagtatataacggttttgattttgagatgaatttgataagtattttgtacatgtgacgatcgatgttgatatgggtataaattatttcttcattttgatgaattataaatattgttggtcatggtcaaagacccaaatctgaaaattaatttatgtgatttttgcccatgtgggttggtttttttttttttttttcacacatagtactactacgctttcaagacctgcaaaaaatataatagtgttgttttggcatcatttttgacaatacattattatagtgtgttgttttaagtatcaaaatctagagctttttcaatgttttcttccttagaagtcattttctcatgaaaacaatataaaaaagaaaactgaaaggagagaacttgaaagaagagacaaggagcaaggagcaatagtctcataataacagtatattgaaatagataggagcacatatagaatggaccgtacccacttacaaaatgtaatatataatctgacacattttttggagagagagagagagagagagagagagagagtacaatataagatggcagaaagtttggggatactcatgatgtgatatgtgtgaaattaactaatgagttttagataaaattaataataccattaaggggacatgtccgtactgccatgtacaaaggggattttgctccatgacaatgcgcattttatgccataatataaaggtttttgtttaattatatataccatgatagtggctttagaataaattatataagtgatcattggtaactatcaatttctttgttaataaagatctttttccaatgagaaaagaaaagaaaagaaataaatcttaagttattatctcaattgtcgcatcaataacttaattagttaaattctacacatatatataataaattaatttggtgtttctttgtataaatataatcttattcttatattgaaagaatttagcatttggagtgcttaggatgagttttgtatgcttattagaaaatagatttcaaagtttggatttgacagtctcatgcatcatgatgcatctggttaatctctccacgaagatcatgtttaagtatatatatatatatattattgtatagagttcaagtttaaatattaaactcaatattttgtaaattgaagtgataaacattaaataaaaaattggcttatcccatattattatttctttaaaaggcaacagcagtacctaatagtattctcggtattatattggtgtcatattgttattcgtgcaattaagtatcgaattttatgagcaccaatagtgttcaacatcttttataggtggtgttctatgattggttagcaatattctccagaaactattttcttaagttacatgagacctgatacttaattacactaatagcggtataataccgaagagagtgctaggcaccaatagtgccttttagtgattctctaaaaacaataatttttaaagaatactgctaactaatcatagaccgtgacatctaaatagtactaaacatcattagggttcaataaatattcatatatataataaaatttaatgaatgtagggctatatggaatagatgtgatcatgattcatgacttatatgggttttcttgatcaaagtaatagccttcaccaatcactaactatactaaataatatgtgtttaattaattatatattatctaatattaattattgagttataattattagctaacaataagagttgacatttaatgagaagggctctcccaatatacaataaggtatattcgtactctctctcttctctatatataattaataatcattaacctatttattaattaaaaaaaatactaaaactttttatatattattacttgtagcttgatgaatcctatatatacaagtgtatatgtatagagaggaccatatatatatatatgtataaggggtcagcttaattaatcaaaataataacaattaatttcaaagataattaacctgtgtatggctgggtcactatctaccaaaaaagaatccctgtatttattggtcattgaagatggttaaacaaatattttgtgtgtcagaagcttttactatcatgtacacaaatatagcagtgaattaaacccaattactaattaatgtcatactgataattggaatattagaaagttcctaaaagttttctcatcaaagaatcctaggaatcacgtaaagttaataactactactactatattgattttgatttatcagagaatgacagattcactatagtactactctcagtgattttttatatatacatatacatacatatatagagagagagattaaacagtacatatattattaatagcgcctaccttcactattttctttttcttacttacctgatcatgatatcatgactgtgaatatttgtgtcctatatatacaattgatataaatatatataactatagcttagtcctattaatatcatgaactttaaagtttgtcactgtttcttctaatattaatatttatatattaatacatataaatacgtacccctgtacccatcattgttgtaactgacagtgatagagaaattgaattaacaatgaattaagctttgtaaaacacaaaatagacaaaggtcacatttgtattatttttttttttgcataaatttttttatttatttatttttaaaatccagttttaattactgtttcattaatttatgtacttcataagagttgttatatctgcagggttgccttttcgaaagagtattcaaagtaattaattatatggttctcccttcgtatatatcagtgaaatttattttcttcttgttaggcaaaaatattccatatatataattttagtgcctctcctttggaactcctaaagagacaatttaggtggaaaatgaagaaagaagaaagaaaaataaaataaacaaaattatatgaaatattttcctgccaaatgaaatacccacatatattggtgaggagggtactgcccctcaacttttattttaatcttgatataatttctgtaaacgtaaaattaacaattttaatcttggtaaaaaaaaagggaactatcccatatattatttttttaactttntttttttttcaaatttacggtttatgttttcagagtggttgcaaaaagg

SEQ ID NO: 20899 - DNA, 3337 bp, Cannabis sativa
  modified_base (1883)..(1915): a, c, t, g, unknown or other
atattataattaaatggcttaattgttaaaataattatagtaagaatttatataaaaaattatttataattattaattgctaaaagaagtcttatttatagtagtgattcattgtaaacattattaataaaaaaaaaattatctattagtaacctactattataggtaaaagaaaaatgtaaccataatggttacaataaaaatgtaacaattgagtagtcactcatatggaatatatatatatactaaattaatattatgtaaaatgtgcgtatacttagttatattcataatttttattttagttatgtatatttttatttatataataattattattattattttgtatgtagatgttatttaataaataaaattattttttgttaaaaaatatttaatttaagtgttatttaatatataaaaaaatattataataaacttttaattttataatattttttaattgttttatatatatatatatatatatttgcaacatacgagtttgacacggctggtgtaaattaataaggtttctatagctatgtttaaaataattatcaacgcatttagaaaaggttatgaaccgttagcatctgtaagattaacatgcgacaaaaggaaaaataattaaaatttatatatatatatatataaatatacagttttctttttttttaataggacaaatttctagccataaatcagacatttattatgagcagagatgagaacataaatgaagactattatgagcaaccaattttctatctgatgtgaaaaaggtaaagtaacaattacaaactttgtgttaaaaatgttttaaacagttgtttaaattgaattcatggtgacccaaaacaaaccaaatgtgtacaaacaacgttatgatgacaccgaaagcaaaagagggccaaggcacatggctaccaaaatgaaaagaaagaaagaagaatgaaaataaaaaagaagacaaaagaaaaaagtgagaaagtgcatttcatttcagccctttttaaggcatggttggtttgcattgcattgcatgccttatgtgtgtgtacattacattcttgccattggttggtgtgtctgtgtgtccttcctttgtaccagaaaaattgcctgtatacagcttggtccaaaatttattctgagcttacataaatgggtacattttacattttacaagtacctaactcttttctttcatttccttggtaaatgatattgatattttacttactcaaagtggggttaaaaaaataacactaatttggctaactcatttacttcacttttgaaaagtgaggtggtaggttaggtccaattccatgaatgcaaaagaaaaaaaaaaagacaaaagacaaaagacaaaagcaagaaaccaataaatgagaagaaaaaaaacacatacatacacacacaaccctaatgtataaatctaaaatttgtaaaattatataacagatttatgtggttggcgttaattattctcttctcacaagtgatttttagataggtagcacgaaaacgaaatattccttaaatgttgttaaacaacatctatgaatgcaactaggaaccaaaaggaggttgaaaacacccaatcttccacaaatttataagcgcaaatctaaatatgagatttaatgtggttagaaccaattgttcttttttcaagtgagtttccatatctaccaaaaaaatattcctaaataaattgttaatcagatagaggaagggtcaacaacaagtggccattaaagtttttagtgacttagaatgttattctgctatgctccaaccagcctcgttggattttattctcccactacacacactcacactcaccaaaaggaataataataataataatnnnnnnnnnnnnnnnnnnnnnnnnnnnnnnnnnaataataataataataagatttttggcaagaaaaatatagcagatccactataagatatgatcatttggttggaagactaattttacctgaatcacatttgaagggaggactatgtctatgtgccatcaatcaaagtattattaggcaataatagctcgaccacttgaggctagttcaagtggcctaaaagggtgcatgtgtgttggaagttttgagttcgagtcccgagttatgcattgtgtaatgtataaatgcttaaataaaaaaaataaaaaaaataaaaaagcaataataactcttcaaacagattgagtgtccaggcagagctccatgcaattcttcaagatatcaggacaaacaaaattaaagaagaagaacatgataccatttggatagaattcaattccaaaaactagactaaaacgggagcatacccaaattattatatattactaaccaatctatacccaaacaatacaacccccttttggagtcgacgtccacggcggcccactctaccgtggcttactctacggttgctcactctaggcctaattgacaggtcgtctcgttcatgacgtcggtctcacttgaaggtgcatgactctaataccacttgacagaaccacttaaatagaactcactcccaaaaactaacctaaaatagaagggtgtccaaataattatatactactaatcaatcctatattgctcaatgtaacgtcctaacaatattcctaaacttaaaagattctttttacattggaatgcaccaattagaggttggcctttccatactaacaccaactgccaattttcaaaacaagttttagatagacttcttgtaaagctttcaagaaatcaaccccttgaccatttggtctccaaacacaaactcctaaagtattcaaagataatccatcacctataagaaattcaaagcttgtgaaattagaagatatcatcacttttttaatgatcttctgaaatttaaaaaagcgggattaacaacattgtcaagaacaaaaacactcaaaaattaaaacaaaaaaaaaaacagaattaactcttacttctgtttcccagcttttgtttgcctacacctttgatgagattccatattcatatttcaccaagtagttgtaacataagattgccataagtcaaatcaaaaccgcataaaacatttgctggtgctaagcattattaacacttgccatttctcattgttatcacttttcttttaaatatggcaaatatttaagtcggggtcctggttcgggtccaggtcctggtccgggtctgggtctgaggtccggggtacgggtccgggtccaggtctgaggtccaagtctgggtccgggtctgggtctgcgttcgcgtccggggtccaggtctgggtccgcgtccgcgtttgggtc

SEQ ID NO: 20900 - DNA, 3674 bp, Cannabis sativa
atttacgcatgtaatataatatttaaatcctatttatagtgttttaaatatttttaaattttacaaaatatcttaaataactataaccaattatgagaaaaaatttaactactaaaattattttaatataccaaaataaataaaaatatattagtacatttatctaaaaaaagtgcattatcaaaattttccaataatatatttaccaaataaagtcaaagaagtacttcccatatttccacaaagattaaagaagccaaataaaagaagggtgtcatgaatttatgatctagaaaatatttcttcaattgcttttaatttaaaccaaaaatatctttacaaacacacaaaagtacctctccttaacataatttagaaataacataacattttcattatattattattatatataataaactatagataactaagtaattaattatccactaaagtaggccggcaaacattagccaaggcactaactttcagtgattacttaatttttgcattaaactattgtttttttcttcaaaataaataacgaaaaaagacaaaaaaaaaaatgaaaatataattaaaagagcccaaacgaggcccattcagcgtcactaatgggcctaggcgaccatcgacaggacaacggagaagacagagacgacggagatcgttctcgaagtggcgaaacgaacgattttcgagacgaaaaggacgatcgccgtggaggcgtttctagctccgatgatgcatattcattattattcttcttcttcttcttgatgctctcctttttcttaagctgtgcagaggaagggaagcatcccattcccataggcacagttacagactcatcggatcggaaaagaaccgacttttcgaaacgccaccgcgaagaaccggaccgaaaagaaggactagtctggtgtggtggtggaggaggaagagggtggtgatgattgttgtggttttgttgttgggattccttgggaacaccgggtatgatctcccacttgaatggaattgttcctgcctttttaaacgattcatctatacccatttttcttttctttctctttccgactctctgtgtttatttgtttaaatgtaatcgtaatgttttggttttctttctctctatatatatacataaattgataattgaaattagagaccatttttctttttcttctaactaaaaaaaagaggaaaattcaaagatgtgttggcgagattaaaggcttgaagtggggtagtaaagtggggaccattattatttatgtatcatagtttgtgaagagattttttttttttttgaaatggagttgtgaaggagattaatgggtaatattttcttagtcacttaattgactttagtctctactacccactatgaaaaataataatggaaaaatatatatttaatttaaaccatcccaaacaaaaaatttaaaatttgtgctaaatttaacacacataaaaatatttagtctactattacaattatattttaatgtataagatgtaaaataaagaaaaaataattaattatattgatgattatataaaaattattattttatatttttttattatttaaataatggtaatatagtaaataaagaatgtaaaatttagtaaaaattaataaataataataattagtggtactataataagtagaaatgtattataacacactttttagaataaaaaagtagtttttaagtgttaaaatatactaatacactatctttttgacactctattgaagatgcacttatacccaaaaaccattcaagagagtcttttattattattattttatatgttggtatatattataattatatttatgatattatttatttaaattttttttaaataatttatagaatcgaaaatatgttttaaatattttattgctcgtacaactgtttattttaaatgacgtagtaagtaataattttaaacttatttttggcactacaaactttttaaattttttaaaaatttataactaaccctaaataactatgatatatacataatgataaaaaaaaaagtctcttaaaacgctaaggctgcgtaaagcaaatgcataacaatagtccttccaattaaaacattcttttatctgtttgccaaacgggactcttgtttcaacaacttccaaacatcatttttttaggctccaaacataaaagtaggattaaaagttacaagacatcttttatttaattttatatctttttcctaagtgtaaaaattaggataaaaaatcccttttattatagttactcatcctcaacgcccaaaaaataaaaaacagatatagaaaaatgtaccaaaatacttcttttaaagggtgtttatagactagcccattaaagaaaaaatattagaaatttttgtggccgtagaccttcttaaaaattcgttttggtagattctttatttgtttcagtatcaaaaaaaaaattagtgtaataattttttttcatgatcacatgtattgtagctatttatgaccacgtgtaaatttttataaaattctgaatagtttccaattctaaaaataatgtttaaacagttactaacattccgtataagaaaaatcgacgtacatacaacaaaatatataaattttattttcggtattgtaaactatttagaatttttagaaaatttacaggtgatcttaaataattataacatacacgatcataaaactaattttttttttttaaagtgtcgaaacaaatagaagttctaccaaaataaacttacccaaaaatatttagtgaaattgccaattttattcactctttcattttgtttgttttgtctaatattggtacaatttgaaaagcaagacacacatacaaatgttaggtgccactatgcatcttagcaattttctacctctttgataataatgtgtggagtagaaagagacttctcctttttagttgaaaaatcaagggagttaggctagtggaagataataataatatccacttatgcatataatttcataattgcatgattttaagtcttggactgggattcttttgcattttaacttcaagtgcaaacctttcaattccagtgtgtggtttttacacgttgttgaacgagtcttgttttttattcttatttaatgcaagttgtaacggttatgaaatttattataaataaataagagcacccatagtggaaggggtataataggcaatagttaaaaatgagtaattgttattggtatcaatagttgcttaacactttctcaatgtgtcgccttgcgattgattagcgatactccttaaaagttattatattaaactatatgaaatctattatagctcaaaaatttaggggaagtactactattgagtaaataccattttagaaattgtattttacaaaaattaccgattggatcgtctattttgttaaatgaaaaaatagatcttgtatcttctacaatggtaaatataagaccatgagcttaatttttgaaactttttttttttaatataaccaacttaaagataattcctaacacaaataaatagagaaaatatatatatttttgtcataatacttttagatttaattattattaaattttattttcacacaaaatcaattcaaggtcttgtattattttaaaa

SEQ ID NO: 20901 - DNA, 3210 bp, Cannabis sativa
  modified_base (1875)..(1881): a, c, t, g, unknown or other
  modified_base (2781)..(2791): a, c, t, g, unknown or other
attttttgtaaagtggtactagcttttaaattggttatgttgaaaaaaagaacgaaaattaagttcattgtattattttttttactattttagatgatacatatatcctttaataataataataaaaatataaaaagaaagtgtactacatcgaaaagaaaagaaagtgtacaatactcgaatacttactattaagtaagtagttttattcaatcacctatcgctaaagaataaaaagaaatatatttatttagtactcggtaatttatgattaaatttaaactaaaatcatcatcattttcaaaatttggtgtaacttaaattaacttcacacgtttattaaattaacttcaaagactaaggttagtttattggtgagggagggatgggaaacagggagaggtcatgagttcgaacctaagaccttgaagctattaagctattaaataattgtaaaataccattacactacactcaaaaaaaaaaaaaaattatcttacaaataattttttactttgcttaagaataatataaattcaacaaatctattttatatatattcttctcaaagcttcgaagtatctattcttacattacatacattctcttctatctaaataataataataataagtcaaaatttgtttattttatgttataattgtcggccgcatattctcacttaggaagcccatgtgccacatatacattggtttggtccaatcccaatggccaatgtttgtttggaattttattatcaattagttcatataattatattaataattaaaaagtactactagtacataattacatttattaatgttatattactattagtgtaattaaatattagatcatatataactttaaagaatagcttttataaaatattattaatcaattgtaagatgctacttataaaaaatattgaacattattggtgcccaatagcaatactcttttattataagtatttctattggtactcagtatcttctataggtgacgctccattatgattggttagcgatattctcttaaggttatttgtttaagttatatataataagaattacactaataataatatgacactgaaaaaaatactaaacaccaataatatttttaacaattctcttttattattattttgaaaaatcacacaccataagtgggagacaactttattttcatgagctagtagtgcttattttgtcaaacaagttaaaattttgaagtaacatttggcattttgttgaaattaatgcatgaatattactcatgatgattaggaaatttttttgggaagttttatatataaattagctttttgttggtggacacttattcacactttaaatatgtgagaatatgattaattataaaactagaatattcaaacacaaaaagtttgtaattttgtgtgtttttttgttgacttagttgacttttacttaatggagtgtaactctttcttctaactttggactttgacaaattagtaaaatcaaatcattattcacataaacaaagtgtcaaccaatgcaatggtgttgaatgatatataatttttgtaattaatataagatgcatggttattgaacatagatgaatgataaatggattatgctcttcaaaataaataaatatataaaaattaagaattgggtcttttacttccttttagtttatcccaaaattacaataataataaggaaatataacaacattaatttattatactacaaaaaaaatattcttactttcatttataatcactacaaaaaacagttaagtgacaaatatttaatcacaacataaatttttgtgactgaatgtgacctttagtcacaacaaaaagttacttgtgannnnnnnataatatttaaatacaagttgtcaataatttaggtttagtcacaacaaatgttgtgactaaaaacacatttagtcacaataaattgtattttcctgactattttagtcacagaccttttaatcacaatataggaataatgattaataattaatcacaaaatttattgtgactaaaagtaagattttttataatgaataaaagattttattagaaaaaatattgttaagtctgtattattactaaaatccatggctataatattaatcacaatttgttgtgatataaattaaattattaataatttatatttaaatattaatatccagtaacaagtaacttttttgttgtaaattaaaatgatactttaatcgtaaaaaaattttatgttgtcattaaaatattattactaaaaacaattttttttagtgttgattctattaatttttcaaatatttaataaacataaaaatactatcatagatttataattaaaaatgatgccgtcttcacttaaaaatatacttatactttcttatttttttacgtttattccatgcacaaattattttttgcttagttttcatctttgttatttatttataatttttaaaaatatatatatattaaattgttatgtgtgtgaaagagagaaaagttttttgttatttatttatctttgttagtttagtgcaaataatacaagtgtgaacatgataatttaattaaaataataatgtaaaacatgtggctataaaacctaaaacctaaaacagtcgtagaattcgattagtgctaaggtcttatgtgggaaccaatataaaataatatttataatcttataatataatgtctcaactctcaagtcaatcatggtagaaaacctttttttttaaaaaaannnnnnnnnnnatatatatatataataaacatatatatattgagaccttaaaatatagaacgtgaaattttgttgtcaataatttaaaaaataatgaaggtgacactatttattgaaccagctttcacactatatatcatgcatagatataatgtgactatatataaagtcattatccattcatagtactatgaattatcttttttaggtgtaagattttgagttttgagttaatggttaggattaatgtccttaattttgggtcaaattaagataagtttcatataagggaatttatataaaatattatttttagtgaaaaatttatacatttacgtttaaatattatattttatattttttacagtgttttataaaaataatacaaaaactacttgaaagtaataggaaaataatattcaaataatat

SEQ ID NO: 20902 - DNA, 2776 bp, Cannabis sativa
gccttttcttctgtgatgggttagagcaagtcttactgctccgaaatggataggagttagaccttggtctatccattgttgtggaaattcaggagggatttggagagtaactaactgtaaatcataatgtagaatggtgaaatatactaatgtacgtacgtacaattaaacaagaaaaatttacagttgtttgattataatattaatattatataacttttgtttgatcgactcttttatttgagacgtttcgtatataagcttttataataaataaatatatttttatatacatacatataaagtcacaattatgaattatctattatgaaaaaaaaaaaaaatcaccggtggtaccataataatataacttttaatttataggacccgccattatatataatatctagaaatttaaataaaattgtagccaaactttaaataaaatttggtcgaaatagatatttattctatttcaaaaaaaataaataaataaaagaatcacttttaatatttttttttattatttttaaattacttcaatagttattatgtgagttgatatgcgaatttagattaacggtagattgttatataaacttttgtaaaaaaaaaaaaaaactgcttcaaaatataaagatgaaaaaaaatacatttctaaaaaaagtatgtttttttcttttactaaaatattaatttgatgattattaagatttgtttgtccttgtctttacaaatttaaaatatctataataagggtttatttattgttaactaatgtcaaacacacttacgacaaaatagagcgggagtttgttgccttgtgagggagtgcttacgtctatttcttttctttctcattgtttataattattaaatataattaataagcttacgtctctttctttgagttgaaaaaaatgatcacatatatgtatagtactgaaaaaggtgtaaagaattgttataattataataaacataaactacaaaggtaacaggcagcgccctcggtggctaactttaaattttagtttcgcattaaatttatgtcgccttcccaatgccaccatgattggactttattacaatctgtttctccatctatccattcattcaaacttatataatatacaattatcccaacacaaaatattacctatatatacacgtataaaatacggtatacgtacgtacgtatatctacacacatttatttatctatatatattgggtcgtttagagggtttttgcattgccagtagcccaaaagataaaaatggaagccttagacgaattctcaactatagaacttattcgccaatatctcttagatgactttacttctactgaagacgcattcattgccactgtaacttctacttctacttctgaagattactcacctcaatttaccacttcttcttctccttcttcttcttcttaccaattccagtccgttaaacaagaatattctcaatctgaatctgagtcctattcccctgtttccgacgacaacccagatcaattcctcgacttaattatggaacccaaatccgaaaccgacccgcttctagcatcatcgccagaatcgtccaattcttcgcctcagaagactacgacgactgagtactcaggcgagagaaggcactacaggggagttcgacggaggccgtgggggaagttcgccgcggaaatacgcgacccgacccggaaaggaagccgggtttggctggggacgttcgacaccgacatggacgctgccaaagcttatgactgtgcggcattcaagctgagaggtcggaaggccattctgaattttcctctggaagccggacgatccgacccgccccagaatacgggtcggggcaggaataaaaggaagtcgggccaggaccaggaggctccggaacctgagactgagagtacaacgaaacgtcaagcacgaacgtaaaccggggaacgtgtaatgacgtggcgattaatgattggagatagtttatatatgatttgtgtatgacgtggcgggtaaaccggtttgacgacgtccaagggtggaggcggtgagaaagagacgacgtcgttttactatttcgggcccagaaagaaaaggtggttgagtaatgagtggaaaatgtaggatggcacagccactcccaattacctttggggttgttttaatgtaaaaaatgaatgtggttattagtttaaaaattaattaacctgaacactcaacagaaatattgtaaatttaattagtattcggtttcggtgcaataatccatcttataagattttccatatctcatttattattattatttattatttgtgaagctgtggatttcttgttatccattactttaatttattaagatatatactcaacatagtaagtttgaaaccgaaggaaatcaggaacagtatcccaggcttcaataaattaaacaagaaaatcaaataagcccttccagtggatttcttttgagaagtgacgtcttctattacgaatttggtaggccatatacatacatttgtgtttttttttttcttttttgagaaaaatatatgggaaaatattagtaggaacaatatttttattttgtctatattggtatatgcatctttatttttattcataattcaaattttatatacataatatagtttctccaaatgaattttttttttaattgattgttctagttaggggtgttcacaaagtatccgatccaatctaatccgcacgatccaatccgcaaaatgcggatatccg

SEQ ID NO: 20903 - DNA, 2040 bp, Cannabis sativa
aatataattaactttttagctggggttttcttgctcacaatcatagtatcattggctacttaaagtttccattcactcttagaagttaggtaaaaaccccatataatttttttttctacttcttaaattagctgaaaaagaaagaagattcatatatttccatattggtaattatttctaacatatgggtttaggaagaaaaacttgaaactttacatgaagaaacatgaacacaatctttgataaacttttgttattggtaaaaagatctgattatcaaaaagtacaaactttcttccaaatttgtcttgaatccactctcaattgttatgtcttcaatgcctttaacaaagttttgatcaaaataatgatttttccaacacttacacaaactgatttttcactccttcacaggactgatctgatgtctaaggtagcaagcaaaaacttctttacagagctatctgatcttccaaaaacccgaaatgttccacaaaaaaagagatttcgacgctgcagaagcgcgccaaacacagaagactttgttccaatcgaaaatcttatgtcgacagcaaagtcttctgctacaacaacatcatcaaacaatccattctcaaccaaatccatcattagaagcattcgcccgagttttggcaaagtgattatattcctgacattctatttcggtttaggcacaacatgtttctacctattcagaaaccaactcaaaggaaagaaaacaaatggtgttcttgatgcaatttacttctgcattgtgacaatgacaacagttggttatggtgacttagtaccgaatagcaaagcctcgaaattactagcttgcgcctttgtcttcacggggatggctctagtcggtttgacactaagtaaggctgcaaattaccttgttgagaagcaagaattgttggtagtgaaagcattaaacaagagcaaaaacaacacaaaccaattacaagtcatagaagaagctaagaacaacagaacaaaatacaaatgcattatgatctcaattgttcttttggtgattataactattggtgttgtgtttcttacaagtgttgagaatatggattttgttgatgcattttattgtgtttgttgtacaattacaactttggggtatggtgatgtgagcttctcaactcaaggtggaagagtttttgcaatcttttggattttgataagtactatttgtttagctcagttttttctttatattgctgagtttaacactgagattagacaaaaggctttggtggatatggttcttaatcgtccaatgactaattttgacttggaagctgctgatcttgatgatgatggctctgttgggtatgttattcaaaccaaaatctttgcttttgagttatttttgtttcattttatcttgattatggtttttccactccgaactataaactatgtattattgtgcttttcgaattttttagcccgttaaaaatagttgttgaaatatttataatattgtaaattggttcctgaattatgaggtgacgattgcttaaatagtcatgtcattattctgtttgccaacaaaatttaacagaatgaccaatttataatactgtaaatagtttaggaatcatttttaacaggctaaaaaatttaggagcatagtaatacatatgtcatagttcaaagagcaaaatcttaaataagcataaattttggtaaaaaaatgagctaacttaaagaataatttaacattgatatgtcaaacatagtaatgtaggtattagctaaatcacttctattctttacttggtaagattacactaatttttatgtgttttataagttggttgtaacgaaaccgtttcaagggtatctttctagctcttatgtacagtataagtacgttattttagctgcttctagtcattttttcaagaaatagcagagtgatgtactcgtgtataagagtcattaattagtggtaaggtgtttaatagaggtttgaagcgggaaagttatattggtatagctagaaagtgtttt

SEQ ID NO: 20904 - DNA, 1781 bp, Cannabis sativa
  modified_base (29)..(32): a, c, t, g, unknown or other
ttatgctgatgtaatatataaacgcttannnnaaaaaaaaaaaaaaatactactggtgcaactcttttatttggacatttaaatagttataatttataatttttttttatgtgacattctttaataattatttaagagagtacaatttttttagaaattcgatattatttgtagtgctagaaaaatattcaaagagtttgatttacattagcttaaacttaacaagttttattgagcgcaaagtgacaacttgaatcttctaagttctatattttcaattaattaattaattttgtaaaattaaaaaaataaatatcttaaaaaactaaagcattcttaacaactcctttaaaagaacattttcctttaaaaattaaatattcatgcataaatatacattccaacagctccttcaaattgttttttatattagagaagctttttcattttctttttcttctttttttatttaattattttttatattaaatattatttaaataatataaagaaagaatagagaaactattgtatgttgtgatttaaaattgaaaaaaattaagataatttagtgatgtattttaaaaaataaaattgaaaaagttttgggaatgttctaatggcatttagttttttttgaattataaccatgtgcacctttttttttaggagagagaagggaatcatgagtgataaataatgcagggaggttttgttttttctaacagagaaaagagagtccacatcatttatggaggaagatcattgatcctaaatagctcatgatttcttgtcctgacattgtcaaattaaacaggaataaaatcttttgtttaggaatagtactgttcataatcacttgaaagtagcttaagtagcttagggagtaagtgtgtattgaaaattttggattcgagtcctaaattatacattgcgtaatatataaatgcttaaataaaaaaattagtattcatcacaattcacataaatatatataattgttattaattatttgctttttaaaaatacttcaagtaccctttacaacatcaattcatatacattggattttttgatagtagatatcctttatatattttgttatttagaaaagtttcttaaatgatatatatattttttttttttatagtaggagtatgttgtaactatttaaaattatttataaattttcaaaattttttgaataatttataacgaaaataagagttaaatagttacttactatgcgtataataaataaataattttgcgttttataaaatatatacatcttatttttaacattgcaaactattcaaaattttaaaaaaatttataggtactcctaaataactacaacaaaatgaacattttatcctagtttttacacttaaagaaataaaagtaggataaaattttttgatctcaattttacatctgaagccttaaataaaagtttagtacaagggtcttgtttggtaaacatttatgcatttgccaaacgcaacttagaattttaagtgagactttttattctagtttttacataaaaatcgggataaaatgtcctcatatatctaggtcttttaattattgggtcggctttaacacacatataaaatgaacatttaacttttaggggtcgtttggtatgcaggttttatttcatgaaaataagtttgatattgctaggagagcgatgaagggaatgataaacctaggaaagcaacattaccgtgtttggttgacattggaagggaatgtgacaacttttttttttt

SEQ ID NO: 20905 - DNA, 2463 bp, Cannabis sativa
  modified_base (2325)..(2333): a, c, t, g, unknown or other
  modified_base (2404)..(2432): a, c, t, g, unknown or other
aagtggattcctatatttcgcatttgaaagtgtttaacactttgccgatgtgacagttaagagcatggccggcctaagcacatagcaatttgagctattgcacaagacttcttatcttatattaaaagactcaattttttatcatccctttatatataatataatatatatattttttttatataatgtatagtatacataataaatatttattagagtaaatatgcacttagcacttactaaaaaaaattaatacatatgattctaaattttttgaatgttttagaatttatgaagtattttttttaaaaaaaaaaaatgtatttatgaagtgttgattgataaaattttttaataagagattcaattttaatttctcacataaggcccttaatcgcttgggcagactctggttgggagtggttagcggtttttatattatttatcaaatcaaaatgtgtgaaatctgatattaaattctaataataacgatataacagtagtgatatgcatcttagactatctttaatgcaagatgtaaaatttgtgttaaatttagcacaaaaaataagtttatactatatttgactcattatttacatggtgtttcaatacacaagatataaaataagtacaaaaatattaattattattaatcattatttattattttattgaaaacatgcaaaaaattatttttttttattgtttaaataatagtaatatagtaaataaagaagttataattagtgttaataaaaaagtaaatttattgtaggttatatttagtacaatattatataaaatttgatataaattttaggatgtgtcaaatttgacactttttagaatatcattaaaatagttttttttctcaagtgtattaaattatagcaatggttttaaaatgccatttacatctttcttgcattaaatactttcatcaattattttaacaataaaataagaaaatcaattatccgtaaaaataatatatggctgcaaatccaattactttttatatctctttatccttttggagaaaatataaaagaaattctcccttgaataccttttaagtcgtcgaagaaaaagaggtcgtaatcgggggatcggtgcaaccgagtcgaatgtcatatcatatcgatcaatccatccatccatcgctctccggcccatgggcccccacaaccgcccaaaaagaacaactcaaccacatgagagcctcaattcaaaaagaaagaaaaatgacacatccctaccattagtaccattccatttccatatacccacaccacaattttattattataattcttctttgttttgcataaatctgaatctcactcacgcacgaatataatttaaaggtacaatctctcattttgactgattgattagatgtgtctcattccaggtcccaggccctcctcatgatgctgactcacgtaatttatgttgttatcataaatttctgtcccttatctaaccccctcccctacctatatacaacatcaacaaaactggctactactataaagttttggtgttatgttatttctagatagactattatactatactcctatcatgtaacgctttgtaatttgacccagattccagattatataagagcattgttatttagataattggctatgtatcaatattccttaaaatttattacattaaactatataggatctgatacttaaatagaatagtactaggcagtcctgatacaccttttaacatttctcattatataatagtagcagtgtacacaaactacagattagtgtcttaattcatctcaatatgggaggccacctcataattactacaaaactaaatggcgttttgtggccaaatttaattatataataaatttaacaagagtattatactttatatattttattccttaagatatctaaggaattttttttattttacactaaatttttatattcaaaaatgttaaaaaatattcatggtgactagcaatctaatatgattattagtgcaattcaatatcggatcccacatatttcactttaataaacattatagagaaccgctaactaattataaaacgtcatatttcattataataatagacactttgatatcacgtagcaatacattttacattacaacttatattaattcttttatatttttgctttatatcatttaaatattatttagggaaacgtacaaaaatactggaatttggatgaatttttacaaaaatactgtcacacgaaaaagtttttaaaaatactatgtttttataaaacaccagtagaacacaaaacagannnnnnnnnaacaacagtaaaacaactaaaaaatacccttataacaccattaaaaatttaacacagtatactgcagtatnnnnnnnnnnnnnnnnnnnnnnnnnnnnntaaaaaataccgtctgacagtatttttataa

SEQ ID NO: 20906 - DNA, 8027 bp, Cannabis sativa
ttttacacttatttttttacttttttattacttaagtaggaataattatcactttaccacctattccaatattctttcctacaacaaagtacaaactaaacataacaatcaattcctattacaatcttattccattacattactattaccattacaattaccaaaccaaacaccacctaaagaatctatcttctacaatataactattattattgtaaatgactagatgtacatttgtcaaagctcatgcttttgcttggcaaaatctttatacacagaaattgtttatacacagcaatttacacaatgaattcaaagttattaacaatgagaaagccaaggaagtctgacatgtagacatggaagtagaacactgtagaacctgtgcctggatttgaataacaaaagccgtagaagtggagtacgaataactttacctaacaaaagtaacatatgtaatagttctatacagtttatagacaataatacttgttacatgaaatttaccatgtggagtagctagcttatttttacaatttacatagtgagcttggctatttggttgctgtttcaaatagttctcgccatttctgctgatcatctcctggaccttctccctacacaaataagagatgttaaaatatattaatttatcttttgacattgcagagtaaagtagtcagttttcaatgaaattttgtctagagccacttatactaaatcaacttgagagagttacctcaaccgagttgatttcataaattttcccttcagtggattcaatgtcaagtgcttgtatgcaagcttcagctacaatgagtctgctaacctcaccgactaatttatctcctgagaattgattgcaatgtttgccaaaccaaagatatgcaaataaaaatgtttggataggatcaacaatttacataatagcacttagttgtttgaaaaataaatatccaataagtagagaacctgtgcattgaatgtttaagcaaaagagaactgctaaagggcactagtggtacccaacaccaccaagtgccatatcatttttggaaaattcaatattacatcctacatattttaattgaaaattattataggaaaactactctccactcgtaaggccgcctcatagtggtgttgagaattatgggtaatcaacttcttcccctctccctccaaagataacaaaaatatttgactgcttcaaatcttcagtgaaatcattacacttatgtttttaatttgaagtatagataggatcttatagatgcccacaagccataataaaacttgtgattagggctgaacaagatctaatccgattcaatttggatgtgaaaagttggattggatcggttattggatgttaatctcaaaatccaattaaaaactgatcaaatccaattacaattaatatatattaaaatattattcatatgcaataaatttttttaaaaaaatataaaaaaagaatagttgaattatattgtttaggctttctctttatttaccaatacatttaattaattaatctccctaaaaaataatttaactccacctaactaaaagaatagcacgcttgacttgctgtgtttttctaaacatgtgtgtagttttaaatccctaggagaaaacctaatagttccttccttttccctttaatcgttttcaatatcaattaggttttatgtaattttcttcatgtttttaatatcaattaggttttcgtgttttcaatatcaatcattttcttcatgtttttaggttttaggtttgtgtaattggatatccaattacaaaactgatccaatccaattactaattagactggattttgagatataattggatcggattggatgacaattttctaaatccaattactaattggattggataggatgaggagaaaaatgttggattggattagatcagatgtccagtcctactagtgatcccttacaaaattaacaatttataatcttagtcaaacatactcagatatgtgcagccgctctcactctctaataacactcagttacgatatcatttgacgattggctgttttacccatattaaagaaaatccactcctaattgtggtgtgatatagaagcagcagactgatagagtcaaattaaaatagtgtgcactccagttataattattgaaataccctctaatattattgttaaacataacataccttgaccaataagaactgcacgtcgttgcccagctgtagctttgagcaaagtatttagatcataagaggtgtaaggtccatcagttaatctgccggctctggtttgcatgcaatggcaaaagaaaaaagaatactttagattattacaaacttttgccattatggactcttgcgatgtgtcagtatttttgacaaacctgattattgtacacggtagaccagaattaagaaggaaatcctctcccatcttcttatatttgagaacaccaaagaggttcataatgctaatggaaaaagataaaacacataagttgttaaccaatgaaactgaaaatttaaaggaaaaatgttatgatagtcaatgtctaccaaggttagtatccaaactgagttcctgttgcgtaatttctagtaaatagcaatcacaaaaatatcttgtgtaaaccttgtagtgaattcacttctctattttaatggatggtacctttccacttatggaatattcatgaaaatatatttcctaacaaaacaactgatcatctatagactatagtattatttaagattttgcattaaatgaaactttcttgtaacgagacactttcatgtcctttttctcctgcttccttaagaaacagtatcacatggaaaggattagttggaggagaggttactctgctcagagaacaaagggtcctcaagtatctagtgaatagcctaagcaaaaaacatgtagattgaggttctgttgatgaactcaacatagacatgatggacagaaaatgtatactatttagcgcataaagatacagatataataaaatctagaccaaaaatagaaacaaaagacaggttcagttaaatagttggtaatgatatttgattaagtaattttcttagttgtactctaggggtagattcatttcaggctacatgatgttctagctattttaaaatataatcttgaacaaggaaaataatcccaatttatttgagaaatttccatcttggaaagattacagagaaattatcgtaaaaacaaaaaattttaactggaaaaatatggaaggagccattcatgagtacaaaatcactgaactctattttctgctctctcaattcttatagatacaaaagaagatcaattgctagctttataactcaccattagtcttacctccatgggagttcattgaacttggttacacctattgatgaaacaagaacaacccttttcactgagggaggaagtgcagatacaagatttttcacaccttcccaatcttcaaaaggaaaatactacagttaaaagcattgaaagcatgcttacacttgagtgttacagacttcatgcatgtattttaaattatgagcataattgggtcttgaaaaggcacgcaactttatgaacaaaataaaaacacatatactgcacaagcatttctacaatgtaaacaaaaagaaaaattaattgtgacatttctttttgattctggacttatcaacaacaaggtcactaaaagttcaagtagatgaatttacctactctttcaggagtattatctccgtcccaccgtttggatggaaaagcagttgttcctgtacagcaaatgacatgtgtgactccctgaaaaacaaaagatttacataaaaaaaaattaacatgttcaaatatgaatgaacaaataaatgcttatgtcaaaacaaaaaacagccatgtagttaaatgacaaacctcaaaaaaggttggatctagatcttcagggtttcgagtatctcctttgcatatctataaatgaacaagaagttgtacaacattaaggggtgtatttggttgggagtaatgaaaacagatgaaagtaatgggatggatgaattgagttaaatatagcatgagtaatttgtgcattcgaatgacatttcctcccacttttggatggataaccattccaccaaaaatggtgaaaaaagctatttcaatactttataaagcaagcaaacaaccaaacaaatgaatgaaatccaaccagccaaacataccacaacataatacgtatcaaacaaagcaagaaaatgtgtcaaaagtgatcgactgtggctgaaggaaaaatgataagaaaactagtaatgaatccccagttcatgggatgagaggatgaatttggattggaacctgtaatgtttgttcatcttgttcaccaaataaagttgctgctttttcagggtcgcgcagcaatagacgtgacttgatgtttctattgagcaatgatgccactaccaactgccctgagaagagcataaaagaatcactaaaatttgcttagtttctcaataaattcactacaaaataacacagaattgaagtacgtacgtaagaagataaagcataaaagcaagtgaatatatatatatatatatacacatataaacacacatatacttgagttgatgatgattacaacaagactgcgtgtagaagaaaagataataataaaaggataaaaaagagtgattgagtgagtgcctagaagaagaagaagaagaagaagaagaagagcgtaccaacgccaccagttcctccaacaacgagaacgagcttagaagaagaagaggaggaaagggtagtttcagaattgagggttgactcggaatttggggattggacgacttcttcccttatagctcgaactccaactccaagtgatgactctgctcttaagcttgagctagaagaagaagaaatggtccttgtcctcaaaacaagtgaaaatacagggttctgcccaggacattttggtaaatttacaaattgaaagtgtgaatttggggtgaaggagagtggaggagaagccatgtgtgagactatgagagccatatgaccccaaaagctttcttctaatccttttagcacagaaacaccgaagcaaagagaggcgttaccttacttccatttgggaactcttttgtagcaatttttttttttaattacatataccaccatttttttaattatatttttaagtttaatttagtcctttttatatttttacaattttttataaaaataacaccataaaaattatataaaaataacatgaaaataatatttaaataatatcaaaacaacaacaaaaaataacatacagataagaaaatcaacaaaaaattaaaatacatatagaaagaatgtattttctataaataaaattaaaaaatcgtaaaaatatttaaaatttagtaagtacaactattttttttttttttgtatttgtaaaaattgccctttttttctgtacttaaaatttgggccgttttaatataaggcctgaattcatttaagcagagaagcccaacccaaattttaattccactctacaaagacaaacaaaaccctaactcacactgcttttctctaccattttgaacagagtagatttagccactcaaacaggagctcttctctgctgccatggggtatatgcttttcctttcgtaaatataattttacataagagaactatacactttttattgatttctgcgttcttcctttgaattttcacatcttcgtttaaagctgcttaaatctatgtaaagtgtcacttgctttaccattggttgtagttcattcactttttctttttttccttttcaatagagactattaaatttatgctccacgaataattgtattatgtatgcataattttcattcacatattaagttgaagaaaaaaaaatgttactttgtaatcctttcttaagaatgagctcattagttttgctattcatacctgcaacaacaacaccaacaactgaattacttgagtggtttatattctgatcctgtgactgcaactgagtatactggcttgcctggaatcgttgtttatactgcctagaccagcaactggaaaatatttaccatagataccgccctatgcaatattctgattagttcattagtttttgatgttatgataaattaaaaattgttagtttctaacttttttttgttgagtatcagtatgtattcatttggttatgtactattagagtggttaattttctaggtttcattgtgataaactctagtactgcaattaagtgtgttatggttttgttatttatacatcaggaatagttgaggaatgtttattatagatatagataatgcctatataatagcgccgttgattttctaagatttcattgtgataacgccagtgctgcactgtttcttgcagtaagacacgtggtaccgttgccgggcgcaaactgaagagccaccgtatcaagcaaaggtgggccgacaaatcatacaagaaatctcaccttggtaacgaatggaagaagccatttgccggttcttcccacgcaaagggcattgtccttgagaagatgtgagatcattggttttcatgattatttgcactcctttgttaaagctgacaagttttgttataatataacttattcgatgcaaaaacttattagtgatattcattgcgttgcacagtggtattgaagcaaagcagcctaactctgctatcagaaagtgtgctagagttcaacttattaaaaatggcaagaagattgctgccttcgtccccaatgatggttgcttaaactacattgaagagaatgtaagttcacttaaaatgaaactcttagcattgtgcagatgaccattttggattcatgtttgtttgagccttttcatagaaattacttaaataagaaatcttgttttgtgattttaggatgaggttttgattgctggattcggaagaaagggtcatgctgtgggagatattcctggagttaggttcaaggttgtgaaagtctctggagtgtctctcttggctcttttcaaggagaagaaggagaagcctagatcttaagttatgacagttatttttgaccctaaagaatctttgttctttgttttagtcatttgatgaattttgtaatcagtttttgatattttcttgttggaatgaatttagtaatgtccctttttgactcattttattaggcactcatgtggtttatgatcaagttcaagttcaatatgagttgtctcaatctcaattaaaaggctttgttcactctttaactgttcctggtaaaagagagctcataacagagtgataacaaacaaggagttagtcttgaattgtacaccttatattaatttagtcacttgtgtgcttaaagttcaaatagttatttgcgtgttacggtgttaacaaagatttttttatatatcattaatgattatacaaaattgatcaaagacaaatttacgttgaagatgatttatataaacgttttgaccacaggtgagggtgtcatttcatcagccacagttagtttttcttgtcagcttactactacttccttcttctaattaactatttcagataacatctatatagtttatcaaaataataaaaataaaataataacatctatataagaatagttatccctcccaataattatttcatctccaagaccaaacatttgtttggagggtctatcatgatgcacttcctactggatccaagcttcaacaccggcgaatcatacacaattcagtttgtcactgctgccagagaacggaaggacagaaaaaaccctaacacatgctctttttggttgtttaactgttcagaaggtatggaatctaactcctttctttgctcatattactaaagggaaatttcactatttgcccttaataatataccccatatcaaaatttataccctaaactaatttgtacaaattaatgcctataattttaaaag

SEQ ID NO: 20907 - DNA, 7952 bp, Cannabis sativa
tatatgcagattattgggcgtgggatggcaggtatccaaggactcgtttacgcaggaactggatgctttcatagacgtaaagttatctataatttcgatttggataacgctgatattaaaggtttaatttgcatgccttttacacaaacacattgatcacacatttatatatatatatatatatatatgattctaatatccaatattcctttttgatcttctggctctaggcaaagaattattagttgatgaaaatgagaccacgacatttggaaactccaaggagctcatggaatcagtggctaagacctgtacagaaccagtagtactttatgggaagaataatattgacacaattattagttctcatcatcatcaagatctctcaactatggttcaagcagcacaccaagttgctcgttgtgactatgagcatggtaccacttggggtgcaaaggtactatattggaaatgctaagttgtcactattaatataattagtcaataaagaatttcatcgatcaaaactttatatttatttaattaagtctaaaattaatgacgatgatgagtaatattgtaggtgggttggaaatatggttcgatgacagaagatgtcctaacaggaatgcaaattcatgccatggggttgaaatcggtgtcatgcatgccaaacccaccggggtttatgggcattgtaccaacaagtgggcccacatcaatgacccaagtaaagagatgggtaactgggcttcttcaaattttgttcagtaggaacagtccaatcttcgcaaccttgcactctaagcttcaattcagacagtgcttgatttacacttggattcttatctggggcctacgctctattcctacactatgctacgctattctgccagcctactgtatcattaccaactcaagttatttacctaaggtatacattacttacccatatctccacacaaaattaattaaatatgttgcaaataataaatttacgagaaatactagcttactaagggacatttaagctgtgaattatgtgtcatgttattattgatataatttaatattagattatacacattttaattaaatatataaatatatatagagaattgttaatctactcataataggcatatagttatggtgttggagattttaaggtacttaattaataaaaatgttctaaatttattgatgtaacaacatttatatgtgattaagatgacttcataatttgaaaaaataaaataatactactgcataattattaggtattatattaggttaatgtatgcatgtaatgtttaaaaattaaaatatgcacatatcgttactcattaccataaatttatgcatgtaatgttctcatgaaaattttgaataatattgagtgacaaaaaaaaaaaaaaaaagatccaagcaaactgtggtaggatactcaaaatttgaattctatttttaatagcttaaactatttaaaattttctaaaatttacttgagtcttgttactacactcaatattgtcatgagattaatatttgtaaatccactatatagggtaagattttttatttgataatattttattaagttttacatctatactaatatatgcaggccaatgaaccagcaatgttgctatttttagctcaatttgttatcgaaaatatggaaacctaccactcttatcgtaaatatggccaatcatttattgcatggtggaacaacttgaaaatggcaaaaataaatgcaaccacttcaatgttattcggagtagtaagtttcccacttaagctattgggaatttcagagatcgtttttgaagtaacacaaaaagaatctaatgataagactaggagcagtagtactacacaaggcactgaaaattcaaaagataaggaggttgtaaatgctggtaggtttacattcgatgattctgcgttgtttgtgccacccacaacattgttgtttgtagaagtagctggactgggattgagcatgtgggagggtggacgagatgaggtagggcttggggagtacttggctagtttttgggtggtgatgtgcttttggccttttgttagaggtctttttgggaagggcaaatatgggattcccttgtctactttgttaaagtctttttgtttttcatttatttgtgtacaattgtgtagatatgcttcagttcttggctaaggcaaggcctactagattttatggtctaaatcagtgattaattgcagaatgtagagtaagaaatttcaacacttttattaatttattgaagactacttgcaaacttttaacactttggacacaatgactctgacactctgacatttttgcacactttgaactctttttctcacacttgaactctcttgctcaaacttacatcataagcacacacttcatttctatttatagactacaaagaatgtatctaaatatttttagaattttctaatttactaactaattaatcactttttactattttctaaataactctaaaactatctaatcttagttcaagtcattctaagttttctctaaaacttttaagagtgttcttgatttctcttataaatttattagaatattttaaaatatttcaacatatagattctagatttaataatgactcttaacactctgtctcattatcaaatgtttttcaagcttcttctcatttgataaggtttagttgatctctaaatattgataatataattgtgcttaagcttttggtgaatatattagcaacttgatcatctgtactgatttttcgcatctctatttcttcttgaagtactttctctcttaaaaagtaataatgctcttttacatgctttgttcttgcataaaatactagattttagctaaacaaatagttgattaattatcacaggacaatggcaccgagtaattgaatggttaatataaatcttttaataattgtatcaatcatgtgctttcttgtactgctatagcagctgctctatactctacctacgtggatgataatcacatagtctgttttcatttgcaacaccaagaaacaactccaattctaatcttaaacaaataaccagtagttgattatcacgtgtcatgatctctggcataatctgcatcataataactaatcaacttaatctctccattatacttgtatagaagcccataatctatagtatctttaacatacctcataactcatcaaatttcttccaaaaagttgtttcttcaatttttgcatgtatctacttaatactccaactgaatagaaaatatctgggcggagtaatgtaaggtagattaaattatctacaagttgacagtacattgtatcatttttcaactcttttccttaatgagcctaaagtttgtcatttgcttccatgggtgttgatataaatgttcaagcaagcattctaaacgtttgcaataaatcctttgcatacttttcttggtagagaaataaacctttcttggtgcgattaccttctaaacccagaaagtgtttaagttctccaagctccttcatttgaaaacgcactgatagattctcctttgttttatgaattctacttcattgtctccagtgatgatgagattgtctacgtataccaacaccactaaaatcttagcatctttcattttgacaaataaacgagaatcttcatgtgccattgagtatctgcttttcattaaaaactcaacaatctttccataccatgctcttggtgcccgcttcaatccatataatgtcttattcaacttgcaaacatgattagggtgaactttgtcctcaaatcctcttggttgaatcatatatatttctcgatccaactctccatgtaagaatgcattcttcacatccatttgccaaagtctccaccctttacgagcaacaagctagtaagactcgtactgttgtcattgttgcaactatactaaatgtttcgtctaaagtagaaatccaaaaagtaaaaacccttcggagtcttgataactctgaatgggtatcaacaaaacacactaaggatagtttaaaatttcatcttgcctggtttttccctaatttcggaatcctacaagcatgcaaatgtctatgggggtggaacaagccatactcaaaccattcaagcaaaatcaacacttctagggcaaaaagaatttccacataatcttaccctagaattaaaactcgacgggaaacactttaccactcaaacatgcaaggaatcctagacctagcttgaactaagtatttctatcttagatacgaaatagcaaattgtcaacaaagcgtcggggcacttacttattgtacgaaccagaaaagagaggttgttgtggtaatcggcctaagaatgctggacccagtcgattacacgatcgtagtaggcctgagcgttgaagctttcgtcagtctagggtggaacgatttgaggtccaacggccctgcttttagaaaatgggctgaacggagatttagaaagatttgaatcaagcaatcaaagacttcttgcattcattatttgagacaaaagtgaaaagtgagttttttggaaaataaggggttctggtttgaaagttcaaaaatggaaagttttgaaagtctgaggtgatgaaaaaggagaaatgagttgggcaaatcaatttataccttgattaagatccacgcaatttgaaatggatggcctgaatttcttcttccaaaagcacacttcgatccgatggatgggaagtttaaaatatggcatttaaggcttgtcctggcatttattattcatcattgcatgcctcgagtaccatacgcattaaaggagacaccgtctcaattgttctgctatcattgtaactgttcctaagagacgcaccctcaacgcatgtgtactgacaatagttacattaaagccccccatgtgtgccacgcacatggtgccttcaatttatgttcccttacttgatgatagctcacgggatgcatccacaactccaacaattaccatgtgtcaagaactaatccccaagaaatggaaaagtactgtaagctctcagatctcagagagtcccgaaagcttgagagtaaatgttatccatgtttctaaacatgttacatgtggcattcaaaggaagggattagtcttataaattccctaatgaaggtcccccactatgatcttgccatttagaagcctcgtggaaccgggaataagtcaagactaaagaatatatggaagttcacttggccctgtcatagcttcctggatgcggaaggcgtgttacctctcccagacccaaagggatctaaacttggaagcctacccaaatgatactcggatgggtactcaaggggcctaatgtagatgttaatcaccttagagtgtcgcggacgtctacctttgatacaagccaggtcaccaagtaacggttatattttttctgacaaaggatcagatcttgtctcctacgaccaagcatgatagtacgcacacctccaccaccttttaagtagacggatattacaagcctcttcttttaaaggtgaaagctttatgcaacacatggattctccttttaaaggttaaacctttggaggacacgtgtcaacttcgtacaaatggtctcccattgtccagttgtagtacgcacaggcacaatagcttctaagggactcaatggttaactcttattttacatgtattttaccccattagtggactttgagcaaaaatcccaggtgggtcatgggcatgtccatatccgccacttagcctataaataccctcatattcccatatggaaggggatcgcaaataacatagttgaaacactgctaagttcactcttcctcttcttcacaagaaacatagagtgcaaaattagagtttcctccaaaaatattataaacacatcaaaaatgccctaagatgctaatagattgactcatggattaattaacacccgaactacgtaaaaaaattccatctctttatttttatattttattatttctttagttcttaaatattgaatttatgaaaatctcgataaacaattgtaattaccaaaaaaaaatctttctagctttttttaaaataatacaactaaaaatacacataataatcaaagtaaaaactaattagaatatataactaagtatatacgtgtattgcacgtaatattacctagtacataaataattttatataccaaataagaaaacgtaactaatcattgaaagtgattttaaattctcttctcaaaaataagtaatgaattactgacaaataacttaaagatgaaaaataaaattaatagtgagaatgatattaataaatgaataatcattatgttctcgatgatcatatctacaatcccaattaattaagtaatatattttcatcttattttcttacacggttttttcatataaactcctttatcattaaatatctattgattctcttctaattggttggaccgtaggtgtgatgatttacgtaacggatgagtattggctcaagttttagatgacccaactacgccaaggaaaagaatagaaagaagcagtggactccgtcaaatagtttaaaaaaaattatgtatctcattagtacaaaatttattttaaataaatctttctttaccctctatgttattattattataagaacttccaagactcactttttgttaagttattcaagccttaagtttatgcaagtaatatatattaaaaatgtgttggaatagaatgtcttctaaaaaatatagcaattgtataatattaatatatttataaaaaaaaaatttaacgaaaaagagtatttttttttctttttaaataatgaactagaaaaagttttctttaaaaagaatgaactagaaatagtacatatttaattagagatatttaatggaagataaaaagcatcaattaaaccaccttaacaaaaatgataagacttgtatatattcaaatatataagcgtatttattctgatctttttacctcctaaggtctcgatttagagtcaatccgaactgttcttcgagggattactaagcgtattagtcatcaacaatacgagtaccttactaaacctttcaattttgttgaggtcagaaaagttcttttctaactttcaggggataaagcccctaaccctgatggtctaaatgcgttgttctattagaagaattggtctactttaagtcaagatctttgtaaagttgttcttgatatccttaacaatggtgccaatctaaatcccatcaacgagacttttcttgtcctcatccctaagaaaaataatgcttccgaaattcgagatttgagacctattagcctctgctctactatctataaagttgttgccaagtccattgccaatagactgaaagagattcttaatgatcttatttcccacaatcaaggagcttttctctataatagaatcattttcgataacattatcattgctaatgagatcattaatgccattaataataggaagaatggcaaaattagttgggctgctcttacgctggacatggaaaaggctttcgataaagttgaatgggattttattaggcatattcctacccacttgggtttccctataaattttatttctcttatttttaactgtatctcctctgttaattttaaactcagtatcaacaataaccttttccctcccattcttccctccagaggaatcaggcaaggggaccccctctctcactatctgtttcgcctcgttgcaaaagctctttctaccataatctcttctaaaactcaagatcatctgttcaggggcatttctatctatcattctgctccttctatttcccatcttctttttgcatacgaaagtttgctttttactcatgtaaattctcttagctgtaatcagggtcggtc

SEQ ID NO: 20908 - DNA, 2081 bp, Cannabis sativa
tttgtgttattaaccactcggattgttgagatgctttaccaagtatagggatgcattatttaccaagttttcttgcaaagttcgttaaaattgtataattctcactgtagaagagatgttctcgtggagtattagtgtgtagccatttttgatctgttagatcatatgtgcctaatggcccatataagtctgttagatcactgctaattcttatgtgttttaaaactagcaagttggtaagatgaatagtgtgctttcttagatttgatagcgttagctaccccatttttgcttcatgaaaaaagtattttgcatgttttatcatatagagtgatgaggagatgttcatggaatccttgatctgcaatatggatgctgattgtgagaagcttttagtctgcaaaatggatcttctctgtacaaagatccttcaattcaatacagaggtaatgtgatcttgaatttttctgttaacttgttctttgtaagagtagtaatgcattttctgtcacttaacataagccactactttcctaatacaggtcaatcgtagttatgaacaacgttacagttgccctcaagaactcgcattgaatggttgtggaattaactcttcagcaacatacttaatgggaaaatctccgctccctgctttggacacatttatagaatctattgccagtactggaaatgtaccaggtggttcttttttcttttttattcttgcttagctttgttaagatttgcattatgaatacactaatccacaacaacattttcaatcctgtttatgctaacaatttgtggcattttcagggaaaatacgttcttggtacttgttttcagactacgggctgatggtctacagcatgtcaagaaacagatactgtgagagaattggtagagagcacaaaagcaatcatggtaagcttatttttactaattgatcttgagaggagagcccatattctttgatgtttttcgttcgtttactcctcatctgatggaatctttttcctttgcattactattttattgcttagtgatatacgttgtcgacctgagacgagccgattattatcaaaaatgtcatgatcccgattgcagaggtgatgggagattatatattgtctcgttttttaagctttctgtcttgtaaattatgctataagtagtaactttatttctcatctcattgtttgaacttggaaccaggttatcgttcacccttgcgtccagttccattggatattatacctgatactttggaccagaaaggatctgaagtttatgaactaggacagcagaatgataaaagcatggcccacaattccatttccaccccagattcatggtggcttgaagccatgagactagcagataatgttgaaaaaaggcaggctctatcagacctgagtatgatggttagttttgaccctactctatcaaagtatccgaatgctaaagtcattgctcattttcttataatgtaatttgatcttattacaggaaaacatcaatgacgatgacgatgaagatttcgacaactggtggaattctgtggaaagcactgaactttctcacttactagtttaatttttacccgagctttggctcgatgacactcgctcagtgcctagatagaacagagtgttaggaaactaggaaatagtacaattctagttcagcattctcttttattggaacccaagtagtaagttctttgccactcttgtgactgaaattggggaattaaaatcttctcatgtaaagctacaactcgtgcttattatgccagtttgttgtgattaaggccataactgttgtattggcaatagaggaatgtaaataataaatatccataaattttaatttaattggttctgttgttaccaaatagcattattataatatatttgtaccaataaaagccaatttaataaaataatgactttgaagcgacacttgtcgccatcttaacaaagtctcacattgtcatctcactattatttattccccacaatcacacacacccccaactataatggcttcttccacatccatgtccgccgctgtagcac

SEQ ID NO: 20909 - DNA, 2306 bp, Cannabis sativa
cccttctttacttgccaaactcaatcacacactgcaacaagctctgcctctgtgaatgaagctaccgtatcagtatttgaaggccgctaagtcactcagcttttcaaattcgtgcttttatcctcttaatccattcaacctataactacacattaatgaaatgttgtactatttaagctgggaccttcttgaaaattcaatcttaattgattaaatgtagaatctgctaatgtattccatctcattggttaaatgttaactaatataactaactctgacagttgaaagcagagttgctcagtgcctaaaagcttataatataaatatataggtgttgaatatttatactagtatataacaatcaacgcgacaagacaagggaaggcgatattcttttgactttattattttatcctcccaaaagtctaacttatgtgctcattaatcattatatctatacaaaaaaatttacataatacaccaataagctttttctcatacaaaatttattaacacggaatatttttttatttttacaattttaattttttttagttacaaatatacatatttcaataaaaataatcaactgttcaatatttttttaattgttttacagttaatttatagttgtaatgagattaattttcttattattttataatttatttatatttgatttataattattgtaaagttgatttgttattgattttgaatttgatttctaatatttttaatttttgtatttttgtaattttaaaatttaaaattatatttttaaaaaattaaatgtaaataaaacatacatataataaaaaagtatttatgaaaaaccttaattataacaagtgggacaactattaagataattgatatggagtgagatgagaggaagagtttgtggatgatgcatgggatggctcgtatggtgcatcagaagcaataagatgcgtagatgttgacctgttattcgtacaagatcataccaatgatagattaagcatgtcatgatgtagttttcatgttcagtaatgaaacaaatcgtcttcaacccattcaacctatatttaattcaaagctctccgagatcacgtcaaagggccactacatgctctgttactgctagtgtctcaatgattgaagggcagtaaaaaaagtgttttgaatttactttctcaggtcagcttaacagaaagtaattatgaagctttgttactgtggcagcaatgagtaaggggaatgattctcattctcattctgttagtcttgtcattgattaatgatgtaacatctgcttcattactagttttctcaagtgctagtatcaaacacataatgaatcatcataatatttatcttgtatgtcttattgcttgttatctactttctggtctcggtagagaattacagtgctactccacaatactaaatttctccaaaactattattaccattttgtagacaaataccaccaagccaataaattgagcggcaagggtgcctctgtgaacacaaaaaatgaagtaatgaaataaaaaaaaaatggccaatgagaagttgacttagactgagtcctatgtctggacattattattataatattatacacaattaatacgctaagggaaggcgatagttttttatttattttcccgcctatgtctaacttctgtgctttattatattgtaatatttagttttataagtgagacacctatattgtgatatggagagaattaaaaagaaattgccaacaacagagagaagaaaggaatcttatgttttttagtacagggattaactaacataacttttacttttctaataaacttgttgatctacggattatttgccatctttctcttttacttatatccatccacaggttcttccaaatgaattcaaatgaaagagattttaaagctttattctttcgaattatactgctctgcagtttctcatttaaatgcttctcagccattaataacataacatcatcccaagctttatctcagggccaaactctggtctcctccaaccaagttttcgagttaggcttctttagtcccaataattctgaaaataagttcgtgggaatctggtataagcaaatctcacccattagagctgtgtgggtggcaaacagagacaaccctgtttcagttgcagactctccatcaactctaactattggcagcaacggaaatcttgagctcttggatagaaaccgaaactctgtttggtcaaccaatatcaatatccaatctaataataccacggtggcaattctttcagattatgga

SEQ ID NO: 20910 - DNA, 6097 bp, Cannabis sativa
  modified_base (6055)..(6056): a, c, t, g, unknown or other
acaaaactgtttacattttttgtatttgttcgtattaggcattgtcttttggttgtgttaaaaaaaaagttttcaaaaaataagggtcttatttttactattttagaaaatatagggtttattttgtcatttaacaaaatatagggtccaatttataatttttgcaaaacacaaggtccaaaatggtatttacccataaatttatgactacattaaattttatatatttaaaaaatataattaatttgtattagatttaattttattattattctttaaattaataagtatgtaatttaagtaaatgttactaatatatatattataggaaaattctataatacaccctcttaaaataggtgtattgatgcaacctctaactgttacggtatttataagaattttttaatctaaattttttttatagtcgtgtagattatagttattaaagacatcctgtcaaaaacagtgttcgaagagtttgttgcactcgtgattttttttattttatacgcgtgtgaaatagagcgtgtgaaatagacggtttaaacattgatttttatattgtaaattattttgaatttttcaaaattttgttggatgtcttaaataattataacgtataaaaaaaatacactcattttaatggggtgtattgtaaaagttccataattataatactaatagtatatataattcgttagccaagcctactcaagttatatatagaagaaaatttcatcatcaaaatctatatttggaaaaacgaaatatacgactgactttggagtatacgactgactttggagtttttgagtgggtggtaatttactaattttcttttgaatatctacttgtttttttttttctcctacttcacgtgacgaggcacaaacacataatgtttgttatgttatatatggttttaaaaattattagtgaacattctacaggtttctttagagaagaaatttaaaagaacagaaaaggaaaaataattcattcattgcaaacaatacaccaaatacaatgaaggctaacatattagatctctttgatcctattagggaacaagaaaccaataaattttcgagaagggattaaagataacaatgatttttggggaacttgtttatggaaagctcactcagaggtatttgtcatcgtaagcagccattcttaggccagcacgagttaagtccccagttgaacaccaatagcattattaatcttaataattcttaggggagtcaattaggtatgattaatgctaaaagccaccagtaatgtctaatattcttttaagtgttgtactgtattaagtatcggatcctatatattttataataataaaaaaaagtattgagtcccatataaataaataacttttaaaaaatatatctaaccaattgcaatgtgccacatctaggtggtgctacccaatatcaccgccatttaagtattgatcttaatgccttcatatctttattatttctcacaaaaatcactcaagcttgataaattaacaaactatgtaaaaaaaacattgcatatcgggctagcgtgaacacgagtgatgttaggttttatgtcataaataaaacactatttcaatgtaatcttatcaataaaagtaaagagatatttgactattgtagtttacatgtttatttcatgaataattatttaatatataaattctgttaaaacccgaatatatagatatgttaacctggaaacttaccctgatgacgtggacatcaatggtggcaagaaagagaacatcttggagttgagcagtctcgagtcataatagtcaacctaggaggggtccctagccctgttcccaagttgactttgggaactccagaatgggtgtttggatcccaccaagttgtttccaactcactatctttcagtattctgtaccataaaaacatggaacattcaagtccaggatctgagagttgaaaatacatgaaacaacaccacaaaaatcaacctgggtgcctagggtttcacccagtgtccaagttgacaacccaattacagtttaagtttctgggaccatcttagtgcaagtgggtcaaactttgtactgtgacatgaattagacatgtcacaaacatatttgagacatcagaatcaaattcagagaacttttgtttttgagcacccggagcactaggtgccccaacgctcaggttgacattttgtcaacttgggtcacttccaagcatcaaactgaaaattcgtctcgtacgtcttcttcgtcttcatcaaaaatggggaaacaagtgttttcagggaagaaacagacaaacttggaggccgaaacaagggaccagtgtcccgattgacacctggtgctgacccaacacccatgttggtattttttcaacatgggccaattccgagtaagtcaccttgccaaaaaagtgaaatatgaagttgtaaatttgactcttcgaacttcataactttcagatttgacactgaaaagtggtcaataccagctcgctagattgccgagaagaataatgaatataagtatataatttagagagacaaaatttatagtagttcactccccacgtcacgatggtaatggagctacttctacttcgagtttttatttctcacgagttggtattacaggaaaggctaagtgtttaagctccaatttctagagagagaaactaaagagagatgcactgacctcgtgggtagttttttgaatatgaaaaataagctaagggagctctccttttatagttgaagaaggcccaagaaaataggagaaaaatacacattagatatttttgactgtagatgatgatctaacggtcaaaattagcttctgatggtgatagtcattttcggagcctagcggggctcgttgcaggtaacccggagcatattttcgtaactcccttgggggtgaaatttgaggtcaataatttcataattgtgattgaagtgtgagacatgactttataaatcattgaattatcttcgaaacacaagttgaattgcttcaatcagatcagtattgcgtgacttatggctattttactaaaggtagttcatgacctagcgcctaggttaacatcccagcgcctaggttgacatctcagcgcccaggttgacatatgacgtcaacctggacactgggcaagtgaaaaaaaatgtccaaggggtgtactttaagatgcctaattgatattttgacatcacttagtttgtttttgtgttctggtgaagctggtcaccatttctcggagatatgtcgttctgtagaatgagagactcaaaactcttcatttccgagtgagtttcccatgttgaaaatgagaaatgcaaagttgtgaagttgacttctctaacttcatcgatcttagttattatgaaaaactagatggacggtcaaaacagaattagaatcggataagcagaacccatcacaccaggccatttgtcaacctaggtgatgggtatcctgtttccaagctcccgggttgctcttttgatacttccaaggttcttgaacttgaggacaatgtctcttaccctatttttgaccattctagattcaatggtctattcatatttgacaattgagcaatcaaaaccagcgcaccaggttaattatcaacctgggcgttgggcctagcactaggtcaacatgggcgctgggccctatttctaggggctcgagtctgtggttttctccctgagtttgcttgaatcttcattatttctgatgacaaaacaaatgcccagaacactttttcgagaacttgattggaaacagccaggttgacaatatgtcaacttgggcgctgggcccaatgcgaggtgtcaacttgggcgcagggtcccaattatggccattcagaacatctgtttggtccccagaagtagttaaaccttaatcttttctaaaaatagagaagatgcttagaagagttttcggacatcatcggaatcagcccaagttgacaaaatgtcaacctgggcgctatgccatgcttctagcacccaagaagtgttatttcttccctgaaagtacctatttccccatttttggtgaagacaaagatgatgcaaaagtcagatcgtcgatctgatacttggaaggcacctagattgacaaattatcaacctaggcgctggggtgcctgggcaccaggtgctccagatgctttaaaatgaacttgctccgaatctaattctgatgcctcaaatatatatgtggtatgtatatttgatgtgccaatacaaagtttgacccatttacactaagacagtcgtaaaaactaaaacctagttaggaatgtcaacttggacgtcaggtttcatgtaattttaactctcggggcctagatttagttgctccatgtcttcatggtacagaatactaaaagatactgagttggaaacaagttgtcgaagtctaaacttccattctagagttctcgaagttaacctaggcactgggctagggactcctcctaggtcgacttgctataacttaggactactcaacttcgagatgtcatctttcttatcacatgtcaaacattgatgtccatgtaaacactcagttactatgaaaaaatagatgaacagtcgagatagaatcagaattagataagcaagacctagtgcaccatgccatatgtcaacctgggcattagttgctcttttcggagttttcgagatgttattttgattcttccaaggttcttgaaatcgaggacgagttctcctactcgatttttgagcatttttgagagaatgctcggagtataacttacatttggatgatcaaaaccagcacaccaggttgattgtcaacctgggcgctaggcccagcactaagtcaacctgggcgttgggatcgattttgatgcccctgtgattgttgttttctccccgagtttagttgtatctttgttatttctaatggcagaaaaaatgctcggaacactttttcagaaataagattggaaacaatggttgacaatatgtcaactttggttctgagcctagtgctaggtgtcaacctgggtgttgggtccactttcatgcccttagacagttttgtttgctcctccgaatacttaaatcttacttattgatgaaaacaaagaatatacacggaagactttttggaaaaactcatcgaaatcggtctaacttgacaaaatgttaacctgggcactgagccaccacctggtgtcaaactgggcgctggtcccttattttggcctccaggttggtctgtttcttccccaaaaacacttgtttcctcatttttgatgaagacaaagaagatgacggaggaggattttcattttgatgcttggaactggcttaggttgacaaaatgtcaacctgggcgctgggtgcctagggcacctggtgcttcgggtgctcaaaaataaaagttctccgaatctgattctaatgcttcaaatatatttgtgacatgtctagttcatatcccagtacaaaatttaatccattttcactaagacggtcccaaaaactgaaaccctaattaggttttcaacctagaagctgggtgaaaccctaggtgcctaggttgatttccgtggtgctatttcgtgtgttttcagcccttggggccttatacttgaatgtttcatgtcttcatggcacaaaacagtgaaagatagtgagttggaaacaacttggtgtgctccaaacacccatttcagatttcccgaagtcaacctgggcgtagggctagggacccctcctaggttgactgctatgactcaggactactcaactttgacatattttctttcttgccacgtgtcaaatattgacatccacatcatcaaggtaagtttctgggttaacatttgcccccaagtcaacttcatacttgtgtaaggttgacttgatgacgtgaactgagcctgtttctctcgaaactaccaggtgggcatcaattttcgaaaggctaattagtaattttcccccccgaaatttgacatgtaccaaatcgtgccccctgaanntttttggccgttagaaattccccccgaactattgggattgt

SEQ ID NO: 20911 - DNA, 1237 bp, Cannabis sativa
gggataaattagggaaaagaatcctgttaatagtttatatgctaaattaatatgtaatttatgttattttttcttataaaatgtcaaaaaataagaaaataaataataaagctcatgaattgaatttttaaaaacaaatttttttttttttaaaattattttactttttatttttgtataaaaaaccctattttttgatatatttaattttctaatattttattgatataattatcactaaataaaatacaactataaacaaagcaggatttaatatatcgagtataccatagtttaaatttaaatgtagaagtattaatattagaccacatcaatagtattaatgtaacaattgtaccacacttaattatagatagtacttttaataattaatggtgcaaactctaaaattaaactcccacaaaactagagagctaggttgtgcccggatatagatacacataatatatatgttattttcatgatggtgatacatataataaagagtatgtatgtatgtatatataggtatataggttggtataggtggagagaatatatataccgtggagaaaacaaaaaaagcttttttttcggtttcacttggttggttgggtggtagcaggggaatctaagcagtaagcgcagtaaggactaaatcaaatacactgtcactgtgcatatatatgcagaaagagatggatggagagcttgatggtgatagaccatgcatgtattatttatatatatatgacatatatatatatccctatccctattacagtacactatacatatatgtgtgtgaatgtatgtatacatacatgcgtgcggatttcgtttcaagatcattctgtgtgttgtttgttgtattagagtttggtgaataagcgagtgagtgtgagagagaggttacttaggggaatggattgggggtatatagggatctctttgttgttgttgtttttagtctactttttattctttatgagggaatctctgtttgtttgtttctctaacactcagttcatgtcttggcatctttttgacagctttcttcatatcatcacttcttttctcggaattattagaatgtattgtactaagtttattcactatcatcactcttctttctcatatgtaatgtatatttatttatacttgcatatattattcttcttttcctctctctcttttcttattcttcatatatttgaaaattgacacgtatatatat

SEQ ID NO: 20912 - DNA, 1672 bp, Cannabis sativa
  modified_base (219)..(224): a, c, t, g, unknown or other
aattttacggaattcgacctaaaaactcctattgcaactaacggagcaacctaaattacaattaaaattcgtatagcaaccctaatagaaaccacttgagaaattcaaaccgtaaattaaaaaaaaaaaataaaaatagtatatgggataattttcaaaattatattatatattttttttttaaataatgtcactcagtttttttttttttttgaaaannnnnntatatatatattttttaaaatagatttaagtataattttggtatgtggctaatatagtaatgttaatactgagattatgccacttacaaagttaagcttataatacggttatttacccttatattaattgtaatattttcttttttgtgcatgtttccttttatttgagataataaaatattaattaaaagacacggatcattaatttataccttcgataggaaattggacaggcttccttgacaggggatccgatccgagtccgtgcaaatgcagaaatatacttcattgaaagtaaaaacttaagtttgcttatataatacagcatttcccaacacattgaattaatgtcatctaatttctatgactcgctagtccatattcgtatcatgacatgatttgattgccactaaatgattggatttgattaaaacaaaaaaacaaaaggcacttacataaaaagattaaaattttgtaagtgggatggcttttaaagtggaaactgctccacaaatatatgatgcagctcaatcaaaaataaatatgttatgtttattgaatcgagaaccaccacttacataataaatattatgaattggattaagttttgtctggacatgatgattactagtcactagtttccctataagaacatgtggcctggccctgtgtaatatacacaattgaatcaaagactaattaattaatcatgccaaacataacaacgatcaagacttcatcggacggagcctggcaaggcgataaccctctcaactacgccttccctttgctaatacttcaaaccattttggttctcttcataagccgctgcctagctttacttctcaagccattccgccagcccaaagtcattgccgagattttagtatgcataacatcactagctatatcatatttatgtaacattgtactgattatatattaatatgttgtgtgttgcacttaatttttcagggtgggattctgcttggaccgtcggcacttggcagaaaccaagatttcacgaagtgggttttcccttcatggagcactcctattctggaatctgtagccagcataggcctcctcttttttctcttcttggtcggtcttgagcttgacttgtcctccattcgccgtagtggtcgccgagctttcaccatagctctggctggcatatcactccctttcatattcggtatcggagtcacctttctactccgtcgagtcgtcaagggagaggaaaaatccggctaccttcagtgccttgtattcatgggagtcgccctttccataacagctttccctgtcctggcccgcatcttagccgaactcaagcttctcaccacccaagttggagaaatggccatggcggctgcagctttcaacgacgtggctgcatggattctactcgccctcgcagtagccctggcgggagggagtagcag

SEQ ID NO: 20913 - DNA, 1933 bp, Cannabis sativa
tacatgtcaaaattcagggggaaaaattactaattagcctttattaattatagaaaaaacccgttagttattttaggaagtatcttcttttattacttatagtttttccattatgttaaaaatgtattctaaatgattttataatacaaattgaaggattatttgctgacattattttccaacaatagtcaaagtaacacctttgactatcaaaattatggatattacaaatttatagcatggcttagggctccattgtgacaatctacatataccaaaatatataagtgacaatatattcgagctagtttggaaaaccaattgaacaacgataagtagttagcttaacaaaaagaaacacaaggtgtcatcaaataattaattaagtaataacgatccaatctatgcacgcactcagcagccatatctcagtctacatgttctgagaaatgtctttattattaaaagaaaataaattatgctctgtttgattgtcttagtgtggatgagttacgaatgccaaggacgaagcattggtatgacaaagaacttcatacgtccaatattgcaatggaaaccattgctctcaccacaggcaaagtagtagggctgccacttatctagcaccacctcgaatccttctccattaccttgtgttgcattcgccaacttctttccattgcttagatcacacttcacaaagcttctcaagtctgggagctggtacacgctgtgtggatgtgagtccttgcctttcggaggatcgtacttgaaaactgacagtgcatattatatagaatttaaatcaatatcatcttgattattatatattacagagagtgacgttaattatgagatatgttatataattaccaaggatgtcatttaggtagaatgggccatggttgaaagcccaatcggtgtagctaaagttgaagcgccagtgctccgagccacccacgataatcttgttgggaacttgtttagtttggttctgatggtggtgaccataccaactacgatgtctatgaagccaatctgtgtagttaaatccagaaccccaatctctattggccatacacccagccaacatcgatgctaatagaactgccaaaattagacctttttcaaccattgcttagtttgactatatatgaaatttatatattttacaactagagggtaagagagattaagagatattttgttggtgatgaggggaatgagtaaatgggctcttatataggacaatatgagaactagtaagtgctagttggtgaagaggtattaattagtgcaaaaaggccaaacacacttgacccatttttgtctaatttgggttggtaatggacggaaactaaaacatgttgtcaatctgtacttgtgcatactattctacctgcctcctgcatcaaatatttattctttttctaaagtcaatctcatatacacattttttttccatcatgcctaataatatattgtcatcaaagatgagtcaacttttattcctttttaatcatgaatttatttgactgcttattatgaaatttgctaagaaccaaacaatgagatatctttatatgaattaaaaatgggtttggctgtataaaatgttggacacttccaaatactttcgtcgtggaaattaaataggaaaaataactgtgtgtgtgtgatatatgcgatgcgcctacaccgatttcttggttgagtagatgtggaaaatgttttgtattacgaatgccttacgtactaaacaaaaagtatatatgctgccaaatataatgagattaaaaggggttccttatttcgttagtcaatttcaatgtattcattatattaatagactaggcatatcaaaaagattcatttataagttggagggggttagagtttcgatccggcgaatcacctttgatccgaaacgttc

SEQ ID NO: 20914 - DNA, 2003 bp, Cannabis sativa
atttttttatgtcttaattctcataattaattttttgggcatatcatatatttgtaattaggtcaaagatgctatgacagagtgtgaccccaattgattcaaaactatagggcattgcaaaatctgtgtttgggtcaagaaaaacataacaatttcaaggtaagttatccaataatctcatttggattacagagaatggaaattaaatttaccttatttgtattttacaatttagaatatgaaatggaaaatttacctacaaactttttttcagttatttttatttttccattttataaaaattattttaaattgtaaaatatataaggtaaatttaatttttattattcaaaattaaatattaaccattattttccctttaaaatatttgattttttatttactatggtatattcatacaacattttcatacatatctaaaaacaattaattgcttccttaactgtgttaaaaaaatatcgaaattcaatttatttaccatttggttctcctttaagatgttcttttgttctataggtaacaaaattcaaatgagaaaaaaaaaatctttaacaaaaataaagtaaaagttaaacttcaaaagataaatttcgatagacaatactttttttcttatttaaattatgtttataaaaattgtattgaacatttatagctagatagattttgtaaatattttttttctatcataaaaagaaagtgtaattttctttccaaaaaaaatttaaaataataagattttttttttctcatttgaattttgttacttataaaataaaagaaatatttttgaagaaaccaaaatggtaaatatttattgaatgattttttttttatacagttacggaaataactgattttatagtatttaattttctcttttttgtctgaaaataagaatgaaaaaaaaaatccttaaaaaaaataaaaaaaaaatggaagagttgtataacgtatctcgtcaaattgattaatatttaatgaatttagtcaaggattagtattgcagtaggttaaaaagaaaagattaaagaaaaacaattttttttacactctcacttagtgttgtaaatatgggcgggagattttgactcgacacgaagtgagcccgagaggcacgggcaagcacgacccgctacaaaaatatacgtgcttagtcacaatacaaaaaaaaatatgaatttagacacgacatgacacaacacgacacataagcacttagctcaaaacataacacattaaaaaatataataatttgataagagcattactattggacaccagtggtgcccaacactttctataggtggcgttccaatattgattaatgatattacttaaaagctatttttttaagttatatgagactcaatacttaattatacgtatgacaccgaaaatgatactagacaccaatagtgacttttaacaattctcatttgataataataataatgagaaatatttacttatcaattaaaatgatagtattatttaaattataataattataattattttttatatgattatatgtaattattgaaaaaaaatatataaaagttattaaaactataaaatacatatatattttaatatctaattcaccgatttgtaataaaaatgtaaaagtatggagcacaaatttgaattatataagaaaataaattggtctatttaataaaaacgtatcgatataaataaaacacgacacgaatctgaggacgtcacaaaattactggacatgcgacgggcctatcctataaaattgttgcacaacatgatataactcataatttttttatggcctgacacgacacgactcatattttaaaaactcaaaaaaatataggtcgaatttgtatcacaataaatattatactttatatttaccatcatgtcatttttaattttattattaaattttaggtggcatttggtaacacttttttattcaattttctgtttttaaaagtagaaaa

SEQ ID NO: 20915 - DNA, 3827 bp, Cannabis sativa
  modified_base (2687)..(2703): a, c, t, g, unknown or other
  modified_base (2783)..(2784): a, c, t, g, unknown or other
ttttaacataatgtattttgtatagtatatttatgctataatcaaatttcaaccatctttgacataatattatgctgctcacttcttcacttgtattctaaacttagtgagaagacaaactaaaaacatcattaattattttttttaataaattaaataaaagcgtgttatttcaacaaggttgagaaaaaataaaaataaaagtaaattttgttgtatataaaaatgggtttttttttttttatttctattttccctaatttaggctgagagattccatatagcttgaaatgaaggcaacctagctggattgaccccacaatttctattgatcaagttgcatagactacatatgatataataagcaaattttagcttattatcccactttgaagattgaatctctctttcaattatttcacttaaaacaattatttaattaaacacttgtctttttttttcaagtgtaaatgaaatttctgcagagaacaaattggatgtttttccaagttttagacagcatgtttttctatttctacagtacaaaatggtgattgaattgattgatctcattacaaattgtcacattaaaaagagttccaccaattcaaaaagtgactaagcaaataagaataattgtaaagaacaaagcaaaaagaaacatgaaaacaagttcattaatttgactctaaaaaattacaattaaaaagggaaaagaggggtcaagtatgtaactttctgtggaaactgatggcagttttggtacaattattaggagaagaatgatgagaaagaacagggagaccccattgagaagtaaaaataatattggggtacacaccatcaagactcattctactaacaatttcattgaatattctaacaatcttgctagtaaaaacaaccatagaaaacactttcaaagtaatcttcctagaccgagatagcctaatacccttgaccctttttcttcttccaaacttggacttagtattatttcccactttttcatcaaggctgattctactgctgttgttgcttagcttctcatatcgatcacatctatggcgtccaccaataatttcttgaaaacccatttgtagcattgattaaagagtagaaagaaacaatacaaaaatggggtctaatgtgtttgatctctggttttgaaatttataggttcaaactaaaggagaaaagattgtaatggcagttttggattccattaacacatggttaccattttatatataaaaactccaaccaaacagagaagagagagagatgagttgagcttggaattgaaacaaaaatattatagtttcaaaaaatttaaacacatggggagcatttagatttgtgtaaccaccacagagtgaaaatgtttatgttagctaggcttattaaaagggaaaagaaagaagagtgtgattaggaaaatggtgaaaaggaatataggatggcatgtgcaatgattgaaaaggtttcatattattatgagaagaaaaatcaaagccaatcatttgggaaagagaggaatgtatgtggttggttgtgaaatgtgatgactattaatgaaaaaagaagagatttgattgaaaagtggtgagtccaagtcaagagtatgaatgaaatgttggtgtaattttttgtcttgtattgaataaaacaggaggtttagcatttgtttaagttgaggttcggattttgtggtaagttttatcttaattaataatgttaagctagaaaaagacaaatatgacagtgggagagagtagttgagttgagtgggcgtcatatgtatgtgtccatgttcattgtgctcagtaggcccagagtttagcagcccattttgatgctctcgctcttcaagtccactccataggcctgttggataaagcccatcacacaaaaaggctaacgaactgcttaaatagttgggcttttatgtttgcataaataaacccacttaatttcaaacctttaccaataagtttacacaaaatacacacgagaagatgatttaagttgcttaataaaaaaactctaatgatactaaaaccttgtcactttcatacctatatgaaaacactccaatagtttagtgtcaaaaataggcttgaatatttttgaacatgctgtattgagaatttttaaaacatgtatagggatgatgtaactaactacaacgctcacctaaataaattttcttttttgaaaataattataaatatttcgatgtgtaaaatttgagaagtagacattattgagccatagcaataactttatagtatagacctcacatagcctatacatccaaaattttcatattatgctttactcagatcatctcatttttcttacaaagattagtctgtttccttatacggactccaatccgtactccatatttttacgtttttattacaattaataaggtaccaactatgtatttttataatttcaattacttttatatgatttttcaataatattagttacacacaattatatataaatatataattagtttattttatataattgataaataaatatgtattattatttttttttaaattatcgagtatattagaatttttcccctcgaatttggacatgtaccaaatcatgctccttaaactttttttatcgttaaaaatccctctgaactattgagattgttnnnnnnnnnnnnnnnnntctaattttattcaattttattgttttagtaattgtttatgtactaaactatactccctagactttgatatctaccaaannatgcccctcgaactttgatatatactaaatcttgctccatgaactttcattaatattagaatatttttactaaaactggacaagagttcttaaattcaacaatctcaatagttcaggaggtatctttgacgatcttaaaagttcatagggcatgatttggtacaagttaaagtttgaggaaaaaaaatcctaattagccaaaaattatcgttcttaagctagtctatttatgattatatatcgtgcttttgggtttttcgtatcgtgtgtgcttataagcctatatttttcaagttgtacattatgctttcatatattttatatatataggtaatattgatttattctatattataattcttgatttcttattaatagaatacacatatgaaaagataattgattatgcaaacttgtttttatcatattataagaccatcttcaacatgatgtaaaaattgagttatattttgtataaaaagtaattttatgatatttttacattaacttttattattgtgctccaatgtataattataaatgttaatataaaatttaatatgttatttaagaaaatataaaataataataataatacaaagttaaataaaatttaataataaaacaataataatgtaagttatttaatgcaaatgaatatgttaactaaaatttaataataaaatagacaaagttgtaaaaataaaagcataatatttattgtgatgtaaattttgcatcatactatattgtgatgtaaattttgatcattttttgttatgtgagatatttacatcacaatttagcacactatcaaaatagatttttaacaaaatgaattatattttacatttatattacttatttgcatctctattagaaatactctaaaaattccgtacataccatgaaaatcaaatagtcaaaaaatgatgcctcttatacctattattacctagtagaatttacgtggtatatggcttttttaaaccttttatgataaatatggcatatttaactatggacccctttatatggctttt

SEQ ID NO: 20916 - DNA, 1280 bp, Cannabis sativa
gtatgtgatatgtatatcgtgaaggatataaagaacaaaaaattattaaatattaatttaagtatgagatatagttatatttgactgagtatattgattttaggtttattggtatttcatgaagtaaataatagaatatttttcaaggaattcttttcacaaggtgtatgaggtggaaattgttgttacatcaatccctaaaaaaccagataatattttaatgactatgatgacatggcacaactcaagacaagattagacactgatcaagtagctagttaattcagttattttagtttcttttatgttggcttttgtaacagttgcctactctataaaatgtcttactcattttgtaatgtaacagagaaaaataaattgagagagtactgagtgaacttgtgtacggtgaggttaaaatgaagacttgaaggaagaaagttaggaatgaagagggaagcatagatcattgagaagccaaagggaagcagaaggtcttcaagggtgtttcctaagtattcatgatcatttagatattgctcaaggtataggttgaacattattgtaaaaattcaagtatcttgatctatactttgtaacacattcatcatgtaacatcccaactttaaccacaaaacaatactcagaaaactatggattttttttaacatgacttgcggatagtgcctttaataaaaacatttatagttgtgtgtgcacatactatttaagtattattatcatcaaaaattaaatttaaatatttatttcaattgtaagttaaatttaagtatttatgtcgtaaattatttttttttatgtaaattttattatatttcttatatcatgcattgcattggagatgatcaaaataggttgagaaacatcaagaaatcaacactgaatttctcaaacctctaaattctaagaaaaatatatcttttacctctaatgatatttggtagttagagtaaaactttatattttgaattttgaattttgttttttttttattatttaataattataaatgctcttaaatattaaatacacgtttaagcgtatgcaacctccggtcctcatagttaattaattttacttctattaattttagagtgactaagtaggacttaggtggtgtttggttagaggtaatgaaatagaattgaatgaaaaataaatgatttttattcctttcttttatttgattgcattttaaagtattatattctaatagaatgttttttttcattattttggtgaaatgactattctatttt

SEQ ID NO: 20917 - DNA, 6539 bp, Cannabis sativa
catgcatgatcttattcatgatttagcaatgtttgtttctggtgagttttgtttaatgatgagtaatataagtaattgttctcacaaggttcgtcatttttcgtacatacaacaatgggcaaaagccgatgaccctaaggaatttgaggagttatttaaagctaagtgcttgcgcaccatattgtgggaacatgaatctacggaagattttctgaagttgtttaagattgagcacttgaacaagtcattcccaagcttgagagtactatccatatatgatgattgttatatcacaaagattccagattcaattggcaatttgaagtatttaagatatttgaagttacattgttgcagaattgaagagataactaatacaatatgtaagttgtataatttggagacactattgttggaggaatgtaaatatgttattagactaccaattgatataggaaatttaatcaagttgcgacatcttagtgttcctaagaattcattacaagagatgccattgcagttgggaaagctgcaaaacctgcaaacacttaatgcatttgttgtgggaagaagtagagattgtggtggcattaagttgttgaaagagtttcaagatctacacgggagtctttctattagacgactagaaaatgtgagtagccttgaggaagtttcagatgcatcattaaaaagtatgaagtttcttagtcagctatctttggtatggtattatcactatgaacctgaatttgatgagttgtataaagaaagagagctactcagtgccctccagcctcatccaaacctgaaggaacttagcattgaaaactacaaaggcaactgtttcccaaattggattggagatcattgctgcttgtctaatttagtaagccttaagattgcaaagtgttctaattgcagcttcttgccgtcgttgggacagctgccttctctcaaagatctttggattagtgaattgaagggtgtggtgagaatagattcagagttttatcgttccactagtcttgatgcttcttcttcttctgttgcaatacaaacaaagtcattctttagatctatagagaccttgagatttgatactttgcctaatctcgaagagtggtcattcattgaaggtggagtttttcctcgtcttaagaatcttcattttgtggaatgcaagaaaaaactactcaaagtgacattgttaggagattattttccttcattgacaaatttttcagtatgtgacagtgatgaggaagtaataccattaatactcccaagagctcaactcatgcaggcccctttgatcactttaaaggagattgcattcaagttttgttacaatttgacgcacttagaagaagcggcctttcagcacctcacctcccttgagaagttggtaattgtatgttgttctaacctccaatgcttgccaaaagaactacccacttctctttctgatcttcatatcacttattgtaaattgctaaaaccaagagttcagagggagacaggggaggactggccaattattgctcacatcccaaatatcattgttgaccaagagaaaatataggtattacttttttctcttctcttgtaacttgtaaggcctacttgtttaaaattttactcttctttttaatttatatatatacattatttgtgatgtgtaattttatgtgtttatagcagatttttattttgtgatgttttgctctacatttacttacttacttatgttttgctagaatttttttaagtttgtgagatgattaattaacatgtttaacacattcaattcatgatgtgtaattttatgtgtttatagcagatttttattttgtgatattatagctgttgcgtttgatgtataaatatttaagaagcttttcttttcttatgttaactacttttctttcatttttaagtttctgattctcatcattgacagttgtgatcataataacaaatttcctctagcatcaaaaattttctgagctgaaaacagaagatgagtggattagggtcctagagaaggcactgccctcttcatgcttatttgattgaaagtgaatgaacatattaatagctagtttgcatttcaaatcggcttctgtcttaacctttagaagtcttctcagatgcagattgggctacgaaactcggatgacaaaaaagatcaactattgacatttctgtatgtttcttggtggaaatctgactaattggagctcgagaatgcaagaagtcagttaccaattgtgttatttctgtaacttcacttggtcaagctgtgtgtgtaaaagagtctcaaacctctcttaatatgcttactggtcattcttgtaatgttatcaagaccaagaaaagtttgctttgtcattagatcactcaggagtgatctaataaccatttactatgcattagacatagttattaagagtgaatattcgtcgggttatagtttttaaacttcccaatggtaatatcagcctgcaaatatctaactataacccgcctaataattttgacggtttgatcatatttacctgcccacaccaatcttcaattttttttattattattgttagtttttagttttcaaacaattagatataaaagaatacaagaatgatatgtttcaaatagaagaaaatattaatatagtctaaattctaaaatttaactttaatatccaaatacaattaaaacgaacaatgataatgtttaaattattctcaggttgcgtttttttgttgacttgggttgggtttgactgtttgtaaaatttgttctacaacactaatagttattctacgagtcttttttcttaaggaagaaatattgtatgcatgaattcttttaaatatagaatacagttcgtcattctttctccatcaattactctattgcataatacttgtcaggcactcatgagactcgtctcatcaactcctttaacttcttttgataagaccataaaacctgagattgaagagacgcttgagaaattgaagcttcttctagacaataaaaatcttggtttggaatgtgtgaaaaatcataagcttccagagttttagtggattgaagggtgtggtgagaatagattcagagttttattgttctttttcttctgttgcaataccaacaaagcacttattcagactttgacatttgagcatttggatgagcgggaagagtggtcatttatggaaggtgaagtttttcctcgacttaagactcttcattttgagtattgtcataaactcaaagtgacattgttaggagattattctccatcattgacagagcttaaaataagaaattgtgaggaactaataccagtattactcccaagacctcaaccccctttgatcactttaaagaagattgaatttgtgaattgtcccaacttgacgcacttagacgaggaggcctttcagcacctcacctcccttgaggagttggaaaattattcttttgaaaacctccaatgcttgccaagagaactacccacttctctttctaatcttcacatttgggattgtccattgctaagaccacgagtttaaagactgagaatccaggtatgatagtttgactcctcttcttcttcttttatattttctattttatattttgcaaatttctgctgtaaattattatctagttatatattttggtagaatatttaatggttgtgagatgatattaatatgtttgtttgacacaatcaatttatattttaaaattaagatttcattcagagtttcatcctttatattcaacaataacttcaatcactttggttgcttcagatacttttttggaattggaaattcagattgattaattggttgcagtactaaataaatagaagaacaatcatatatggaattaaggtacaaatcgattcgcagcttctgtttgtgactgtgttctcttctcttatcagcttagctacttttctttcctttaaaatttctaattctgagtcattggcaatggcagtgttgtgattgtaataatgaaagtccttaacataggcagggtgatcttgtagcttcaacaatttcctgagctgatgaaaacagaatatgagtggagccctcaccatgcttatttcatctcaaggttaatctctactctatttcttatgttaaggccttccattattccaagtgaatcaacgtatatagtctgtcagacatgtaaatacaacctattacgctcttcttcttgcagcctcaaaccataaacgagtaccggtttgcatttcaaatttattggcttctgagttaaccttggaagtgttccgagatgcagattgggctacataaaaacttggatgagaaagattcaatcagccaatggtatttgtattctgtatgtttcttggtggaaatctgattagttggagttcaagaatgcaagaaggcagttaccaaataaacacacttataactaattctgttattaagctgtgtgtaaaagggtgtcaggtctcttaattttcttactgttacttactggtcactaacaaagttttgagtgattactgttactttgtagaagaggtttagaccatgactacctcagtttctccttaattaaatcttggtgtccattttcactacttgttacttttgaagattttgtctctacaaatacaaatacaattgctttgattagttttgctttcttggttatatccattattggaaaaacttaggtggtgtttagttagaggtaatgaaatggaaaagaaataatttttattccattcctgtgttaggttgcattttaaagtgttgaaatgtcattctaatggaatgacttttccatcattttggtagaatggctattccattttgaaatggacagagaatgaccattttaatgcaatattggaaaaaatttaataaattttttaacaatttttttaagcattttaaatttgattcaattccattactatctctattcccatttccattacaattcctaaattttcattcatttcaaccaaacgctaccttaattttaacagcttaattgtaacctgtaagttgtaataataacaacttacactaactacactagacaacacaatagataaaacaaaacgagccaagttggtgccttcattttttataaatgaattctccttctgtcccactttaataaatttaaaatgaatcatgcctaactgattcaattggcaaccacttccaaatccaatgaaattaacttaggagcatttctatttggctgaccaactcattatgtcatattaagtagtatttaatacataattattgctccatcattcagattatatatcatttgtataaggtggtaggtttaccttataatttattatgaccttggcttcataggaggacttcttcaaagaaaatgaggtcattctttataatggttgttcaatgtattccatgctcacacatttcatagtggaagaaaaacaaggcccttcactcagtacacactttgctaccttaacattttgattcatccatctttccattaatcttttgatcattatggctgctgaattggttgttggagcacttgtgtctggttttctagatccagtggttgagaagttaacttccgtggtggttgacttgttcagaggaaaagataaagccattcttaagcttgtggaggagttgaaagccaaggtgtccaccgctgatctactgctcattgaggctgaggagaagctgatcacagaccacaaggtgaggcagtggcttgatgatctcaaggacaacatttataacgcagacgacttggtttacatgatcgagactgaagcagtgcgaaaagaactaagaaataaggtactcagatacatcccagctccttattctacttttaataattcaataaaacttgagttagaagagacacttgggaaattgaatctctgtttagaaggaaaagaacatggtttagaacgtttgaagaggatgaagcttcctgaaagagaatgggcgcctttgttggaagatgatgatgtttatggaagggatgttaacaaagaagagattcttgagttgctactacaggatgacatggctagtagtagtagtggtggtgatactttttctgttattcccattgtggggatgggtggtgttggaaagactactcttgctcaatttgtctacaaagatgagagagtcaaacaaagatttggtactcgaaagtggattacagtgggagatggtccacttgacttgtggaatgtgatgaggtcaattgtggagaaagactcttctaaaaaatgcaaaattaaggaatcgcatgaccttcaaggccgagtaaagaggactctaagtggaaagaaatttgtaattgttcttgatgatgtttgggatgaagattgtactaaatggaatgtcttgagaagttgtttcaaatctggattgcaaggaagcaagattattctcacaacacgtagcacaaaagttgcatcaattgtgaaaaccgagtcaatt

SEQ ID NO: 20918 - DNA, 9780 bp, Cannabis sativa
  modified_base (3009)..(3012): a, c, t, g, unknown or other
  modified_base (9424)..(9429): a, c, t, g, unknown or other
aatcttaaaacaagttctcaatatcagtttattttacagtatttcgggaaacttgaacctcgaataatttataagatcaaatcacatgtctgactatttgagttattatttgctcgttaataatagaaatcgatgaatcttaaaacaagtttttaatatcatttaaattttaatatttgggaaacttgaacttcgaataagttataggagcatatcacatgtctgatcatttgagctattctttgtttgttaataatagaaatcgatgaatcttaaaacaagttgttaatataaaatgtttatggctttatgtgcaggtcaaagtagaagaagacatttacttaggaccacacggggcgcccccatctctatcgaaacaacaacaacaagaacctatttcctcaagccgaaagcaacgatttaagcaaaaactaaaggaagcagataggagagttggcggaacaggacgagaaaacaagctagaaaatcttcgagagcttgtcggtagtggtggcaaagttagcagtgtcaacatgggtaaaaacacttcacgagattggctcgatccacattgccatgaatcgcagtttgagaagcggcatcagcactaggcagagcatcttccattataatcttcaagtggttttttttcacattttggaaaatacaattttattattaaaggttgtgtatattgtcaataaatctctacatgaaccttgttgtgatgaagttattataaaagaatttacctgagttgattcatattccatttctcataataaataattatatgcaaattttgtatgggttctaagtatatgtaactaaactattaaaatatgcatttttttaatttttttctacattcaaagattaattttaacatagaataattacataatatattattttttataatttttttacatttttaattttatttttacataaaattaaaggatagttacataatgttcttcacactaaaaatcttgtgtcttagcatttttagctcacaataaatacacatttttatattattaataataaacttttaatacatattttttaagtataattttaccattagttattcaataaatatttgatttattaataatcatcaataatattttacattttatcataatttacaccataaaatgttattctatatattagagtacaatattaatattttgaaattgcaatgaaaataatgatattttgttcttcacactttattttttttctaacctttttcttttcattaaaatctaatcttatatccaaagataggctaaaggtgaatgagaaatgaagaaacaaacacactgaaaattcaataagtgaagttgtttgattttgatgaaacaatacaaaagcaaaagctaaagccatgaatgaaaggtaaatttaaaatatgaggcattgacatgaatacataagtttctaaaactggttcagttaagcgcgtttgccactgctggggttggatttggtgcagaggacctttcgtcctttggcgcgtctacgcttcaacaccgcccttccactggtagtcctcattcgcctgcgaaaaccatgtgttcgagctaatgatttccgagatctgcttcttttagttagacaaagagcagccttccctgccctcactactaacccaccatgttttcctcttctcaacccaatgttagaccttaactccacaccaaatgataaacctgaaatttgacactaactcatcatggaatggaaccaactaaaacttaactaaaacaccaaagatttggtcatatacatatgctaagacaacatacaacacaagactctttcaaaacaaactacaaacatcaaaaattctatttggaatattgctaattacaattttaccccttaatgtcttctgaactatcgagattgataaatttaagaactttgatgctttccaaactttgatatttatcaaatgatacctctggaacttttgacatgtactaaatcacatcctctaatctcaatagtttaagtggtatgattttgtacgtgtcaaagttcgggattcagaaaaccatgtgtgagagaactcattgtttgaaaatatgcacacaaaaagggaagggcatcacctaacttgtttcgatagaattctatagggtcatcaacatgccacaatctcaaaaaccatttatacaaacaaaacaccattgtagtaagtaaaaatagtattctacaccaacataagacattgttgttagaactagtcaaaaccatcgtttgactaaaaataaaattgacttgggaaaatcaacaaacaagaggaacgcaaagatagagttgggcaattatgagaattaaacttcaaaagtgatacctgaaacagcagaagaagaagaagaagaaaatcccaactgagaagaagaagaggggaggaaagagcagtggaggaggcgagagcccaaagaaggatttttggtcacattcatggacagagaggtgctggttcttgaaccagtgagtaaagtgagagaagcagagggcttctgtacacgtgtgtctctggtggagagccatggtgagcaggatgccactgatatcgacgccattactgtcttcttcaagagctctgttgttatcttcaaacaaactcaactcagaagagatgaggctgttccccttatcaactcttcgtagcctttacttgcaaatgtgggccaacgagcccattgggtcttctgtcaaggcccattgtaacccaaaataattttgagtaaaaatttacaattttactgttatatggaattttttacaaaaatattgtctttttattaaacaattgtaaaacagaacaattaaaataatagttgaacaactaaaaaataactgtagaacaacagtaataacgtaacacagtacacagtataaaacttacacaataattttgaaaaaaaaaatacagtatttttgaaaaaaattctgcccatagtaaaaaagtaaaaaaattannnnttttagtatgtggtgtaaaaactctaataatatttatacaaatattaattattttatatttattaaaaaatatattaataatgttgtaatattgagaaaattagactttatacctatttttcattttttattataatttttaacttttgtttattactctttaatttatacacagtataaggcatattcttattattttgataagttatatgatattatatttattactttaattataaaagagagtatttattaattaaaattattttgaagttatatttgattaatgtataataaaaaatgatagttctcaacttatccatgtaatatatgatgctatgagtatattttagttgaaagaaattgaagaatatttttttatacattaaataaatttacctctaaataaaatttaattgaaatatacctcattttatgagtattgtacctaaattaccctcacatcctcacataaccaagacataatttcaaacataataaattgtattctttagtgatggatgtgtgggtttgtaagcaacttggagtaaaattttagttagaaaaaaatggagactgtcgtaaaatgataggataaaattggtaaaatgattgaaaaagaggtaaatatattacattttgaaagaatatattgtattagaagtattgtttagcatttataaatagtattttattattgagaaatgctaaaaggtactaatgctttcttagtactatctaacgtgtaatattactattagtgtgattaagtatttaatctcatataatttaatgcaataactttaaaaagagtatcaccttttgcctaataagaattttctttatcattatatattaatagaccttttaagtgttgattcatattccttttctcataatggataattatatgcaaattctattaagaaaaatgaggggggttctaatgctatgtaacttaaatgtggaatagtttgcatatgaaaatgactatcctatatcaaaaatatgtttatataaaaaaatttctaattcaaactcaatttttttatttttttattttttttgagtttatagaacaactccaacccaatcatacatagcccatacaaggtaaaaatgtaaaaagaaaatttaattagataacaaaattaagcacagaaatttaagttttcctaatagtaatcatttatgggtctatagtagggctgatttggtcaatttttttttctatataaaaatccttttcggtctagattggtgcaattcaaaaactgaccgatcaattcagaacctatcttaaaaccgactgttttgaacatcggtttagtcggtttaaaccgcccaaaccgaacttcttttttttctttgaaatatgatcaaatttattctataagtacattattctacattctacaactacaaccatacaaattatttattcaaaaactaattattttatttttttaactttaatattaataaaataataatattatatattattagtaactacaatacatagataaaaaaaacttaataaattaatatatatgtataaaaaaaacttaataaattaatatacatgtataacggtcggttttggttccggtgttcggcatatcagtttgaatgatttttttttttctttttcagttttttgaatttcatgctcaacctagagcttaggcctccaattacatattaaaaaataacattcaatttaattataattaaatatataatatttattgttcaattgtaactagattatatatattgattatacaccccgagttttaacatccataaaataattgtgtgtaacattatttgatggtcaaacatctaaattgtaggaccttgcatagataattatggttttgctcgatagaattgttttaaattttcatatcctaaaaattaagcaaatatacagcaattgaataaagattttttttagttaaaacattctatatttctattgatattaattattagttaagtccattcaaaatatataaaactaaattaattgttgcatatatatataattagtttaataatacatatttgatatttttgaaaagtgtagattgagattataatatgactaatcgtaattttttttgaattagtaaaacacatgcaactctaaaataaaaatcaattatatatattcaataaccataacaattcataggttgagctctaaatagagaaaaacacaaaatgcctaacattaaaaaaaatctctaaaataaaactaagaaaactttttaaaaaagaaataagaaaaaaaaactaaactaaacaagctcaactgatagagatatctcatcagtgatttttgcaaaagtctttgcttcgcgcaaaccatagtggtcgtgaatcccaatgacactggttgcccacgtcgagaattgtagcgcaacatgtagagttgattgaactatttgtccaaatatgtgcctttatatcaccaatacaaggtgttaagcgatgtagttcatgtacacaattttgcttgagaccatcaacaataggagatgtagcgttcaacggtgttgacttttgcttcggagccattgaagaaactggtggtgtcgatttaatagtatttacaatagtgcaatatttttggcttttgagaaaccaaataggcattggatcacccgaacatttatcggcgatgctgagaatagattcgcaacatgtagagttaataggttgctttcgaatgaaaaaagagaatatgttagcagagcacggttgtaattgttgtaattcttcgcaactcgtgtgagttttgttgacactgctaagaggttgtgcattacaaaaactcaaagccaccataagagaaaagagaaaaatcaaaaacctagccatgttaaaaaatctctatactcacttttttttcctcttattatgaatgagaatttcgatgaaaacttgtgtggtattagttatgtttatatagagttaattatcatacggattatttagaataaacaagttttatattttcttaattaaaaataatactaaattaagtgataaatataacgaactaaacggttgatattttaacatatatgtatcataacaacaatttattatcgataattgcgggatgatttaattaaaaaaaaatctaagaaatttaaatttgagttttatatatgatatataacatgattttttttaaatatttatttaaatttaaatttaaatttcaaataacaatttggatttgatttatatactatttaaattattattctctttaattaattaaagtttaaataacattcaaatagcatgataatgtttaaccttttaaatatcagttttataataattgataagaagatcattttttttatatattggtatgtatcgtaaaataatttgttaattttttttgaccttgcatagataatgatttttctcgatagaattgtttttaattttcaaatttttaaaatcattttcatatcctaataaattaagcaaatatatatttttttttaatggcatatagatcgaataaagattttttagttaaaactttttgtatatttgatatcgatattattagtaagtccattaaaaataaataaattattagttactatatatatatattttaaagtttttaagaaaattatcatatacatatttgatacttttgaaaagtatcgtttgaaattattagaagactatacattagtaaaacacaatatgcaactctaagattaaaaattatattcatatattatctaaaacaattgagctccaaataataatatatatggtatataattttattttaatttattgaaaaagagttaaatcaataatatatatataatttgatttcaaaattttataaattaaaattattatttttaagttaatttgtattaatgatttttttttcttctttattatattattttttatttaaatcaccattaagaattagtaaaacacatgcaatctaaaataaaaatcaatcaatcaattatattcaataattaaaaaaatttataggttgagctccaactagagaaaaacacaaaatacctaacattaaaaaaataactaaaataaaactaagaaaactttaaagaaaaaactaagaacaaaactaaactagacaagctcaaattgatagagatgcctcatccctagtgatttttgcagttgtctttgcttcgtgcaaaccattttggccatgaatcccaatgacactggttgcccacgtcgaggattgtggcacaacatgtagaattgatcgaactatttgtcctcatgtatgcctttatatcaccgatacaaggtgttaaacgatgtagttcatatacacaattttgcttcaaaccaccgacaacgggagatgtagcgttcaacaatgatgatttttgctccggagtcagtgaaggtactggtggtgctgatttaatggcatttgtaatagcgcagtatctttgacttttgagaaaccaaataggcattagatcacccgaacatttattggcgatgctgagaatagattcgcaacatgtagagttgataggttgctttcgaatgaaaaaagagaatatgttagcagagcatggttgtaattgttgtaattcttcgcaactcgtgtaagttttgttgatactgctaagatgttgtgcattacagaaactcaaagccaccataaaagagaatgagaaagatcgaaaacctcgccatgttaataaaacctcttaactcactcactcactcttttttttcttcgatgaaaactcttatggtgttaggtatgtttatatagagtattgtaaagtattttttttaaataatatagttaaataagtgtaaatttaccgaagtaattggtagatatttttaacatgtatcaatgtatcataaaataatttattatagtatagcatgtataataataattaattacgtgatgatctaacatatataattaattaattaattattcaaaaatctgatttgaaaaaaaaataaaaatctaagaaatttaaatttaagttttatgatatattattcaaatttaaattcgagatatcatataacataattgatttatttattatttaaattattattctttttaattaattaaagtttagatattgaaatagcatgatatatatactagtaaacttgagtttgattattttaaatctcagttttataatacctttcaattttatttgatcaatcttaaaatctaaatatcatattttattaaattagttagaatccttaaaacgtgataaaaatcaaatacaatgtatctatgtttaaatatctttattattaattaattattattttaacaatattaaaactaatcctaatcataatagtcaacacgatttttatctagatatatatatatataccataataatacgacctttactaaacaataatcattccctaataagagttattgtttagaattagagcacataattaacattaacaacatgaaatttattttgagtattatttttatgttgtcacttatggtgacattaaatttttgtatggcgcgacgtttaaattgcaaaaatttatctgaatttaaaccatgttggaaaattgactctatcaactcgacttgttgtggtcatgttcttgacgttattggatgcagatatcattgttctactcaaaatatttcttcgccaactatttcaccaccaccgtcgcaaaataccacgacaccaacacattcactaccaccgtcgcaaaatatcactccaccgtcactttcactatcgccgaagcgaatttcgttatcatttactttgcatatcctattattattggtggtttcaagttagaacatttatatatatggtatttttttttacttgaataggtttatttttctaatatttcgatagatgtttcaattaaatgttttttttttaattctatatattaagagaagaagtggaaatatgtagaagctacaattcgaaaagaaaaaataaatattgtggaagtttgtgtaatagaaaaaaagttttttattattaaattttataaattaaatatttattcagattacgttttttgttttcaataatttgatattttgtttggtttcatattttttttttaatgtttttaatcttataaaatatattttaaaatgtgccaagttcgaattctgaaaaaaaaaatatatatttcaaaattttaaattatatatgttttattgtatatctatatacacactacaaaatataattacttttagtcacaacaaaatttgtgactaaagtaaaaaaattgtgaataattataaattattatttttatgtgactaaaaagttcgtgacaaaaagtattagtcacaaaaatnnnnnnttgttgtgactaaatgtatttttggtcacaatacttgttgtaattgaaaaaataaaattgaaacttcaagcctacattcgattatgttctaattagattttgaaaaaagtaaaactataaaagttctagatctctcttttatcttttcggaacatctttaatcgtctaatttcgagtaatatcgagagagttatgaccaaaataaaaactcactgtccaaataaagggggatcatgtctaggcatggaaatctcatgtcgtggcccgccccttctaatcctaagcactataggttttttttttcagcattttttttatctttttttttttttttatcattttttggctata

SEQ ID NO: 20919 - DNA, 7071 bp, Cannabis sativa
  modified_base (1140)..(1150): a, c, t, g, unknown or other
caaaagtaatgaaattgggcttgggcagtacaaaagttgtttttgccgtgtcccagtaaaaatgtaaagtttgtgtcaaaaagcagtatttttataaaattccctagattaaacataaggtccaaatatatagacacccaataaataatgatattgcaaataacttttaaattattacaaatagacacattcatgcacaaagagaattaacagagattaatagcaaacaaagagaagatcaagatgaacaaacatattatagaggttcacccaaattttttggggtacgccttctgtcgagctcgccacaatggattgctcaatcaatcttattactcaagccaagattacaacatagtccatcgattccagccacatctcaaaaaataattgatattatctttgtttctctcaaagatctctcttcctctcaactctatgtaacttgttttctctcaaaacttcatcttcttctctctcacacacacaatctgtgtatttctcttctctgcgagttgagccaacttcaaatcattttgatctagagtttttggagcttcttaattactgttgtggtctaaagattaaaggtaacgacttctaactatttttgtttgagctagaagttaattagattagttgttggtagttgattgactgttaataaagagtttgttaaaaatgtttggacaggttggcacagggtggattcatgaacagtaaagttaactagttcttttttcacatgaaaaaataaacatgatttggatgcttgtatctattcaaacattgatagggtattggaaactcacaatgggtgaatcatttcccaaatgctgaagttgttttaatttcaaaagaaaattttgatcattgtctttctataatgtttgtctatccatatgttcagttagaaaagaagtcatttcagtatttttgtatgtagcaatagattcctaattttctaaagagactgaaggaagcttgggagattaaagaagctggaacgccaatgtatcatctggtgcagaaattgaaaagaataaaaaagttagactaattaggaatttttcctcccaaactttgacatgtactaaattatgctccctgaacttttaaggtcgttaaaaattctccctnnnnnnnnnnnattgttagatttaaggatttttgtgtaattttagtaaaaaaattttaacatgaatgaaagttcaggggcataatttagtaatatcaaagtttgaggtggcatgatttggtagatatcaaaatttgagagtatgatttagtacagaaacaatcactgaaatagtaaaattgaataaaattatataaaaatctttaaatctaacaatctcaatagttcaagaaaaaaatttaacggcaaaaaaagttcaggaaacatgatttggtacatgttaaaattctggagaaaaaaaaaatactaattagtcaagaaattatgtagaaagtttaagtaagagattggagatattcaagttatagatgctatgccataccaggagctaatggactgccaattcgagtagcaaaataaaccacttgatcatgcactcatttaaatatttttagtaagaaaatatgctaaatttatgagaatgagggaaagaaaataaaaaatatatatattaaaagaaaagtaatattttgagatgatatatgctttcttttgacaattataaatagatcggggttagatgctcttacaagtcccatgtttttggtctcttagatgagagcttataagtttatgcacacaaaattcaaagattatcatatatgtccatacagctgtaagcatataacaatacatataatattcaattaaaggtactttatacgataaaccactcccaaatatgtatacataaatatagaaagtggaatactaaagtatactgatagtggagaaaagaggtgagtgtgttgagtaataaagaaacacctcaccccatcttgatcattttgcttcctcattatatataaatacacatatataacaccatgtttggtacaccataaacaaagaaagtgttatttggattaaacaacattgaaggactcaaaaagaaaaaaagggaaaggtgtaaatagcttatatataatttggagccaatcatttcacaaaaccactttggtggatatttcatgacttgaagggaagtgctctgatcacaatttgatggtacaaggctgctagtgctgctccaatgaaaggaccaacccagaatatccactgcaataataattccaaaaacaatatacataaatatatcaaagactaatatattaaagcttaaaaaataatggaacagagtgaagataaatgctctgttttgcttacatgatcatcccaagcatgttctttgttgtagataagggcagccccaagacttctagctgggttgatacctgtcccagtgatagggattgtggccaagtgaactaggaacactgcaaacccaattggtagtggtgccaatatctgaaaatatacaattcaaattataccatatcaacccaataaaatttaggagttttttcatttttacattttaaaacagttttttttttgtatttttacgtaattctatatagaaaaccttattgcaactagcactgcaacctaaatcgcaacaaaaaatcgtattgcaactcatataaaaaccaccaaaaaaccactttagaaactcaaaccgaaaatttgaaaaaaaaaataaaaaaatagtatatgggataattatcctaaaatgtataaaaattgagttggaattgggtttttagtttggcttacaggaacatgggagtcacgggcattgcgcttggcatcagtagctgagaagacagtgtagacaagcacaaaggtgccaataatctcagcaccaaggccatcgcctttggtgtatccggctgcgacggtgttggcaccgccgccgagcgggacatactgatttttctcgaagcccctcaccacagcggcaccgcatatggctcccaaacattgcataatgatgtaaaacactgctcttgtcaatgacaacttccttgccaacaacagcccgaatgtcaccgccgggttaatgtgaccccctgcccaatatcacaattactcaacttattttttatgtcataataaaagtaagtaataactctttcaaatactttttgttttttttctttctttaaccattttttaaaatatttgttacaaatttgagaaaatacagtatagaaaaatagattatttcagaaatacccaaaacaaaatatatatatatatcatcatgatggaattctaaatttttatataaaaaaaaattcttccagttatttacacgttgttttaaagaaaactgttcttacacattattttcacattgggaaaatatagaaacatagtataacgttgcaagaacttgaaaacaatgttgaaacaacataaaattgtaaaaatgtgaataaaaaataatctatttttaagtgtgttgtgtaaattttcttaaaaaatatatataactaatcttaagataaaacaagccagacccgcccttagagcacagtcaaagaaccagaaaaatattcttttcaaaaatacacaaaaaaataaaaatcattaattttaaaaaatattatataacttaaaaacaagttccaataattaatatttttacataggccgtattactctatgatatataaaaagacattaaaattataaagataaacatatggattttttatatatgatctcataataattaatgctatttttttttattctccaatcaaaaacaaaaaacaaaaaacaagtgtactagtgagcttggtttaagtcttttttttttttttacctgaaataccagcagtgcaataaacaagagcaaagatcattccaccaaaggcccaagcaatgccttggattcccacagttgagcatttggttggagatttcactacgcccataacagtcaaaaccgttatgtaaaggaacaagaatgtggccacgaactccgctatgccggcacggtaaaacgaccacgaagacagctcccccggctcgaaaagcggcgcaggcggtggctccgagtagtccttcgagtcttgactctgagcagccgttcctaaaggctgtctctctctgtacatattggctccaagtctaacatcttcttctttcccttccatgatattatagtaatattttgtcaccaaaaataaaactaagatagttgaagtagaataataagggtggtttttagagaatatgagtattagtttgggttttgagaaagttgtggttgtgttgaaaatgagtgaagaaatggggtatttgtagtgggacttttctttgtgttgtgtgatgaaattaatgttttcttttttattttaacgaattaatattgaaatgtgcattatttgtcgacacaccaccgacccctccaatcagcactagaataatcatttgtttgttttgcaatagtctattctttctttctttttctttttcctttttttatgacaacaaaaattaggatttttctctccaaggataaaagttggataattaagaaaatttcccacaaatatttcatcaataaatacatgaaaagaataaataatgatcaaaagcaattttctcctcttcaaatctccttctaaataggaaaaaaaatagaatttctcgttaaatatgtaattatcggaggtcatttttttcctggccaagcccgccgaccttctctggccttataggtgcggcttggtcgggttgtgttttgctactacagttccatttttgctactgtgaaattttgtctctatgatatagttttgagtattttagtctttatctctatgacataattttgagtgttttagttttgtgtgtgtgacatagttttgtttcattgttagttcttctttgttctttgataactcgccaaaaattgttgttagtagatgggaataacaagctctctccgattgaaagagtttttcgtgtagtgtagttacgtaccttacacaatagttgagtaatcaagttacgaggttgaatgaactcgttgcaacaatttctactgttgtattttttgagcgatatataaaacctaatataagtgtttttaaagttattattgtgatggttcaatctttttggattttattttagtctttttgtcaaatgatctagaaattaggcgggtgactattttgctcgtttttctaattctaatcctaaacgtgtttttaacagaaaatttcttgatttgattgcagactattatttaagataattgttattatatgtaataaaattcaacttattcaaaaaaataaataataaatacatgattgaaaatcataaagaacaagatcttgttctttatgattgatctctagtgtcagttttttatgattgatcttgttctagaacgtgataaaattgtgtagattgatctctagtgtcagtttttttttttttcattttggtctaattattggttaactatgaaaagttttagattaaaaaaaataatgttaatcaggcaataagttaaaggggttttttccatttaagaaagttcaccatctatcttaaaaacaatccattaaccggaataaaagaattgtgactaacacgacaaagaaatactctaaaaattgctaaataataaaactttagtatttgaaaaagatacctctaactttctgttccacccagacataatatggtatatctgatttttgcttacaccaaaaaaaaacacttgtcaaattactttaaaaaggtgatataaacttgacatttagaggtgctgaggtctaaccagaactcctttcggttaggagcgcactgttatttccactaaaacgttagacttctctattaatttgcatacaaaaacaaaacacacccaatttactacactgtcacttcgaactaaaaataacataattgacatatatatagtaaatagtaatataagtgtaataatttattgattagtggccaatgaatattctagagtttctttcatattataattgattattttttctgtaaatgttatgcttatgtaatgaatcgtcccattcatgaatatttctttcatcattcgaaaaaaaaacatcaaataattttggtcaatattgtctgctttccttcccatgatccatcaatattttcgagtacgtatttatacattaatgatacaacaatataactttttgaatatgaaatgtaattattattttgacaagtttttaaaaaatgtcgtttacatatttttaatttacctaacttttgaagtaccgtaacttgaaatccaagcttaatcgattgccttagagaaatttatgggcaatggtggatgaatgagtactccaaaagttcgatgtgacagtctgcactgtgtctaaatttctagtttattaattaagtaagaatttcattttacatgcttacttatataaatttctcttaattttattacaaaaaaaactcacaaatatgttgatcatgatcagccactattatatataatggaaaaaaacgaagggagttaaagatgaatttaatattaatcactcatagttggtttaaaggtttgtataattatttgtttagattctgtgttttataaaattaattttgaaaccttatgtttaatttgtagaaaggttaaactcttaaacacaatttttgactatggctaggttaaacaacacctcctttgttgaagaaaaaaatcgaacagattcaaatctaacaaaatattttagtcatattcacaaggaatattggcggctaaacaatctcaactttacggttaaccacattctttcccaaacccccattgattttgcaagaagacgaaggagatgaagaaaggaaaaagaagaaggagtgagtgggtgggtgcgggtgtggcatctgggagaggaggaagaaaagagtagatcaaaattaaaaaaaaaaataagaaaaaaaaaagcaagaaaaggaaaaaggaaaaaaaaaagtaataaaaaaatattttattttttttt

SEQ ID NO: 20920 - DNA, 5705 bp, Cannabis sativa
atatatatataccaaataataatgtgggatagtgaaaaaaaggagaaacaatgcaaaacgaagttaaataatttccctaaacaaacaaggaaatgaaagaaagagattttggacactattaccaaagtcgaccatttagagtgttttggactttggacaatggagttagcaaaatcatcagaagacatgcaatgacacacacacacacatacatgatcatcatcaaagtaataattatatttcccaaagtatagtgacaaaatacatttaattaagaagatgatgatgatatattctagggtttctgaatcactggtaattctgtgagtattattaatgttgggttgttctcttaaataggaaaaagaccccaacaacactagttctctagcgtactgtctttgcctcatctatatatatatatgattatatataacaataattaatcaatgttaacttgagccatgaacaccagtagtagaaaaacagtgttatgtctcagtcacagaatatatatatttatatatatgaaagagagtaagaaagagagagagagaatgagtactgaccggaaaggggtctggtattggttgcagcagtagatgagcagagattactaagttgaatttcgatcttgttgaggaaagttgttgcttcatcaaaaggcctagcgagatctgatttatacttcactaacatctcacagtaggtttcctattatttttattaaaaacaaaacaagaaaaaaaaccaatattatatataaacattaaacaatatctaattcaacttattaaacgagataataattagagaagcgaggggaccatgaactcgtccagctcgggatcggctcctaagcacgtggagattatggagtctctcttataacactcgttttttctacggatttcttctaaaaaactcgctatttccggaggagcaccaacctatatataaaaatcccaaatttcttatttattatgtaaatataaaatctaagcccaaaatggtaaatttaatagtagtagtggtggtagttttattcaccttctgacaatcaatataggcttgtaggagtttaggataagtgggatgtgaagagattttggttttgatgagattagaaacatcttcttctgatcgttgaaatgaaacggcggcttcagatatagcagcagaagctgctgaaagaagttgctgatgatgatgatgatgttgatgattgttattatgattatgatgatgatcatctgatccgaaaaaggagggaagtacccgatgatcacggaagtttgttgaggaaataaaagtcggataatcagagggtagaagcagatcatgatcattttctggagacatcaaagctttatctgaatactccaccgacgttgttgcttcaagtccatacatttcatccatattattacactatttaacttcctctttctctctctctctcaaggttatccttttccttatccttctagaagatcacaccaaataaaacaagaaaaacccctcaaaattaaaaaaaaaaaaaaatgagatggtttactgctttttaacagtaaagagaaacaaactactgaaaaattaaatagaatttatttcaatctcaacatatatgtgatgcgtaataaaaaattttaaaggggtttttgggagaaaaggggatgagtttttggggagagagatagagaaatatagtaagtgtttttaatgaaagagatggcctgagaagaaggagtactactatagctatattactctcactcaaagctgagaaaaaccagctttttggagtttttcttttgattaaatttaaatctttctttttttttttttggataaaaaataaataaattatttaaaataatggtgtgttgtgttttcttttccttcttttatcttctattattttttttaattaatttgtattttttttattaggttaattaattaacagcacttactattttaaaggggaagatagaaaaattaaaccccacatgtctgctgttctcgaagtcatattgacctccaaattggcagagcagccttttaaatgccaatattgaccttcttcttcatcgtttataaatatgggataaataattaaaattattttatggtacttatttagctcttattatactattttagattaattatggtttttttatttggatgtacaaaattatgttcttgaaactttttagttttaagaatttcttttgaattattgaaatttgaatttaaagatttttgtttaattttattcaatttttactaattcgataattgttcatgtactaaattatactcccaaactttgacatctactaaatcatgtctctcaaattttaacatgtactaaatcacgtctcaaactttacttactgaaattgaacaaaaatccttaaatgtgacaactttaataatttaaggagaatttttaactacctcaaaagtttaacatgatttagtacatattaaaatttgggacaaaaattataattaattaatattttattaatcaatacttagagcatcttcaatgaaaatgtaaatgagtgatgtaaatgtaaaatataacttactttattaaaactttaatccaatgattgctaaattgtgatccaatgtcacataacaaaaagtatttcaaatttaaatcacaacatagcatgatacaaaatttgcattacaataaatactatatttttatttaccattatactatttttaattttagttaacaaataaatgacttatattattattagtaaattttatatttatttttgtattattagtattattttatatatttttttaataaattattaagtgggtaataaataacatattaaattttaaatcaagatttataattatgtattaaagtacaatagtaaatttgatataaaaatatcataaaattatttttttatgtaaaatataacttaatttttatatttatatgttttgtattatgtatgtgtatttaagtttcttcttgtaattattattattatttattactactactactttcccctaacccttggaatcattagattatattccagttacccatgatgattactttattaatttactttaaactacatactgtataccatataagctcagctagaatctttacttctttttcatctaaaactaaaatactattaaaatctttaattctaaactcctaaaaatggaaaggtaacacaactattaattgtccttgaagggacacacgaaaattgattttcaatatttattaaattaatattttactattacacctaacctttttttttttactttcttctttttcatatcccattcatatttgaaaaattaaaaggaacttgtcaatttctttccttattatttatttagtaaaaaaaataaaattgactgataatttgtttcccatatcaataaaaaaagtaattaattagaattctttcctaaattttgacatgtaccaaatcatgcccttaaacttttaaagttgttgaaaatatcctctaaattattgagattgttgaatttaaagactttttttcaattttagtaaaaaaatctaacatgcatgaatgaaagttcaggggtcataatttatgtacatgtcgaaattcgacgaccttaacaattcatggggtatgatttattacatgtcaaagttcaaaaacaaaaatcctcattaggcaaaaaaaaaaaaaaaaaagctatgttttgggattgtataaaacttgccctaaatgttaatttaaagatttgattttttgtttcaaattcttaattattatatatacgtgacaaatgatcattatttccccacatatataatgaataatttataattattgtaaaaaattaataactggcaatattttttctctcctaaaattccaatatactatttggtgtgtgcccaaaatgtcacaaaaggcaatgacatgtatgatatgtattattaatacaaataattcaaaggaattttttactaatattaaattctgatgtaaacttcacacacctatattttgtcagtgttaacatgcatctacatgccaacaattcagaccaatcttttattattagattatactcaagcttagatcttacaattgtattagtgttgtagtactaggacaaattttttttttttttgctgcaatgtactaggacaaattgttcccacagaatagtaaactttttcagaagtaataataataatggtgaaacgtatttttaaaatatatatctttaaattacataatcatattataatatgtcacatatatcatattagatacaattcaattcagtgttcactcatgtcaacatgtacatatacactattatatattagtgtcaatttttaacatcaaatttcatttcatccacaaaatagtttaattaattgcctaattaactgaaatacgtaaaacgtgtgcttacttttttttttcttgatttggtcaagatcaaaattagtggtcaaatgagaattaacaaactatgtattctcatttatcaaatgaaaattaatgcgaaggatttttattgggcattagaaaattatatctcattttgtaatagttacttttcttattttaatagttatattttctccaatattagtagaatttgtaattttaatacttataatgtggctaaatggcttttagcttttagagattttgagttattgtggtgaaaacaatttcttcaaactttgtaattactatgaggtctaatttttatttatccaataaacgctttttattaggaaaaaaaaaagtatttaataaatgggaagaaaaaataaaatggttacttcatagtacttgattagttgattgtctaccattgcatattaattttctttaacgcggcttctataactatttctttctacttctatggttggttttttttatatatatatggtagctattaaagttgataattaatgaattcaacaaacttaaaggggacccagtaaagatatatatgggattaattttgggtatatataacattttgtgaacacacaaaattcgactctttgaaatggtggactggattattatatatgctcaataaagaggaattaaattaaattaattggaataatatgtaatgcaagatagtgggtataatttttcgtataaatactagactaacttgtacaatcatgataagtaaaattatgatattttaattagtattgttacgaggcattatggtgtctattaccagtatgaggtagcgtcgtcagtgatttatataatttctattattaaagtaaaataagatagtagtaacgatatgtcaccttataaaggtgttagacactatggaagcccttttaggaccaatcttaaagtatatgaggttccaaacaaaatcatatttggggcctatagaaatattttaattattatcaaaataatagttttagtgttttggtgtaatggtaaaaaagtttagaactttaaagaattcaaggttcaataattcatagctacgattaaatatttttttaaaaaaataaaaactggatgttaggaattgatttcttggcctctagcttataaaaaaaattataatttcgaggcccttagtgtttggtggccaaaggtgcacgtcaagctcgcctaccctcaaagtcggcc

SEQ ID NO: 20921 - DNA, 3062 bp, Cannabis sativa
ataattaaatattaaattccacaatttaataattattatgaaatatattaactgtttataaatcaccacctctaaataatacaagacatcactgatatctaatagcaatactaaaaaaattaactgatgaatgattttaggaaatatgatgctttgcaaataattaacgtatcacttaattacactaatagcgatatgacacatttaagtggtactagttccttttatcatttctcaaaacaataatgatgaatgatcaattacctttaattctctaataatctgaaaaatgtttaaattatactatatgggatttcactaagcacataaatataatacaccaaaagtacataagccataacaacttgattgactcaaaatcagatataataatatggtgaaaaaactaaacaaaagcattataagaaaagaaagaagagaaagaagtttggccaaaaactataactaaatgtgagtttaatgactcatttgatagctacacaaccaaactcttacatctccttctgcagttggtaataaaaacaacaattttgtattgactgaccgccttttcggttcatcttcttcaaattttgaggtgcttcttctgcaactgctgcatacattagtattatagatatatagtatactcaaaacgaatctgcacgagcttctttctcgaaagtgacactgcaaaatgaagatcaaatccacgattcatcgatcaatgaggctcggacacaaactctcatgagtagaatgagtgttaaataggaaaacattactattaatgttacctcttcagcaagtgttacacactttgcattttactagatatgtccttcactttcgaatctcctttttcctgcaaatcaagagtcgaaaaagaccacatttgagaccgagcaagatacatgtcaactcgaaatagcaaatgtatagcaaggccagaaaagcgaacgagtccatacacaagaaatgtatagaatataagttgtttggtttacaggagcttaatcagtgatcatcacatcgatcaaattcaatcagttgactatttcaattatttatgcaaaagctatttcaacattatagaaaaatttagtagttgcgtaagcatatatattaaggaaaagctcaaagtgataaactaaattaagaaacgaaacaatgttcctcggatcagagcctgagacactatggctttcgatccacacataaccagataaatgattaactaggctaaacttagaattgtacaaaatataaaccaaagtataaagatcaaggaataatgaaatgacaattgcataatatcaaaatagaaacagcaagattaacacttgattaccaaagaagaaactaaagattccgagcaaccgtttctatcaagatagattcacattttggtaagttttactcaataacctactttaactaccaacacagcaaaaatagaaactcaactaaggaagctaaaccattccaattaaccgaatatcgatatcaaaactaagtgcaattacaatgaaaatgaatgtagataatgagaaaatgtaaaagcataatacttaccaaacccttgttctcataatagtcatccaatgcccactgatactttgattgatttaatccaaaccagcgagctaaatggtcatctagactagaatgtgctgcaaattaaaccagcaaatcaaaatctcaatctcaaatacttattataataacataataattgagcaataccagaatagatataacatactatctctaaatcccaattttctcagcaaccaaacaagaaagtctaagctttcctcacacaacattaaactttaaataatgttttcaactttcccaaaatctcaacttgaaatgttagatttcagttaatgaatttgaaaagtaaagtgaacataacattgtaccttaaacaatcaattttcccaacaaccaaacaagagacagaaaatcactttcaaaatctcagctcaccaaacaaaaaccactaaacaaagttacacacctaaacaatcacatcacaaaacacaaaaattgagccttttccttcctcaaatttccacccaaagaaccttaaacacccaattttcccaacaaccaaacaagaaacaaaaaatcacttcaaaatctctgctcaccaaacaaaacacccaaaccaaccactaaacaaagtacaaaaattgagcctttcccatcctcacatttccaccccaaaagaataaaaattcccaatttacccttttcccttctccatttcccaaaccaaaaaaaaaacccaattgggtaaaaaagacataccattctgaaccttagtgacagcattcttaaagatccccaaaacagagccatcatcagtagtagtaacggacttttcaaattgctgagggggtggctgaaccggaggtggaaccaccacggccaccttcttgggagactcaaagagaggctgaggtggcggtggtgatgatgatggtggtttaggagaaggggttggaggtggggtcataaagacagtgtaaggtccaatctttccgattaccggtggaggtgtagatgcgtctctattgattcccattgtgtgtgttgtgtttgggtggaaagaaagtgaatgggaaagtgaaagaaagtatggaaagagagagagagtgagagatgtttggtttgtaaagtgtgaaagtgaagtgagctagagctagagagagagaagacagcagagcacacaaaccaatgtggttaaggaaactatatactaaagttaagaaaagagagagagaaagtgtgtgttgtttgtagatctttgtctttgtgattagtactttacttacttctcttctcatgtactaatatcaaaacaagtagtacatttttatttttacttttacttttgaccatgaaacaagataaataactttttttttttttttctactttgactaagtaaaattcatttcaccttagagcatttccatctagaggtattcaataaaatttacaaactgtccaactcaaataaaccgctcaaaccaaaccgaataaaccga

SEQ ID NO: 20922 - DNA, 2957 bp, Cannabis sativa
ccacgtatgataattttttagtgacctgtcattgccacgtgggaaaaattaggacttaacgaggctggacagatggaacctttaaaatgtaaatgaaatagtactttggatgactttcccaccaaaatatgagattggatagttttttgcaagtaaacataattgaggggattttaccgcaaattactctaaataatatcactaaaagtcggcaatcacttattattatagttattattagttattttaatttataaaatttgtcgtaattatagtagttttgaaccgaagttaactttagtggagcagttgtagcgccgaaaaagtgtccaaaaacaccaatatggccaccaactatttacgtaaggccatttatctcactagacattatgcaccactagccttttgttcaattaaattttctatcgacgtattttagtgtagtagggatacttcgtgaacatttgaaaatgaagttgaacaaaaaggaatagaacatagatcaactaatttttcaattgaaaatgagacttaaaaaaaataaagaaaagaccaggaagattctctagggaataaccatttaacaaaatccaaatacaaacaatatcaagaaaatccaacaaccaaattttctacaacagcttagtactctgtggttgggagttgttcgtgtgtggctgggcagatgaaaacgatctcgtaaacaagggcagcaatgccagcgcccacaaatgggccgagccagtagacccagtggttggcccaagtccaactaacgacagcaggcccaaacgagacggctgggttcatggaggccccgtcaaatgcaccaccagccaatatgttggctcccacaatgaaacctatggcaatgggggcaataattccaatgtcaccctttttgggatctactgcggtcgcgtacaccgtgtatactagcccgaaagtcatcactatttcgaacacaactgcgttccatgctcctactccggatgatagagcgaaagccgaggtttcctgcattaacaaaagtagaacttaaatactcatctcacttacgtactaattatgaccttaacatatgataattgtttttactaccataattatttaagagtggtgcctattatttttgtatgtgtcaatattgttattgatccaattaaatgtcgggtttcatagaattaaatattaatttttagagattactgctaactaatcgcaagataacatgtcaagaggtgctagacgatgcccaaaaacaatgctcattatttaatggtgtaagaattaggtaaaacttatcgttatttaatttttttaattttttaatttttttttagaaaaaagtcaatggtttattatatatataaacataacacttattaataggtattaaaaataactataaatattaattataaaaataattaaactattagatctttattcacaaataataaaagaaaattttaaattatatgcttaatttacaataaacgtatattttattatattctttttttattttgactatgcatatttttagttgtatataattagttctttttggatgttatttaataaataatatcattttttatattaaaaaaatatttaatttaagtattatttataaaaaaaagaaatataaataatattcaaaatttattattaattttaattttaatttaagcgtaatacttttaatattataatacttttttattttttagaaatatgatacactgtttctatttcttttaaataataacaaaaagttattttttgaaaaaaaaaaagaataataatagaaatatagttttgagaatttaacacttgacaatttatttttgatctaattataaaaaatgacttagtcaagtataataataaggtttttatttatttgggtatgtttcaatactctcatttatacttttctttctctctctttttccccttctctttaaggttactactttatctctttctttctctcttaaactttaaaaataatttctggtgacatcgctattcggatgaggctaaaaaaatattattgtgatatactattaaaagtaaatatttcaaaatgtgtgaagcatataatttttttttttttttgctatttctaaaaaaataaaccatttcattactaatatagtaattagttacaattttctgattttttaatcttagttaacattcattttataattttgttaattgatttatattatattatacgataactatttagctttcaaaataactaaaaggtatataaaataaacaatatataaaaatagtagattgttatattacatgacagctcattagtttcgaaataatttttaaggttacctaaatgtattttaaattagtctatcataatataacttaaaaataaataattaataactaaaatgtattcaaataaattttagatgtaaccaaaatatatctcaaattatatgatataaaaaggttactaattgtattcttagcaacactattagtaactaaaaaaatacttttaaacataaaaaaaaaaaaaaaaaaaaccaaaaaatatcaagaaaaatattaaatttgactgaagtggcacgtcaataataataacgttattattgtaaattttctgaaattttttttagatatatgtaataaatttaaattctaattgcaatatcaaaaaaaacattttatgttatatagtgacatttctaaaagatgaaccaaaacatatatgatatatacttggtgatgacttaccaatccaccagttgcgaacttgagaagcaagcatgcaacaacagagccaagcaactgagcaatccaatacaagacactcctcatgagagtgatatggccaccaacaaacgcaccaaaggtcacggccgggttgacatggccacccgagatgttagctccgactgacaccgccacgaata

SEQ ID NO: 20923 - DNA, 5039 bp, Cannabis sativa
  modified_base (4751)..(4757): a, c, t, g, unknown or other
ataaggcacccacagctgccagggccgaaagacccaggaacatcccaccgatgaccgagaaaagagaagcgggcctactttgtaagtttgggttcacggacctgactatacaatgaggaaatgaacaaactaaggctgaggaacctacgaatggaagagatggttgcaaacatgcaaatggcgttggatgaactccttaaaggccgctccgagatccccctagtcagacgaggagcaccagaggcagggagaaggaggacagacaagctgggagatgaaggggcttcgagatactcaacaagcaacacccctgagtcctccccgcataaggtttctgcccggagaaatcctgagccctcctcacgacccaagaaaacaaaatccaagctggtccaaggagacttaagggagaaactccaccagaaggccacgatcgaaaagcgttcgctgatagtagactctctttaggaaaaaaagaaggcaaagccggcctctgctgatttacgggagaagctgactaggaggaggaaggagttagacaaagaaatggaagacatgcgacagagaatagccttagccacatccaaagacagtaattgggaagaggacgactttgacgaggagtcccctttctcaagagagatccaggcggagcccttggccgtgaatttcaaggagcctaatatgcttccgtatgaaggtttgatggacccaaaataccacatggttgcctttaacaagataatgaaaatgaagggtcataagcaaagcaaggtgccagtgtttgcggtgacgctcaagggggcggcgtataagtggttcaaaaggttggcgcatggatccatcacctcttggaagcaattcactgatgaattcttggcccaacaccacgcgtccatgaaactatccctaggatgagcctggcaaatattaagcaaggagaggttgaaagccttaaaagctacatccaacgcttcaatgctgaagcagctagggtagggaagctgacaaaagatgagcacaagatggccatcgcggcaggcgtccgtccaaagagtaagttctggaacaacatgcccaagagagaattggaggacctagaagatatttacaaaagggccaaaaaatacatccaggttgaagatgggcatgaaaatctcactaagggaaagagcgagccgggtgggtcagccaaccctcacgctcatgaagagtcatgaaggaagagggagttcaacggaggcaaaaacaaccgaaataagagagttatgagggaggaagaccctcgacacagggagttcacgtattacactgggctcacatgctcaagggaacacatctttatggaaaatgaacaccagatgccgtttaagaagccgcctccaatgagaaaagataggtcaaagagtgaccccaacaagttttgcaaatttcacaaagatatagggtacaccacgagagtgtacccacctcagaatggaaattgaggacatgatgcaaaaggggaacttgggggctactggagagaagaaagacgccccgaggagagagggtaggaggagcaaaggtgagaacacccccgtgaggcccctgaggtgataagagatgtcagaactatctgtggaggacctggaataggaggagacactcggaagggaagtgacaggtacgcagggaggccagacagccacctgtggtgatgaacctgaaacaaagaccgcctaagatttcaaaagaagagaagtattctataaggttcaccgaagaagatgaacgaggagttcactttccccaaaataacccgctcgtgttggctgtcccactggctaacgctagggtccatcgagtactcatggacaacggaagtttggttggcctactctaccagagcgccctagaataaatggggttgggcatgaaggatttgaagccatgcacaacacccatatatgggtttagaggggactcattccatcccctaggaatgattgagcttcccctcaccattggagagcagcctaaacaggtgactgtgatggccacgttcattgtggtggaatgtctgacagctttaaacgcggtgcttgggagaccctcgctctaccgcttgaaggcaattgtgtccacttatcacctagccatgaagttcccaacttccggcggagtcgcgaccgcaagggggcaacagaaggaggtgagatagtgctataacacatcccttggaatggccatgaaactccgcgagtcaatggccatggttgtttgtgacaaagaggcacaccaacaaagaatcgaagtagacctagacccaagggtgagggaggaggaggttcatgctaaagccaacgaagaaactgaagaagtggtgatatccgagcatccgttgaaagtgcttaaaattaggaaaggactttacgaagacctcaaacacgagctaaaacaataccttgtggggatggcagatgtcttcgtctggggacatgaagatatagtggggataagtctcacagtgatgtctcaccacctaaacataggcccgctagctcgaccagtaagataaaagaggcgggcccttgactcggtgcgatatgtgccgttaaaagaggaagtggacaaacttgacatgcaccgcttcatacgagaagctttttaccaggtgtgggtgtcgaaccccctcctggtccccaagccaaacatgaagtggagggtttgtgtggacttcactaacttgaataaagcatgcccaaaagatagcttcccactcccccgcatagattagacggtggacacaatggtcagaaacgaagtgctatgcttcatggatgcatactcaggctataatcagatccccatgaacccagcggatgaggaacacacattcttcataatggataggggactctattgctatcgagtcatgccttttggtctcaagaatgctggggccacatatcagagatttgtcaacaaaatctttgccaaccagattggccgcaatatggaagtatacgtggacgacatgttggtgaaatcaaaaaaggcgggggacttgattaaagacctagatgaaacattttccaccttgaggaggtatcaaatgaagctcaatcccaccaagtgtgtctttggggtctcgtcgggaaagttcttaggcttcatggttaatgaaaggggaatagaggccaactcagaaaagatacaggccctaatatacatggaatcaccgaagaatcgtaaggaagtgcaatgtttgacggggagggtagtagcactcaatcagtttatctcaaggtcaaccgacaagtgtttactgttctttaatacacttagaggaaacaagcagttcacctggggagaggaatgtgaagaagctttccaaaagctcaaagaacacctgggaaagccaccgctactagcaaaaccagagaaaagagagtcgttagcgtggccctagaaagggggaggggaaacagcaacaaccagtgtattatgtcagtaaaagattagtggacgctgagacctgctaaccggagatggagaagttggcttacacattagtggtggcttcaaggaaactaaagccatactttcatgcccactcaatcgtcgtgctgaccaactatccttgcaccaaattttgcacaagccaaagacctcaggacgcctcctaaaatgaacgatttaactgagtcaatttgacatttcctatgtactgcggacaaccatcaatgggcaagtgcttgccgactttctagctgaatttacctactagcccgacgagttatagcacaaggaagcagtagagaaggacgcccgtgatgaaacagggaggtggaagtttcatgtggatggagcatcaaacgatggcggtgcatgcgcgggagtagttatgaccacgcctggagggtagaagatgtattgcgcattaagattttggttcatagcttgcaatagtgatgttgaattcgaggctttactggctggcctgcatttggccaaggaattaaaaatcactaggctagatatctataatgactcacagctattgtgtgccaagtcaaaggagaatatgaagcgaaggggaataggatggtggcgtacctagccaaggtgaaaaattacataggacagccataacactacacaatggagcagataccccgtgacgataatttccatgctgatgcattggctaagttggcatcaacacgggatattgacaccttagagtcaatacctgtggagtacctagagaagcctaccattgaagaggagcaggcatacgtggtgaccggtaaggaatcctggatggccccttaccagaattacatccaaaaaggagagttgcccaccaacaagaaagaagctaggagggtagtgtataaggcggcccattatgtggcgatggatggggtgttgtacaaaagtggattttccaccccctcctacggtgtgtgggcaaggaagaagcactacgaagtttgtctgccatacatgagggggaatgcgggaaccatgccgagggatactcaatgccacggaagattttgaagcaagggtactattggccctacttggagaaggtgttggaatatattttaccaggacctagatttactaacaagtatgttttaatatcctaaatatgaacttctaaaatgatataaaataaacacataaaaggtatgagaagccttacattggttgcagcagaattaaatgacccatttcactcagatctctaacccttnnnnnnnttctgtagtagagtataatcaagaactgagactgatactccttcagttgtttggattcttcacagtcttacacactatgattgatgactaacttgctatgggtgggcgtgcactcaatcactaaggcttgaattttgatggtgaagaacacaaagaattttgaaatagtagagagaaaagaagaagaagaagtctcaacacactagttttttgacagaatgaaaactaggtttagaagcattagttggataatgagacctttcttttctttttatactaatt

SEQ ID NO: 20924 - DNA, 5735 bp, Cannabis sativa
gactaattttagcctaacagtaggaaccccaatgtcacctccaattgatttaatctcataaaggtccaagtttccaaaattcttaagctcttgtaaaagagtgccttgtgcttgaaaagaattagtcaaagctaatttttcatcatgatgaaaattcacctcttgaccacaaatagagctctcattagaaatagtagtggccggcccattgtccaagttaccattaatgttgatacacggcccaattgtttccaagtctctaccacacggcccaattgcttcctggcccacatctatctcaccacccctcacttcttttttatccgcgtaaatcgggtcggccccacatttaaaaaccctatttggcatacacggctcacgagaaaagcccaactgcttagttttttcctttgatacaatagccggcccagtagaagataatgcaggcccaataacctccctattaggcccatcacctagggccaaaccattgaacaaagtcaaaggctgatcagtacaattcaaattagaagaaggaaaaacctgtgtacccttttgcctatcatcttctccaacgttaaacttattacccagagaggaaaccccaggctgtcgattgacagcaaggagcttgggtacccacactttctgactttctagcctatccaaagcaaaaatttgacctgtcactgtcgccaattgcttcgaaccacgccccaccatgaccggtcgagcaagcttctcgcactcctattcatggccgccggcatggacttcctccgcttcacaacacggctagcccgagaagatgaagcctgagacgggaagaacgagtttgcgccagagaaaacatcaaggtatgaagaagccatggaaagccacgtgccatacatgggataaggaataccaagctcattgaccactgtgacagggaaagaaagagagcagcctcttctttgatgccccagtttaccacaattgtaacagaaaattccaattctatcatatttgaactgaatccaacggtggccacccgattccaactcaaagaaacagccagaaaacagaggagagttcacattcaactcaatcaaaatcttaagaaatttaccccacaaagccggagcaccttcatccaattccaccgagaggactttaccagctttccccccaagatccttccattttcagctgagtaataatcccgtggaaggttatggatttgtatccatattctcgtcgagtcaaaagaaatggagagcgcagtcctaggggtccaagctttaagaatgaaagtatagcctcggacacaccacgatccattatcactagcccaagcacggtcatctgctcgagcaaaaccaagctcaaaccagttagggatattagtagtctcatacaaagcaaccacattcaccttaaatttccaagttttgtccacaaagtccctaacagaatcttcattaacagtcataggggctattacttttcccacaaggcaataagtggacaaagcctgctgagaagaggcacaaggagttaactttatagtggattccgcacgagtaaagcacttacccttaccattgaatgcagggttggtggcattaactatgtccatactcgacaacaaaggacgaaaccaccaaacaccaccttaaacactacaaaaagacacaacactctaccccacagaaaccccacacaagcactcttagaagatgacagaaccaaacaagaagaaaaggaagcacccaatcactcacacagaagcacaagccagcaaacaaaatatcaggacaaaaatatgagaccaggaaggagtgtaaataaaagaagggaagtctcgagagggtgcaaaaaagaccactaaactttgaaccacaatcaaaacctcaaaactcaccagactctccacactctccagccacaaaactcacgaactcacactctctctgaactctctcacactctctctctaaactctctctcacactctctctctaaactctctgcaagcacaataatctctgtatataaatatgcctccatacaaaaaaaataaaaaataaaaaggtaacacgttttcttatggcacaagcaaactccctaattactaattaataagcttctaatcttatctttttctttctcatactacaatcactcatcggagaggaggaacaaggcttcactcaggtatgattatgattttgtggtcctaattatttttttattttttgttcttcatctatttacacaaaatttctttatttcttcccctatagttaaacgaaagtggttagagcaaagaaaaacataattatatacattctaatcgttatttgtggcgaaatttctttacgagatttcagttgaagaagcattactttcacatatacacaagtgtcaataataatcattcaggtaattactcacttcgatcacacttttagcattgatcaagttactaaaactcaatcacatggttatgacttagttatgctaaaacaaacactaaccagtctaacaactaacagtttctaacaaaccccaacaatgattattattgagtatatatatatatatatatattgttgatatattagagattaattaattaaagtgttttccattttgatgattaaacactgatattttatttggataattgtttcttttattgttcacgtttcagaatttattacttagaatctttttgatcaacttgtggataaaacattatttgggaaaaaaatggttgaaacgacaacaattgatgatagaatttcggaacttcctgaaggagtaatctttaacatcctttcgtttctctatactaaagatgtgattcaaacatgcgctctttcaaagcgttattggcatccattccccgcatttaaatttttaatacaagggaaaaaatccttcaatctttttaaaaattgcgtggatcactgcaaaaagggtatgcatcttagggtcgattcaaccataacaagatttaatcttaagatgacggtttcttatccaagaagtaaggccgacctcttagataaatggttaactttcgttgttgacaaaaaggttaagaaaataagtcttctcatatgtggagagttctatggttatgaatgctactactattgcttacctaaaatagtagagaaggcaaaatatttgaccctgttggagttgaaagaagtagaattggatacttcttgttcatttaattttccacatttaaaaactctatcattggtgtcatgtcgattttcatcgtcaacaaacgacggttggctatctaaacttatttcgcgttgcacttctcatgagaaattgcatatacatcaatatatttactgaattattgatgagaattttttattacaaaattcaagtgtcaagatcattgaacttagatttgattatgagaacgagaatcctcgagttcatattgaagccattaatctcgaatctttggttctacgttatgttgatccaggcacaataaacatcccttcttgcaagaaaataaagaatctctcattgctttggccagatgcaaatcaacacacatttgaagcatttatttttgatattcttcttcttgagaatttgtctttcagatgatgtaggtgggcattagaatgtttaaaaatttcaagtttacacttgaaaagattgaaaattcaagatctattatatataagatgtggcgtagttgaatcagctccagaattaacagaattttgttatgatgatcgcatattcaaaataagtccaattattaaggtggtaatgtttaatgattgtaattacaacatatattggtttacttatacaatggaatttctttccaatcttacttccttttggaatattgtgaacttatatgttcaaattagtagggataaggtgaatatgtttttttctttcttttatttgattctcatctttgtttgaaggttatattattgagtaatttgtagtataaatatttaactttaactttatacttggttgttaaatgttaagtaaattgtcacgtgacaatttctgattgatctaaattattagatttttaggtatgattgatctgacttgacatttaacgaccaagtatctatagagattctataaatataacttaagtattattaccgccaaaaattaaacttagatatttatttgcaattaagaatttaacttaaatatttataccgtaaattattctattactaattcatatgttttatatatgtttgcatgaaggttctcctatttcaagaaaacttcaagaaagaatgttcttctcccttgcttaaatggaagcatctcaaagtatttacggctgaatatcctaaactcgaaagaatttcatatttgaaggactccttgatgtggatctcaccttttatagaaacattgtctatcaatggaaatgtcatattttagtatagatgaatgccttttatttagtcctttttcaaattgtttaaatttccttagttcttagcttatatttatactaatgcatttgactactttgcataagaaatgagatttttctactttaatattgctatagattttttgtcttcatattgttgcaatactgatttatcttacagctatatattctatactatatatcaacgtgtacaatatttgtaggaataataatgctaagaacttgtattctttacatcaaacttttatcctttttcacaactgtttgtatagtttctttatcatattccttaccctccaaacatggtaagtgttggtgattttccacttgatcattgccacaaattaaacaaacaacatcagaacaaataataaatctaagcagcctatcctttgtttggagtcgacctcgatctctttgccaagaaactctcatctgagttgtcttgaatttctcttccaataccaactgctactactctgcggtgccttaggaatatgtttaatataataaaaattggattgattaatcaaatgaatataattataggaatatgaatgaaccacagaaacacatgtagaccaaaaaaaaaaggttaaagctcagaagcacttggtcatatctgaaataagataatggtgatggacccctccaacacagaagtgcaaatatcatcacagcataatttgcaccagccgggaatcgaacccgggtctgtaccgtggcagggtactattctaccactagaccactggtgctccttgtttctaacttcttagttattaatattattgtttattcattccaaagttaaacactacttctactctatgaatgaaagttgaaacccaattaattctgtaattatgatttttacaaatgagtaatagcataagaataaactctgtagttggtttcattgtatctattctatcttgattttagatagattccaaggaaaaaacgaagaatccaaagcacctgatgtacataggtaagctttgttaccatctaataacttacaaacatgggaaacatctacaaccttgtctcactcacctatgtatatacatatataccacacatatttttcttgatacaaaagctctcaaaaatatttctctaactaatcccaacaaactatgttatcaataatttgaacaaatgttgtatgtgtaactaaatctatcaaacaaaaaaatgtcatcaattgtgtatgataaaattgttaagtgtatctctgaagctcaatctgataact

SEQ ID NO: 20925 - DNA, 1733 bp, Cannabis sativa
aatatggtcaaatacaagattagtgacattatgtagtagttctattctgtgtaactaacaggccataaggaatacggatgcccaataatttttcatatatttgtatgtcgcatttttatgccatgtgattggaaatgttattttgtttatttgatgttatgaacagcagattattccatcaattagaaactgaatttaataaagaacaacaataaactttaccttttggttggttaatctgtcagattcatcatttcgatttattagcatttctttgggttttttttggcaggtaggtggcaaaacataaaatgtaaactatagagaaatatcctaaatcgagtccttatttggtcagttgtttttggacaaggaaagcccaccgaagtctgtggtgccagttcaactcagctaataatttttttagtataaccacattaatcaattggtcatttatttatttgacaatttatgactattcccaatttttatcctttttttcaaaaaaaattaattaattaattatcttaacagatattgccaactgaaacagaaagaccaccaccgccaccaataatagcagtcactataatagttcaataatatacatttttctatgtatttacacatattatatatgcattatataaagctactctttcatcatgtgccactggaacttcaaattagttttttctttaaaataataatagctttactttttaacgatttaataatttttataacttatacgaatgaactcacctatgaaatagaaaaggagaagaagacaaaactcaatggttcttatatctatctatgaaggtggaggaataaatagaaacaaaatatagtaagttaaagaagagttctgtttatatctatcttctatcatcgatattcgatacgataagaattaaaaagatatctttttaatttatctaattaatttggtgaaatcaatggaagaggataattatatgctatgtgctccttattttgaaagtggggaccattgttgcagctgcaacagaaagaagggaaatctaaactttaaaaagttgctcaaagttttgttggtggttaaatgatcttaatctttcctataatacaaattacaagcttatgaataaatttttttttgatatttatatataaattattcaatattaaatattactaatttaataatcatacatatataaaaatgttcaactcttatttataataaatgtcgacttttaagggcataaaccctaccaatatatacatatggttattctgaagatgtggtacgatgagaatcaaaaacatttattccattgcgtacctgatttagtaacgcaaaaccaacaactacatgcatgcatgtgcacgacgacatgcgaggaccaagaaagtcctctttcgatgtcggctgaggaccgagaggtccctgtggtggtcttgtcgtgaaagcaagcagcttagttgccatatagacatgagacgggaacaagggccaatggccctttggtgtggctgatgggagggaataattctcgtgacccatcgcttgggtcgtcgtggacgagacaatgagaggccacaaggctgtacgattcgttgatggggagcacgactaagattcaaggaattcaggttctcatgcatggggaacatcttgtacgtgtgtggctgggtttcaagattcaaaactgagctcacatgcaatgtgttggaaattattttac

SEQ ID NO: 20926 - DNA, 5139 bp, Cannabis sativa
cgagagggtagacagaatgtctccccttctctttgtgttagggatggaatacttctctcgaatttttcaaaagattgggaattggcctggttttaaattccaagatagatgctcaactttgaaactgaaccgtatgtgttttgctaatgataaactgattttcaataatggagactttatttcaataatgttgctgcgaaaaggattgaaattattctcttcaacatcaggattaatgccaaatgaacagaagactgcaatctatttctctggaatgccagaacctgaagttgtgagaatattggaggcctcaaatttcacaagaagttccctaccatttaggtaacttggaatatctatatgttcaaagagaatatccaatgatgaatgccaatgtttgttggaatatatggtcagcaaagtcaaaatgtggagctcaaggaatctttcttatatggggagagtgacactgggtaatgcagtgctaatctccatccatacttactagtctcagattctaattttgccaaagaagttgctcaaggatatagagtcaatatgcatatcttttttatggaagggaacacaagatggagctggacctggatttgtggcttgggaaaaaatttgtctccccaagggagctggaggtcttggttttagaaacattcaggaatggaatgttgcagcaatggccagatatgtgtgggatattgctagtaagaaagattgtttgtttgtgaaatggatacataatgtgtacttaaaagatagacaatggtgggactatgatgctgactgtagttggtattggaagaaactggttggggtcaagaataagttgaagctgaaaactgatgtggctagttttgtactgcagaaatataaaattcagaatggctacaggttgttattcagcaatcatgggaaaatttcatggtgtaaatttgtgtgggatagattgatcattcctaaatacaaattcatactatggctggttctttagggaagattaaataccaagaaaagaattggaaaatttgacactaacatagacatgacttgtctattatgtgggaaagaaaaagaaacaatagaacacttattttttgcttgtgaatatagcaagaattgtttaaaggagattaacagaggcttgcaatggggatcaaaagcaatcaaattgcagcaaatcctgcaatacatcagcaaaacaaaggccttctcagccactcggaagagcatgatgatcactataatggcagggatgttatattatatatggagggcaaggaatgatgttatatggaaccaaaatctatagcaaatcagggtcatattgaacagagttcagcatgacaacaaaatcagaattatgggggtgctgcctagcaaaactaaagaagaggacaagcaatggttgttgaatttgtaggagatttacatgtacttaaaatatattgtgtataattcagatttacatgtacatgaaaagtagagatgtaattgtgtttattttgagcaatacaagtttcttattcataaaaaaaatgttttgttaaagtatattaatggtttttttagcttgtgcggtatggggtgtatctcgtgggattaggcctggctttggacataggcaaactaagtttgtacttaaggcccactcaagcccaatttttttattaatttttaaaattacacatatattttttattgattttaaaaatactagcccaatgttttttattatggcccactaaagtttcccttgcatagaatcatgtgattgtgtgtggtgtttgtcatcttctccaaaattattttagagtttataagtaaattttatggagtatttttatttttcctgattattatttatataaattgttttgtttttaattaaattggttttgaatgttttgaaatcaaataaaagaataagtgttattatttgatactaaggtgttaaatactatattgaggtggcgctttgtaattagttagtgatatctcatgctatttattaaagaaataattacataaagcacaagaatttaatcttttacgttcaaagattttttttttttacatttttatggtgttctataaaataacaaggaaattacataaaaataagagaaaaataacatcaaaacaacaacaaaaaataacttacatatagcaaattaacaagagtacaatataaaaatatataatcaaaagactatattttctgtaaataagatcataaaaattgtaaaaaaatttaaaattctatttaattatatttttgtaatatttttattattttcgtgtatttgtgaaataatctctttattaaataaaaataaatatgtggaacctaatattaaaatatactaataaaaatttgtcactttttataatatttatcaccttagaatatccttaacatatcgatctagatgacattgacaaccttattgagttcttttttaattgaaatcatacgttttgactttactgatcccacgtcactaaatacacttttttgattatttttttataaaaaaaaaacaattacttcatatactattttttaacttttttttttcaaatttactttatatactattgtggacattgtccccatgaaataaatggttgagtattgagtcatatataagaacatgagctatttcactcatcaccaattggttttgagatggaaccccatgattctcaacattggtatcagagccatatcccttatgggcaaatgatcctatttgatccgcacctatacagatagtgactatgtccactctgatacgattcaaaatcggtgagcaaaaaatagccactatcttgagggagaatattgtggagccatatataagaacatgggctaggaaccccatgattctcaacactccggtagtttctatgtgggttgttatacggattttggttgcgattcgttagttattataggagtttctgtgtggaattctataaaaatatgaaaattattttaaagtataaaaataaaagaacccctaaaaaagtaataagtttttttttataaatgtatacttaaattattttctaaagactttctctatatatttaaatggtgaaagattttttccagctgcaacagatcgacgtgaaaatctaactacgtatagcaatcaaattattcatttaaatattaaatataaattaaaaaattggaccaaaaataataatatccaatccccactcatttgaattttgcttaattaatataaaaactatttatgtatttctcttattttaatttcgtatgatctatattataataatgaaaatgaagaactatagatctcctttctaaataattgatattgatatattataagaatcaattaaaacaaaatcgaatgatttttgacaaagacaccttatcaactcatcattcaaactagtttatttatacaaatacactaaatatatataaatatataaaagtaataatatgacaagaacaacacatctatatatatatgccaacttattattaaatatagaatatactataatttaatgcaaaatcgatctcacacaaaaccatatgacactaaaaaaataattttataactatatatattatatatataatcatgtcataatgccgacaatttctttcaaatttacttctaattaattaattttattttacaatataattattttcttttgtgccgacactttaattgaaattttaatgtgacataatacacatttgaaataaatactcttgctaatattattatatatataattcaaataaattgatcagattgacctgagtatatacttgagcctaaaagcaaacacacacacatacaccctctaatttttttaaaaaaaattatatgtatgtgtaaaaattagttaaataaataatttttatatttttacatcgtcccattaaattatatatacataaaattgatacacaactatatatataaaggtacgtaagtacacattattgattgcatgagattaaccttctgtcacagcctggtgcttagaaaataacatctcccatattttggattttttgatttagaagtgtgtatatataatatatattatggactgacatttatattataaatagtagtataattaacttagtttaatttttcctagagaatagtaattattatataaataagtagctagctaatagactgacaaaatagttggcaaaatgacacaaaaaatccattgataggcagaacatgaagatgtaaattggtaattataattaattgattaattaataattggttaaataaatttgaacatggccagctgcaactgattacattcataatggtttagaatatctgtgttctgtgccttctttttgatctattaattattccaaatcatcactacattttcttctattttcattaaaaaaaacttctttatctcaattgaagaattcaatcaaatatatatatatatatatagatatttatacatgtatgcatgttacagcatgtacattttcataataaaaataaatgtattgtataaagttgtcattatcaattagtaaaagtttattacaatatttcaatttattatatataaagtcaaagttatgggtttttttggggaagaaaatctccaatattcatttatttttattttttcttctttttcaatttccagttcaactaagccccccaaatcatatatatgcatgttattttgttaatatataaaatgataagagacgccagtaatacttaatactttttaatatatgaaatttatcttaaaatttaacgagtcatagaaaaaaataatattttttgatccttatttaaaaaaatcaataaaataaaatgtatatttaatttgatgagtaatactcatatatacttatatatatatatatatatatcaatatggtttgatgagtgaaagaataggggagagtaattaatttgctaattaagaatgggatcaattttgtcaaaccaacatgcaatatatatatatatatatatatatattaaagataaagaaaaaaaaacatgaaaagttacacttaatattaattaagatacttatgattgcccattgtttctg

SEQ ID NO: 20927 - DNA, 4056 bp, Cannabis sativa
  modified_base (3725)..(3732): a, c, t, g, unknown or other
ttattgctcctctgtaaaatgttcacaaagttaaacttcaacttaccatttctaacagaacctgttcccagctgcccatgcttgttccagccaaaggctagggactgtccatcgtcagtaactacaactgtgtgactcctccctgctgaagcttgaacgattttgtacctataatgcattaaacagaataagccaatgatacaaaacaaaaaagaaaacatctttgatacaccagagagttaaatgtgtatactcactttgatagttcagacaccacagttggtctatcacgctggatcttatcaccatggcccagttgccctttctgcaaaaaaccagttcccggagttcaataataacatcgaaaagaaatcataagaaaaatcgacaaacatgaacacccaaagactctagtcatgcctcattgcgtccccaagtatagcaacgcccttcaacatccaacgccacacaatgacaagatgctacattaacattatacaggacaaaacaatatcatcaaaaccaagcaaaatcacttcgtattgtctcataagtacccaaataaaaaaaaaatgaactttatttcaaaaaattatatcatcaaacttaaacaacaccaacccaaaacataccacaaccagaggcaacaaaacggatgttgacattgaggagaggtcgaagtcgagtaggagagaccaaattgccttcaacaggtccctttttccgaccaaccgtgtcccatgacgtaccgccgcagaataaaagctctccacccttctctgcctctttctcaaccttcttctccacttcgaccgttgacatttcaagtcaaacttagagggaaagccaaattagtaacaataaaaaaaaaacaaatccaacggttctcgaaggggaagatccaacggctacttttgtatttttgaaaatctactgaagacaacggcttgtgcgagtagatcgggaaatattaagatttgtgggggtagggaatgaaggaagataaggaatggaaaagctcaaaacccaaaccctaattgaaaatgagaagaaaggtagataaataaagggaaggaaaggatataatttttgggttttccgagaatagggattattaattatttgtaaggaaaataaaattaaaaactaaaaagcacaccataaataaattgcatagatacagaaaataaaatattttaaataaaaggaaaataggaataaagaaaaggcgggtgtttttatataaattaattaattattaattacttttggaatgaccactactactactgtctactaccgttgtctgcagaggaagcaatgttttgtcagtaattaattattaatattttataagaaaagagattgattggttgaagttgaagtggtcttcactgcttcttctcttccacttccaacttccaaccgtgtcgcaactctttttgttcctctcttttctaaatctacatgtaacggacttaaccaccaatcaaatcacttcaaattttcatctgtattttactattttctctcttcccaaaatatcctttatcctatattctatgtataaacaattaaagggatatcctcggctttttatcgaaaaaattccacgtgtattttatctaatttttaaaaatcacggtactactactcaaaattttatttttctaaacttgttagacaatttttaatgggagatttaaaaattatgttatatttagcataaaaagtaatttttttggtaaatttacacttaattttagcttcatgcttcaatgtacaattataaattttaatgtaaaacttaatatcaaattaatattttattaaaagaaaataaaatttactaactttataatcaattttattattattttaatatgtaagataataaaaaaataatataaatgtttcataatttaatgtgatagttaaatatactaataaaataataacaatgatataaatataaataaaaaaaatagtgcatttattgtgatataaattttacatcataacagatattgtgccaaatttgacacaaaatttgttatgtgccaaatttacatcactttttggcacaccataaaagcacactttttattaaatgagttatattttaacttttcaccacctatttacacctccattgaagatgctattacttactacttctgtcatactccaaattattctatttttttcacctaataattaatttaaaataaactctatttgtcatttctgaaaaaatgacttctttctatagtcaacactccttatgttatagaaagaagttccttttcagaaacgacaaatagtcaagactctttatgttcaaaatcacttgaggctagctcaagtggccatagagggtgcgtgtgtgttggaagtcttgggttcgagtcccaggtcaaattatgcatggttgtattatataaacgctcaaataataataaaaaaaagactcattatgttcaagagaataatatgacataaaacattgataggattattggaataagttgattttagaaatatcgaagtattttggagtacttgaagtttgccaaataccctaaaaatatagatttcttagtggctaaaaaatgataagataactattaataataaaatattatttatattatattattatatatataaacgtaagtttaatgttttgaatatatatatgtattattagttatatcagtaaacatataaataaagaatagtgaacgaacgtacgaaacatccttccttctctctcaacaaaatgttctctcatttttatctattttctttgattttcaacctgaaacttagcgatctaagctctggtaatagcgagatagcaaacccttgaagagagaaagcttaaggtatggttgaattacgttttaagctaaaaatgattagttttatataggggtttcgtgaattagaatagttatggagatctttggtagctatgggactagtacgatgtttacttgttgaatttgaggtgattttgagttagaaatcgagtttagaactttttaaagcttagtccgaacgttaatggtgtttttcatttaagggctcgattttaatttatgttatgcaaggatggtaatatttatggtatatatgcgcccagtaaagtttggagtgatttggataagttttggtagtgtttcaatgagtgcgaaaattaggattttcgagttttaccgtttttagaaattcctaggagatcaaaaatgttatttttgtcataagttttcacttatggtgtccgttttggacgttctatatactgatttgaagcttgcgacgagctctaaaatatggtacatgttttagagctaaatataagttttattttagtgtatttatatcgcagtatttggtaaaaaaatcctagattgtcttatgtgaatattaagcagtattttaagataaacacttattggtttaccgttgttgtgacataaggccgagatcatcggggatagttcttcacttgggttggccgacatgtatgaacctagattaaaggtaagaaaagtatattgtactgcgtagtacgttgtatggtaataaaattaatattgttatataatgaaaagattgattggttgagtatcgataatgtgatgatattatgcatgtgatatatgggttcacatgattaggtggtgcgattttcctagcgacgtactgggcataagtannnnnnnnagtgatatatgatgagtaccgaacgtaggtacgagctcgcttgtgcaccgttaatggccatgtgcaacatctacttcatggactctctagagaataactcctaattctcataagaggtgacaccacttctagtccatatatataggtagaatttagtatctcacaactctctttccattaaaaaatctttcggtttcaaccctccaaatttcatcactaggactcgttcatagatgggacaacttgaatactactcttttcattctattgacttgttattacctattgaacttaaagatcggaagagcggttcagcaggaatgc

SEQ ID NO: 20928 - DNA, 6624 bp, Cannabis sativa
taaagaacgaccagagaaagtatgcaaaaccatctagttggttagctagatattctaaagtagaattggagaaatcttgtacttctgggcatcttagctatttgaagcttccacaaaatagattggcacgttgcataagaatatgcatttgttattttacaaggagagtaaagcacaaaatttagccatgttatcctttcaacttcatgatccatcctgtaatcaatgtgttgcatctgaatgccaccttcttacatatttatggccaactgtaaatatatagctactagctaatttgattggcaagtcattagcatgtttagcgggttatagcatacaaagagtagttgactttgtttccataattaacccagcataaataagtaaaaaaggtatcttactctttgttctgctttcagtggcagttggagagtgcggtaagagcccgcatataacagcctcagcagtctgcctatacttcagaaggccaccagtgtttgaggcacctttggcaccaaagaagcttatcctagataacaaaacctgcaccaaattttgaatttgtttaaactggctccagaaaaaatccagcagacgtactttagataaattatgttatattatgttatgactattttaaattcggactccagtactaaatgccttctccataggcagaatttttaaataacatacacaaaacagcacaaggaccccttactcctgcggctcaattatatcaaaacgagttatgttattttgacattggcaagtaaagttttgacactggcaagtaaagtgttgctttgacactatcgctatttttacctggactcctgctagcttgttatcccaactaaaccaggtcggactaccaaaattagcaaattcttgcccattgtccccagtcacataatcaaggtatgaatggtccccagttgcatgaaagagccagcttgctgcccacaagagctcatctccatatcctgttgaattgtaatatgtctggacctctgggatgcttacactgtaagaacctctgtatttatcagcaaaagcaaacagttgcttggcatgcttaagaagattgctcgagtatgttgggttgcttttcttgaaaactagagatgctgaagccaaagctgctgcagtttcacctgcaacatctgagcctggactggttgaattaacctgtgtgagaggcctcttctcgaccatgtcttcaggcctttcccaacacttatgatctgcttcaggattacccacctacaccaaaattcaaattgcaacaatgaaaacaaattcaagaattgctcactattatcctcccccacgcaatatagaaccacttttttctactaaagaaaaataagaataagacaaaactagattaaaatttacagcaagaaattccagcacaggcaagctaatacaaacttggccgcaattaaatttcttaaagaaccaatgagactaagtaaagactagaaacctggacaatgaggacattatctgaaatgtgagcattaataaggtagtcagtgatccacttgagcgagtcttgagctggctccaactgatccactgcatccatttgatcaccatactcaagaatcgtccaagacaagacagtggcagtaaacgccattggaaaaccaaacttcatgtgatctccggcatcatacatcccttttgatagatccactttcgcttcatttccatcttttaaacctgaatcacccctccatgatatcttattgtctaccaactcgccagctgcacaatcaaattacagacagacaaaaaaaacactcagctcatgaacgaaataccatattctgaaacaatagcgttctatttaattacacaaactattttataatgccaaataaaaagttacaaaaaaaaaaaggaaaagaaagtacatttttgtatgtcaaagaattgcatagcgattttgagggcgtcggcatagtccttagaaatggcaccagggggtccaggaactggtgcaataccatcagagttgccagatttcttcttcatgattgtgaatacaatgccacccacaaccagagcaagaatcagaaaagcgagtaaccaaccgcaccatcccttcgaaccagatttttctcccatttttaagttttaacaaattaaatacgtgattgattgacaatctgaaagcataccaaaacaaaatatgtgattaattgatctgagtccaaaattatttttatttaataatttttcaaaaaataacaaattttatatcaatctaaatttttgttaatgccaaaaatgcattaaagtaattcaaattaatgcattagcaataactgaatataataaaggttattctaatttttttttaaatatctatgtactttcttcttgttttccttgtttcaaacatgctcctctttcttttttttcctttcctacaagcttgattctctcaaggaggagatggcagtcagattctcgtatcaagaacagtaagtatatacgtaccacttcatgaaagacatgatagtatggagagaacaaaggaaagagaaattataaacttacacgaaggagttaccaaagtggagccaagttatgttgatttataccgaagtgaggctaggtaatattggcatttcttgcactgaccgctgagaaaaaaacattaaaacatgaggtaagccgtaaacaatgaacttcaactaccatataggtaagttatatataatgtgcatccactccacattattgcatttcatatttcataatttgaagttgatgtcaatgtttctaaaagagtttcgcacagctcaacttaaacgaatgatcatcgtatgccttcaaaaggcaataccgagtatcatagttatacagaaacaacatgtaaacaaaatatatatgagcatcttataattgcgcctagttactttacttaaaattaaaaaccaaaataagcatatgatttatataaatcattaaaatggctcttgcctataattgcatgaacacaattacactaaaacaaaagcgaagcaaacaatagatagtctaattccttttaacaagctgtaatagtgtgatttaaagatcaccatggttaatctatcatatatgattattaggccagaaaactgagactctgcaaggaataaaataaaggcatgaagtcatctacagtaaaaagacaagaaaaaacatggacaggttcactataaagtgcaaagtgcagtgctgtatattgaagtatggtcgccaaagtacaaggctaagtgtttagaaaaccaaaaccaaacctttcactaaaatagaagaataggatttcactcaaggtgcttaacttttgattgtaaggaagaacactaacttttagtgtatgatcaaatatatgtttacgtgaccccagcagccaaagtggtcattagaaaaattcatgagatatgtgacctgaaacctggttggctactgtgagtatactgtatacattagacttgaggtttgtaattgactcttccttcaagctaagatgatctttgtgtacatgctcggctgaaatgctgggtaatgcaatgtgcttcagtgcttgatctccaagcatatgaattatgatatgcataagacactcctaattaaaattagccagtttgattcttaagtgatttaaagttgtaaaatgccagggtgatccatcactgtacttgattactaaactgcattactctaaacgttcttgtgatgtgtaaagatcaccaatatgtttcaaaagataaacacagatcttcttcgaaatcttatatcacaggatgaatatgtatcaatttgttaggaattgatcaatgctaaagaatataaaacttaatagactaagagctaacgaaaacagattaaaatgtctcacatgaatgagaaagagaaagacaaacggccaaattactagttactatgacgaagcagcagcattcaatatatcaaacaccaaaacaaaattccctaaacacacattctccaaagattagacaaaaattcacagttaaaccaaaattcagatcattaaaagaaaatggtaccttatggtgatgacaacgaacatgaaaggagatggagatctcggagttagagtccgtggactggggagttgggaatgtcggggagtcagccgagttagagcggtcgcagagagaaatggtgttatgaggtgagaatggtagtgtctttgaagaatggtggaaaggaaggaagggaaagagaggacagagaaggagaagatctacggtcactctcattcaacagctgtcggtggcgagttcaacggtcccattcaattaacttccatctaatcaacggcccaaatcagccctcaacacatacacacggttaattccagatctggttctttcatttacagcttgtgttactcattaacccactattattatttacacctaaaaattgactcactattaaataataataataataatattaagttattcaaaagttaaataaaataattaatttttacatacattttaattacaaaaatactttgtttaaattcccacatagctatttatagaactttataaaaattatgtattagtttaagaggattgctattaggtactagttgtgccaagtaccttctcgacatgtcacgttgcgattggctagcgatacttcctaaaaactattatattaaactatgtgggacctgatacttaattggaccaatagcgatactgacacataaaagagtgctaagcacctagtacccttaagcatttctgattaataatgttcttgtttgtttgtttttatgattatatgtcgtttttcatgacacagtcaaaatgtgtggctttaatgatatctttgaaatgaactcttacaattggattgcctgaacaacaaccaaagaatcagtctcaacatgaactgaatcccattgtttacgctttatccaactcaaagcctctttgactcccactacctctaccatagctgagtccactcgccccaccaacaaaacagtaaagccttcaacaagtcggccatatttttttgtcattagcaaagattgcgccatcgacatttaccttaatcgttcccataatcggttccacccaatgctccaagcccttatttgaatctgaaggaacaaataaataccccaatctcctttgttgagcattttttcattgattaaggactactcttgccaatggcagatgataaactgctcgcgcgtaaagtaggctattaactacttaatgtcaaagggatatacgagcgatggaaacccctaaaatactttatgcatgatcaaaatatgattgtttaaattgtgaataaatcgcaagcaaacaactacatatcaaagttcaaacataaaagtacgaagcattaaaggataaaaaaaataaagaaaaatcacagttggccatccaacttcgcaaatttttctttacaaaagtgccacaaggggcaaaccattgtctcggctctaaggtcatttccttacaaaaaaaaaaagataaataacaatcaagcctacattgtaggagacttggatgggtcttcctcttccactgcctcggcctcttcctcctcattcctgtccttttcacaataagccaaaatctcctcctcatcctcctccaagaagcttgtgtccatgttgggaatttccatcaaggctctataaacggtatgaaggtcgacctttttgcatcgctttgtggtttcggcctctttcccttcgagttcggcctctttcccttcgagttcggcctctttccctgcgagcaccttcttaagctcattgcattcatcagtcttggtctttgtggccttctcgagcttcttcaaggcttttcttcaacctctcggcttcttgtttgagacgggtgatttcctgctgagcattgttccattgtttaatcacggccttgcgttgggctagcgacttttggacctcgctctccaggtatttgagctgctccaggattcgccgatgggaggaaaaagagaggaaagaagtttggagaattacgagcaaagaaacagggagaaaaaagaaagaaaaaataatatagattaacacagcaaacttaccatgagggcataatgcaagttcctcgaaagcgtcttttctggattcccaatattgattagatcccaatcgtgggggagaagagccttgagttggcaccagcaggcaatcccaaacacctggcaaattccgaaccagccttccccaaagcggcatacaatgtttcaatggcctggctcgaggaagcagaggcatgagttgtatcaggaggaggtgctttagtgttgggatcaatcagaggaggagtctgttcgtgggtctcggtttcaaagacctcgaggtcgataggctcatacactttcttctttttatgggcagtggttttcttttgccttttagaaggctccacctcggtatctgtaggaacccctgagttggttccccgtttctttcctttctggtccataacatcctcaaaacacatgtctgcgaggcaaaataaagtgttaaaattatttaaagacaaatgaaagggaagcgtggagtgtaattttccacctaagaaa

SEQ ID NO: 20929 - DNA, 3994 bp, Cannabis sativa
atgtatagttggggtgtatcttagatctgtgttagatttgttatgtttttggttgaagatttcatctttctttggtttttgaaagagtactctttttgtttttgaaatgagttttttttacgcttgttgttgttttttccaataccaatagactatgtctaatcataatacttatatacaactcaataagaatgacatcatgtctcttttccttttcttggtagaagaaaaattttatgttatgatatattgttatatagcgactgataagaatgaagtgaatgcttattgcgccttgtgtttttaaaattgtgatttttaggcttgtttatgtgttcctagtttgtaattgctcttttgattggatcatgcatgatagattatttagacaaatattgataaatatattttagggagaagttaattttaggagtgtatctagtttgtaattgctcttttgattggatcatgcatgatagattattttgaaaaatattgatgaatatttttttatggagaagttaattttaggagtgtatctatgtactttatgtgtagaatagatacagtatttatgttcataggtgtgtttaatctacaaacatagtatatagcttttcaaaagttgcaatcttacggacaatcagataagtcactgaacaattagggctttgggtatttcaaatttcttttttcttttttaccagtagaggttttgcttgattaatacctacagtttgtttgatcaaaacatatttaaagtttaagcttgaaatgaaataggatctttaaatttatttttaagtttcacgttctgaaatcttttaagcatgctaaattcaccacgtttaccttctttttcctgctcaattggaaggaatatctactgtgatggctagaggagcaatccatcaattactaaggaggaaacttcattctcagtccactgtaagaatcttcacacctcttatttgtctttcgtttgcaacttttttgtaaattttctaggcagcagcctcgtcggttccctaagttgagcttgtattatattaatgttggatgttgtggatttatatactgtctttcaatcagttttatggctgtgtgaatcttttttttttaaaaattacttgtagcatttgaatgaagagtttttgtgcatgcatgccatcctgcatctgttttctattttatccgtgtgactatattaattgtagcatttgtttgaagagtttttgtgcatgcatgccatcctgcatctgttttctattttatcaagtgtgactattatttacagattttcatttcaccatgatcattttaattaaaattttgaaatgctaatttacagattcccccatctttgtcttcctttaattcaaagagagacgatactggttctgctgggattaagtctctaagagcccttgcacttctaggagctggagtctctggattattaagttttgcaactgttgcatctgctgatgaggctgaacatggattagaatgtccaagctatccctggccccacaagggaattctaagttcatatgatcatggatcgtgagttctaatctactctgtgtagtgtgtgtaatgtgtatgctactagattgtgtaatatttgaaggctgtggtcatcatttggatagcttttaattctgatatctattgtttctttgtccttatggttcaatcctaatgattgaaatcttgaatagttttctcctcaaaatggtgggattaattagacagttcaagatcactaggcatgaataagttaattaagctgttttatggaaaattgttgcaatgtattaggaggcttatgaaatttgcaactgaaatgccaattttgttatcctctcttacttgtacttgggcaggattcgtcgtggtcatcaggtttaccaacaagtttgtgcatcatgccactccatgtctttaatatcataccgtgatttggtgggtgttgcatacacagaagaggaaacaaaggctatggcagctgagattgaggtggttgatgggcccaatgatgagggtgagatgttcacgcgcccgggaaaactgagtgatcggtttccccagccatattcaaatgagcaagcagctagatttgcaaatggaggggcatatcctccagatctaagtctcattaccaaagtaaatattttcttgtgctaatgatttctcaattctctatccttttgtctatgtacttctataatattttctcaactttacatttcaggctcgccacaatggtcagaattatgtgtttgcccttttaaccggataccgtgatcctcctgctggtgtttcggtactttttcttcttactctctttcctatgtaatgtgctagctactttagttgaaagataaggagaatcctaagtgaatttttatgtggagagaacaaaacaataactgaagaagaagtattttatttatttatttttggagttgggtacgtatattttttgaagtcttgatagtatgttccttacagagtattcgtccattcatgtcaattataaatgctggcatttgtttgggaataaacttctcttctgtgttttcctaattttattaaccctttcattttgatggagtacatctctctttcaattttataggttgtacttgtggacttaactctaactgtttttaactaaacatatttataatgatatttcagatccgtgatggtttgcactacaacccttacttccctggtggagcaattgctatgcctaagatgcttaatgatggtgctgtagagtacgaagacggtactcctgctacagaggcccaggtatggttctcttcttcacgtgacaggcgcatgctcaactatgcttgttcaccttaataattcgttttgagaggctcatagctgaagctgttttgtcatgttgcagatgggtaaagatgtcacaacattcttgtcctgggctgcagaaccagaaatggaagaaaggaaactggttggtttacgagtagccacctctcttgtcatgatttagttctccagaccatacgctaacccattttttccctttcaatgtcttaaaatgtcagatgggattcaaatggatatttgtgctctcactggctctactccaagctgcatactaccggcggttgaagtggagtactctcaagtctcgcaagctggttcttgatgtcatcaactagattcctttttaatttcatttagaattatgcttgtggttggagggtctctaagttggaaatatttttttttaatgatcttggttttcttcccatgcatgctcctattgagttgacaacatcagttattggtaatgtagtgacctgaggaatgtcacttgcagagacactgaaaataagctgctccatacatctgataaaatatttttgcctttttgacataaaaagctttgttaaattcttctttatggacttgtggagggatgttgctttttcaatattcatttaatgctttggatcatatatttgcaaattaatggtcaaatattataataaagaatggcaacttttttaatctcggcctctttttatttttattttggtgacattgcctttttttttattattatttatttatataatcaaacattttattttgctttctgtcaaatattagtgtgttctaaatgatatatattccattttccttggtaatgtaaaatgtaaagtgagaaaaatgaaataaaatggaaatgaccaaatggggcttacctgttaagctttgtgatagcttgtgcctgtaaattttcatgcatgttcaaaaagagcattttataagaattccttactgaatgtgagataataattattgtttggtgaaaactgtttgggacaatttggacatccttggacttgtgtttggaaaaattatttcatatttagcaaataattttgaaatttttacaccaaaaatacaaaatgccaactttattacacatatactacttgca

SEQ ID NO: 20930 - DNA, 5516 bp, Cannabis sativa
aggcgatgtaggattgcacaacttacccggtattttcccttacggatcacaagactactgactgttacattaccgattctttgacaatgatcacaacttttcacaaaggcattagcatctttatataaagtaggccaataaaacccacattgaagcacttttgtcgttgtccttgtttctccaaaatgaccaccacaatagagagtatgacaatgagtaagaatggaattcatatcttcttctggtacacacttatgtatcacttgatcaatgcaatgacgaaaaagaattgggtcatcccaatagtagtgcttgacatctaaataaaacttcttgaattgttgtcttgacatatctaggggtacaacattggccaccaaataattaacatagtctacaaaccatggtactgagtctttctcattcattacaaaaagttgttcatctagaaaatatcatttattttcactcctttatctctagattgctccttgatttttaatttggacagatgatccactactaaattttcagtcccctttttatcctgaattttcatgtcaaattcttataaaagtttaacctaacgaataaggtgaggctttgcatccttctttgtcatgagatacttttatagtggagtgatcagtatggactatcatcgtgttcccaatgagataaggttaaaacttgtcaaaggcatagataatggcaagcaactccttctctgttgttgtataattaagctaagtatcatgcaaagtatgactagcatagtaaataatacgaaacaccttgtcaactcgctgcccatgtactgctcctcccgcgtaatcacttgcatcacacattaatttaaaggggacatcccaatttggtgctacaataataggagctgaaattaagttctctttcaaggtgataaatgccttatgacactcttcattaaaatcaaaaggaaccccattcatcaataaattagacaaacgcttcgaaatcttggaaaagtctttgataaatcttctataaaaccctgcatgactaagaaagctttgaatacccttgactgaatccggaggtggtagattcttaattatttttattttttctcggttaaccttgatacctttgcttaaaatcttgtgacccaaaataattccttcattaaccatgaagtggcacttttcccaattaagaaccaaattaggtttttcacaacatttcaaaactatctccagattcaccaaacacaaattgaatgattctctaaatactaaaaaaattatccatgaagatctcaatacgtctctccaccatatcctaaaaaagagacatcatacgacgttaaaatgtggctggagcattacataacctaaaaggcattctacgaaaagcgaaagtaccataggggcacgtgaaagctatcttctcttgatcttcaggagcaatttcaatttgatgatagttggagtatccattaaaaaaaataataggaatggccagcaagtctacccaacatatagtccacaaaaggcaatggaaagtgatcttttcgtgttattttgataagctttcgataatctatacaaattctccatcccgtaacaatatgcattagaatgagttcattgttgttgttatttactaccatcatgccacttttttttggcaccacttggactgaactaaccaaagcactgtctgaaataagataaatcacaccgacatctaactaattcaacacttggttttgaaccacttccttcatagctgggttgggtcttctttgtgcatctacagtaggcctactgttgtcttccataagaatacgatgcatcatagtggagggactaatccctttaatgttagctacagtccacctaatagcccttttacgagatcgaagcactctcaatgtgtttcttcttcaatttttgacaatgatgctgaaataattactggtaaagtctccttttctcccaaataagcatagtgtaaatgattcggtaatgaatttagttctaggataggtggcttctctattaatggaagtggtctctcgggcccttgtcataattcttcatacttctttttataaatttgttcagttgaattgagccaattaacatactttatggcttcagtaccatcataatttttaagatttcatgaagtcaaaatcacttccaatgggtcttcaacaaaacttcccattgaaagctcttctttaagaacattgatgctaaaacaacaatcacctgcagtaggatactttaatactttgaacacattaaacacaacctcatcatcttggacccacaaccttaattcacctttttgaacatcaatcaagggttttcccgtggataagaatggtctccctaatataataggaacatcttcatcttcctccatgtctaacacaataaaatctgtcagaaagataaatttctccactttaacaagaacatcttcaattatcctgtagggtgtgttaccgaacgatcagtaagttaaagagtgactatagttggttttgcttctcccaatccaagtctttggtaaaccaaaagtggtattaaatttatacttgcacctaagtcacataaggcacgatcacattggaaattttctatagtgcaagggattgtaaagctatctagatctctaaacttgtggaagcttccactgtataatagcagtacactcttctgtcaaagccacaaattcatagtcttccatccttctcttcttggacaatataccttttttaaaatttacataactagccctttttttcagtgctttgaaaaaatgtatattgatatgaagtttcttaaacacctcaagaaatttggaaaactacttatcgaggttagccttgcaaaacctttgggggtgaggaatctttggtgtaggttcttcatacttgggcttttccttctttggaaggtcttcagtaacatcctcttttgctgaactagtagcctgttgatcatttatcttctttcccttgtctttcattgtaggcccttcataattggttccactcctcaatgtaattgattgacattgatctttggggtttaccactattgaactaggtaaagacccttgattttgatctgacaaaaattttgcaatttgacccatttgaacctctaagttatgaattgatgatcttgtttcactcatgaattgattaattatgtcagttgatggttattttggcacttgaggaggtggtggatgttttggtatttgtgggtcatattaatgtctaggattaaggccataggttggtttatgtggtgggtaaagaggtagattttgtgggtatatttgttaccctcgattattactccatgatagatttgggtgatttctctaggcaggaataagtggttgagtatatatttttattcgtttgtctttgataattgctaattacttggacctgctctaaaagaacatcatcaactgaataattattactcacaatagtacattgtgcataagggtgaggaccaccacacatctcacacatggttgtagcttgtaatttcattgcttgtgttgccattgagttttgttgtttcatctgcttaatcaacaaagaaatttaggcagtaagcatggtaataggatcatttttagaacacttgacactttcttattttctcattcagatgtggccatctcttctaacaattcatgggcttcatttacacttttactcataaatgtacctctagcggctgtatcaattattattcttgtattaccacatagaccattgtaaaaattatgcactaacttcaatttttcaatgccatgatgaggatactttctgagtagttctttgaatctttcccaagcatcatatagttattctccatccaattgacataaattattgatcttttctcttaaacatgcagccttagatggaaggaagaattcggcaagaaacttttgggctagttcctcccaagtagatattgagttggcttgtagtgagataaactgactcttcgctctttcgcgcagtgagaatggaaaaagctttagacgaatcgcatcattacttactttgttcattctgaatgtggcacattactccagaaaattagtgatgtgcatatttggatcttcattagacaaccccccaaattgaatataattttgcatcatctgaattatagtgggcttgatttcaaagttattcacctctacagtaggtggacaaatacatgaatgaacccttgtgacagccgggagaacataatctctcaaaggaatattagcttgagctgcatttttagcattggcggcattggctaaattaggtggatcaaccacattattattgttattatgaaggccatcacctccatgattagccattctctctaactatttttatttttgattttgccaacaagttttctcaatttcaggatcagcatgcactagtggctccaaaccttgtcgtcgcataaactttttattaatcctaaaaattaataaaataagaagcaaaccaaattagaatgtgttagaataaaccaaagtagaacaaaaaataattaattttgatattggtaatttagtccctggcaacgacgctaaaaacatgatagagaaaatttataacacaagtatacgtctcgtttcaagtaataatagtgcataagcacgagtatcgtcccacgaagactattacaaagtaccaataattatttttctactttctatttggtaaataaaaattgaggaaatattattaaatttaggaaaataatttaactataaaattaaagtaaacaaacaatgattatgaatatcaataaatagacttagggtattagttttatcaacttgtcaatttgttctacaatttcttctttcaattttaatagcaggttaactaaaacgaatcttattctttttcaagatataagacctcaatctatatgaaaattttgtatgtatttgtgataaatttcgacatataaaaggcattaagaatgaaaattttatttgctacacaagtcatacggttactctcgtccaatatataacctatgtttatataactataacatattgaactctcatctttcgaatctcgaattgaaatcataaaaatatacaaatagtgatcaagtattcacaagcattaaacataaattatatagattaaaataaagaggaagaaatcgataaaacatcatagaaaagtaaaatagaaattaaagtgactctattaacccctagataagaaaatcagtgcatgaaaatcatgttcatcacaattacattcataataaaaaataagaacataaataaaagtaaagaaagagaagaagaagatgatgatgaaaaatactaagtagttgttaattaagagttttaatgagtttttttagctctgaaaacgtactaaaaatactaataatagtgtgtttatataggctaacagagttacctaaaagatactaaaaagatttaaa

SEQ ID NO: 20931 - DNA, 4253 bp, Cannabis sativa
aaaatttgggttaacaaaaatataaatgcaatccgtccaattaagaaaaaagaaattagtagcctgcccaataaaattggtcaatttaatcaggttaacccgcctaaatccacaactaatattttaaaataatatgagagatgatataccttaacttcaagaagcaaacctgtatcacactattcttatttaaacctaattgatgaaaataaaatatacgattaacctataaataatattatataatatatttatatttataaaagctgctctcttttaatttatgtcgatcagtgtaattgtatgagagagtaggtgaaacgatcggttggtattcggttaactacgtggttggaattggatgaagccctttaaatttaacaatttatatccactccgatttaatgatcggaagaaatcttgagtactttcaagaaattgactaattaaatttaataaacgtccttaatctttgtcaaaccaacaaagtatgatatataccacaatgtgaactagtgattgtgaagtctaacagtggaaagagtatgaaaggtcataattataaatttcaaaaggaatattatatttatgacgttaatatggatctgttctactgtttagtaaaatcaaattgtattcactataacacctagcagaagccaaatataaacctctataatttgaaatagtatttgtttaatacgacgttaatatggatctgttctactgttaagtttggcctaatgaatgtagatgcatattacaagcaaacttaacagtagaaataaagttaatgactaagctacaaatatagtaatttacatatttttaccataaatattataaattaaagagcattattattggttatcaggttatcagtggtgcccaatatttttttataagtgctcatgattagttcgcaatattttcaaaaaattattttcttataagacccaatatttaattatactaataatagtatgagaataagaagaatgctactaacaccttttaacaattctatgtgaagcttatggagattattgcccattaattaatatttctttaaagggcatttatgggagaaattcaagccactagtgtatttatttacttcttctacctaacactttgggctagactggaggatagggttattaagtttggtcagtataccaactaaatgaaagagctacccccaaaaggttattacaagagacccacttaaataagaccgcccacactcttttttatcttctctcagtagtagttgctctctcttgttccgtttttttttttcaatattttcaatactctgagatttgtagaacaatcctcacaacaccacctctctaataattaaataaattatatatatcagtaagaaatctctttaccattctacttttgttttgtgtagcatttacaattttgtaacaaatatttgcgaacattcttattgtcatcattaaattgtattttttatccttctcaattatggatgtagtggcaaataacatggtgatggttcatgaaatcccttttcctaccgagatcaaaaccactaagccattatctctattgggttatggtgagatatatatatatatatatatacacaatattttatatacaatacaattcttgggcattatttattactaatgaaattaatgttgactatataaataatttacaggtatcacagatatggaaatacactttcttcaaatcaagttcacagcaattggagtgtacttagaccccgatgttgtgaaacatgtacaacaatggaaaggaaaaaaggggaatgaacttgctgaagacgatgacttctttgatgctcttatctcaggtgattaattaattattagtactaaaacttagtatataaccaaaagaaaattaggagtaaaaaaaataattataactgatctgtgctgacttttgtttcatatataaataaagctcctgtggagaaatacctaaggattgtagtgatcaaggagatcaaagggtcccaatacggagttcagctagagagttcagtgagggatcggttggctgcagatgacaagtatgaagaagaagaagaagctgccttggagaaaatagttgagttttttcagtccaaatatttcaagaaagacactcttattacattccatttcccagctacttctcccactgctgaggtaatatataataaataaaatatatatatatttatatatgtgtgtgtgacatgtggtagcttattagaaatataggaggattatcattatgctatgtatgtataactacttaattacatgttgggtttatatatatgaatgactatcagattgtggtgacgatcgaagggaaagaagagttcaagctagacgtggagaatgaaaatgtggtagagatgatcaaaaaatggtatcttggagggaccacaggagcttctccatctaccatttcttccttagctgataacctctctgctcaattatctaaataaatgtgctttttctttattacccgtggaaaacgggacacgtagtcactgtatcttgcatttggttattatgataaaatttaaaagaaaatttttttttttcatttttatagaatttcactatgaaacccacgtagcaattaacggagcagattaaatcgcacctaaaattcatatagaaactatcgaagtaacccaaccgtaaatttaaaaaaaaatagttaaaaatagtatataggataatttcccttattaataaaacttaatagggaaaaaaacaagaaatacaaaaaaggaaaaaaaaatacagaagtacagtgggtcgaccattttaacatttatacagcctacaaacaaataattacaaaagtaccacctcctctaaaccttcagccgcacgaaatagaacgatcaccaacaaaaagcttcgatcgttcagaccgacaacacaaccgaaatgaaaccaaatcaggaggaagaccaccattaattccggcgaatttactagaaaagaggacatgaaacaatggaaactgaaattgacaaaaataagagcatacaaattgggtcgaaactgaaattaaacactgtatttcaattttattctatcaaaacaactcctcctaactttgaaattcagattcatataatatagatctctaagaaacagatctggaactccccatcaatcgaaatcaggtacactgcaaatacaagaaaaaaaatcatgaataatagatctaaggtgtatccagttgcattgtcgtcgatttcagatttctaatattgaatatattaatttataaataaaaaaagaaaagaaaatttgaatgaatctacaaccacgtatgtagaagtatgtttcgagtttttttaggttgctttatagttgcattaacatttcataatagtgttcattaataatgcaggtattttatttgacagcgaagaaagagaattcacttcaaaaacacttctacaacatgattagttttatgaaattagttgcatgttagttttatcatagtttgaaaatagttttgatacaaataaaaataatgtaaaatatagggttcagaattgacaatacatgacttgaactaacaaatagatctggagctccccatcaatccaaactaggtataatgcaaaatacaagagaaaaaaagcatgaaaaatcaatactacaaacaaaggcctttaatcccgattttgaaaactttttatcccggttttcgctaaaataaaaactgaaatatatgccagtgggataaaaagtctttaaaaaatcgggataaaaaggagactttttatcatggttattacataaaaactgggacaaaaagagacttttaatcccggttattacataaaaactggaataaaaagtccttttttatcccgatttttatgaaataatcgggattaaaagccacaattataataaaaaaactaaaaccccgaaaagaattatattagttccttgaaaaaatgttaacaatcaatccttttttatctcgaattaaaagccaaaattataataaaaaaaataaaaccaaaaacaaaattatattagttccttgaaacagtttttacaatcagatgccaaaaatttatatcataatgtgcaaatcaatacatcatcaagggttcacaaactaaaaaaaaacccatcaaggtgttggaatatattttacgaggatctagatttactaacaagtatgttttttaacatcctaaacatgaa

SEQ ID NO: 20932 - DNA, 3056 bp, Cannabis sativa
aacattgctacagcattgctgctgttagttccattgccttttggctattggttctcattgttcaaacttgattgcaaggtgatcatcgatcacaacaaaggtgatgataatggagagagagcaatagagaaggactgttgattgtcaaaggattatttccaaagaaagaatataagggaaatcaaaatcattctaattgatacaatgaaaccagtcaaactctaattcaaagggttcaactgggggatccaattcaagaggaacagttggtaaacattgctactattgtaaaaagaaaggacattttagagatgaatgtctaacattgaaggaaaaattgaagagagacagccaacaaacaaggaacaagaacattggagaagttgatattgttgatggttgtgaactacaatgtacttgttgcatcaattgtcgattcgggtggagaatgggttcttgacttaggttgctcatttcacatgatactaaacaagaatttgttcaatacattttcaaaagaacataatggaacagtgcttcttagcagcaataaggcttgtgaaatcaagggaattggcactgtaataaccaaggctcatgatgggaacatacagaccttgcagcaagtcacgtatgtccctaaaattaagaggaatttactatgtgtcggaatgtttgacaaagttggttattcagtcaagataggagatgagttatgagaattgcttatggatctcaagatctcatcgaagtcaattgaatgatggtctttacatcttggatggtgacattgttatttaaagtgttgcaccaatagtacacaactcagaaaatagtaagattagactatggcatctcagactacaacatgtaagtcaaagaggccttgaagaattagataggcaaggattatttaaagaagaagaaattgaaaaaaaaaaaaaaacttgagttctgtggtaagtgtgtgaatgggaaggcttagagggtgaaattcaataaaggagaatacactaccacatagagacttgcctatgtacactctgctctttaaggaccatccttaattctaaccacatgaggagcatactattttatgagcattatagatgactttagcatgaaagtgtgggttttcttattgaagaacaagaatcatgccttggacactttcattaaatagagaaatgttctagaaaaccaaattggtaacaagctcaaagttctcaggacagataatggcttagagtattgctcaaataaattcaaaggattctgtgcaaaggagagggaattttgaagcataagacaatggttgatacaccatagaaaaatcaacacatatataatatatataggcatctatataggtatatatatatatatatataagtatagacatcatatattgtataaatattaattcataacaaaataaataaataaaaaatggctagctcaattgtgtttcagtcagatgagtatatatatgcatatatatatttagcgtatcatgactttgaaataattcgagatcagatataacaaacatgcactattataccttggttagaggctcgtgctgataacgtattataaaatattataatttagataaagaaaaaagaaaagagataagaattttcttagtatcttattctaatagtgatctcctatttatatatatatgagagtcaaatattaagaaattaataaaaaaagaatattaattacaattaataataataaataaaaaatttaaatatccatatatttattaatatttataacaaaaatgatataaataaatatatttttttttttggctaaaatatagaaaatggtatattttatataaaagagagtattgctattgggtactaatggtgtccaatactttctataagtggcgtcctacgattggttagtgatattttttaaaaactattttcttaagttatatgatgagaaatgttaaagggcactagtggtgcctagcaccctcctatgtgtcaatatcgctattggtccaactaactctcgagtcccatatactttaatataatagtttttagggaatatcgctagctaatcgcaacgcgatatgtcgagaaggtgctagaggtgcctaatagcaatgctcgttatatgatacccaatatttaatttcactaataacagtataatattgactattaaacaaatgctctcaaacatatagtagtcttcttatcttgtatatatatatatatatattgagcattgctattggataccaatggtgtctagtacttatagacatgtcgtcttacgattgactagcgatacttcctaaaagttattacattaaactatatgaaattcgatacttaattagactaatagcaataatgatacatataaaaatgctaggcatcactaataccttttaacatttctcatataaattaaactaattaaataagaattactaaaagacactagtggtgcttactgcttagcaccctcttatatgtcattatcgttattagtccaattaagtattaggtcccatatagtttaatataataatttttaaggagtatcgctagccaatcgcaagacgacatatctagaggtgctaaacaccactagtgtccaatagcaatactcctaattaaaatatatgtttgagagcatattccctagcgatattctctaaaagctattatattaaattatgtgggactcgatacttagttgaaccaatagcgatattgacatataagagggtgctagacaccactgtgccctttaccagttaaaatatagtactagactaacaattgggaccacagcttaagcggcagttaatttctcgagagttatgattacattgattaattcgtattattaacattaattaatgttttagtgggatcaatattttgatgacaattattagagattcatgatcactttgtccggagataataatcatgagtaattttaattttaatatcttttcattaataaacagaatatataatttgtagaagaagttttttttttttttt

SEQ ID NO: 20933 - DNA, 3467 bp, Cannabis sativa
gtttcaaaaaaaaaaaaaattgtaagacgctacctattgtgacactgttagttccttcatgtctcagttagagttaggattgttcagtaagttagttatgttaactaactcctaactagtcctaagatctatataagtacctaatcaactactgcataatgttgttgtaataagaacacacactctcatatatatatatataatactaaattcttttactgtaattaatatattgaacttggtgttcaaatcggcctatgtccatgtgagctgatcatgagtgtttgagtgagatcaatgcaagacttttgcgttaagcattatttatagcaatgctgaattttatgatacaatttttataatacgattttatgatgttctctttcttgttatggctcttgtgactgtataatattgtatgtggtttaatgctgagaaagatgtaaattacattgtcaagagtactactgcaatatattttcttaattaagattcattttttttggtcagaatatttgaccaaatttcctcccaaattatatataatattgttttgcttattagtgtgtggttcttctagggagtaatatgccaaggaatatttacactattgctctttcttttcttctttggttgagtatgccttggtactgaattgggctcttatcatagttaaaaaaaaaatagttgatgtgaacttcatacaactcttttttgtattcataatgagtggaaataaaatattagtgacaacaaaaaattgtgaattaagaagtatcaatgataaattttttgttgtgatctaagaaatattagtgagaatttttttgtttgtgaaaaaaaaagtattagtgatcacaatataaattgtgactatataaaagataagagagttgtggcaaaagaagtttgttgtcactaaaaaggtggctgtaactaatagtgatatcataacaactattagtcacgaaaattagttagattagttgtgattaaaattgattacttttagtaataatattatttttattgtgatgttggtttgtcctgtaaggctactaactgtttagagagattgctttgggttggttaaggcttatgcagtatggtgttgatggcctttctaactagttgtggctgaagctcttgcggtttaccgaaacttgtttttctgcattcagttggggtatgagaaggtgattgtggaatcagattgccttacttactgttattgttgccatcaataagcatattattgatcattcatgttgtattattagagatattattattgttgtaataaatttgttgttaattatttcttctattcatgtttttagacttgtaaatagtgtggcgcaagctcttgctcagttttcttttttgtaggaggttaatatgtttggtggcctagtatacattatttaatcaattagctgctaaagcaccctaattttaagtttgtaacaattaaccacaaaaactaaaattttggaagagaaccttggttctgttttgctttgtaccctttcgtccaaaaatcacaattaagtgccacggtggactgtccaccattacacatttgtacacgtgacaaatttttagtggtccacgtaatattaattttaaaatattataaaaaataacttgaaaatatacaaaattaaataataatattataaattaatttaaaattaaaaataaatcattttatagaataaaaaaattaagatttttcttcttttttttttcccaattattcttcttcttcttctttttcattcattctatcaacaccaccgccagcatcgaatcatcactgcaataccatcaccaccacgcaaacaccaccattacatttatcagatcctaatcaacctaaaaaatataaaacaacaataaaatgcaaaagcaaatctcagatccaaaataaaaccaaacaaaataccaaaatgagaatatcaataagcgaaaaaaataaaaataaagatgaaataaaaaacatatttcagatgtttgatctcattattagtgatagtgtggatctgagatttgagagctacgaacctttaatggtagcgttgatggctatggaagctttcaaagatgatggacttgggctggggtgaaaacagaatcgaacagagttgtgacaaaggaggggcgattgaacgaaaaaaatggggaaggttagatggcgactggagctccgagatggtgattggagatgatggacgtggtttgcaacctctgcagggttcctcgatgacgacgttgaagagacttttgggttgagaaaaactgagagtgagagagatattggggagagatggcggctcagggttttgagtttcaagaccaagggatgtaattctgtgatccgtttggaccgttggtggtcgaaggcggcctaaacgggttgagcagagggttgtgcaggtgaagacaagtatcgtggaggagcaaggggctggggctggggctggggctggggctggggaaggtgaaggctatttgggggggtggggtgttctgtcgagaagaagaagaagaagaagaaaaagggttaaagggagttctgtcgagaagaaagagaaagagaaagaaaaagaaaaagaaaaagagaaaaaaaaaagatttttttttttaattttcaaattatttttagtatatttaaaattaaaattacggaccactaaaattttgccacgtgtactcttgtatacacgtaggcagtccagcgtggtacttaactgtgttttttagacgaaggggtacagagcaaaacgaaaccaggttcagagagttatgctgccaaaatttcaatttttgtcgttaactgttacaaacctaaaaattaaggtggtttagcgccaatatttctttaattaatgttatctcctaatactctttttcctcttaagatttctcttattgagtttattctggaagttataatgaggctatttcttcttttttttttaataaataaaaaaaattattgtgactaatttttactgtcatgacaatctagtcacaaaataattttgtgactaaaacttttggtaatgatatttctcacttagacttagatatgagtaggttcaaaccaaaagattctaattttaaaaattactaaatattccaaaaataatttgtttattaatgcttaatatcatatatattttttcaataacaatctcacccaatcatgatcagataattaatttcaaacacattttgtctctcacaaatttatttattttattataacttgtgccaatactagtaagaaaaacccacaaaattaatatatatagttcatatagatataggtattgtttattatatatttatgggggagagatgatggagttgcttgtcaatctcatctttgaaatgaaatgttgttggaaatctggagtgacatttaatgacacttctaacacctcacatgatagtgcttc

SEQ ID NO: 20934 - DNA, 2753 bp, Cannabis sativa
tatcttgtttggcaaaatagttagtaattacatgggaaaataatattttagtgactaatatttaatatggaaagtttttagtacttacacagtgtaattacattcaattctcatgggggcatgagaatcggagagtgtaattgaaacccctcaattacttccaattacatatagtataattacatgatcatacaaatatgtcaaattgtataattacctctaattacacacaaatctaattgtgatttcccaaacgtaacctaaagaaaaccaaatcttattgagtgaaagatgggaggaaataaatatttatgaggtttttttttgttttttttttactggtgttaccatgcaaccaatctattctataatgaaaaaaaagtaataaaagatgctgtgagagctcactaaacaattttcctataaatatatatatgcatacaaattgggatatgtattactaggcaaatgcaaatgcaaaatgcaataataattatgcaaagactacggttttcttgaacttgaaatgcacttaaaggcaggcaagcataggatctctaaataaatcccctaaagatggcctaaaccttagcaacttctttaattctcattcaaagtaaagtcatatggcatgtgattttaagctaagcccagcacaaaacccaacaactcccttcattttaattatatatccctccatttcaaaaatatatatatctctttccttttcttgtcttctctcttcatctaattaattccccatgtgtaaacatgcgataattttgcagctattaaataattatatactgtctacatgatttatcatatatatatataaattatttccattacaagtactcttaaatctctactttacttacgggggggttttattataattatcaaattagattgtattaatagttaattttgtgttcatcttaatttaattatcaggcagtactattacacaaatatttagtaaaaaaatttactatcaaaaaacttaattatgcatgtattacctttaaaaaaaattgtaactaatagtattagtgagacgctacaaaaaattatattttgtttgcacatttagaaaggacctctttttatttgaccagatatattattagtattagtaacagtaaactaaaactatagcagtgataaaattaaaatatgttacttattatatttttttttttatcaaaactcaaagtaattactttttatttagtaaatttttgttgttgtaattagagatgaactttactcaaaaaggattatgtttttaaaaaaatttatactaaatgataacctttttttgttgtgatctttacacgttacattcggataatattatttttattttaaaaaaattaaaaaaactgacgtgaaagagtattctgtacggccaacaatcttttaattttgatttggttttaacattattattgtaatgttagtttagtttagtgacaactttcatttttaccctaaacttttaaaggaaaagtagaagattggattacctagaaaagaaaaagaagcttataaatacattcagttaatacatattttgcatttatgttattatattattatattatatggtccggacccaattatgaacattcccacaattgaggcttgacattaggtactgtggttagtttttgtaagcaaccaaatccctgcaaatctccatccccaagacgtattgtaatatgccattttttgtgccaatcactcataaacccaagaaatgtgtttttcgttttatataataaaatttttagtttaaatgtatttttaaaattttttatattaactttaatataatatactattatttaacaggatatttaagtaaataatatttttgctctcttaattttaccctttaaaatacatggattgttaaaaattctctatcaaatataatatttacgtaattatgtccattctgttaggttctgtttcttttatcgttaaaagttagcatttttactacctgaactttgaccaatacaaaatttttctcatttttattaaaaaaattaattttaaaaattataatattctattatttttaaaaaactttaaattgttcaaaaaaaaaaaaaatcctataacattaagtttacttaaaaaatatctaaattatttcaaaaaaaaatattttcaaactttatattatttatgaactcgtatcttaaaaaatcaaactaaaattattaaaaaattaataaataatttaatcaaagtaagattttttgaactaaattttaaactaaaaaaatgttatgtttacttaaacaaatctaaatgtttagagaaaaatagactcaaacgtattcatgttaaatttagtttttacaaaaattaattttttaatatatatattttaatctaaatggattttttaacaaaacataaataatttttttaaatcgcttaattagttcaaaaaatttaatttgttttttaattttctcaatcattcaaaatggtctttcttaatatctaaattaatttttttaagatttactagaaaaaattaatctttctcacatttattctgaggggatagttgttaaagtttaggggacaaagttactaatttacaaagacacgtcaacaaataaaaaaaataatgagacggaacctaacagaatgtctaaatttttataaatgtaaaagttcaacgggaattcttaataagccttatattttagggggcataatcaata

SEQ ID NO: 20935 - DNA, 5176 bp, Cannabis sativa
agccaacctaaagaatattttctgattgtttatggtgaagggggtagttccgctttttagaatttcttagatatttggcacccatgggttgagggataaaggtgtcttttaggcgtatcaattgataagttcaagggtatgtcgcctaacaggccctgtagaggtccaatgagttctccaatgtgtccccacccatgtcgtcttctaagtctcggttaccttcttctacagaaatatactttttcattctttcatataagtcatcaagattgttcaactcatctttcagcatgtttccccatattttgctcttggggcgtattcctacaactatggccatcttgagttcatcttttgattccttctctatttttgtaacttcagcgttgaagcgtcgaatgtagtttctcaaacattcttattctccttgcctcacattggtgatgcttatgatgggcatgatgtcatcacatgcagcttgatgttgttggaggaaatcttttgagaattgcttccaaggtgtgattgttcctagttctggttgattaaaatacttgtacatagttccttttgacgtgaccatgaagcattggcatctagctttgttagagactttttcatcctcatcagttcattaaaaatgttgagatggtacttcatgtcagtagtaccatcatatggtgtcatttgtggctctttgaagttaggtggaagtagttccacttgaatctcccttgagaaatgagattcttcatcaacttcctcatcatcattcaagcttcctcttgaggcgactgctattcttcagcataggtctggcatttccactttcagctccttcgttttttccctcattctccctcgaagattagtaggtggaactttgaacctcttcattgtttgcatgggaggtgcttgaggtagctctctcatttcgtctgtctttgatttctcaatatagtttaggaataccaccttacatttgctttcctcttagaaggaagccataagtgaggtttcacctagcgtgaaactttttagatgaagtttcttctcaactttatggtgtgtttccctcggtgtgacctttcaagggaggattagctcgggcagtctctgctgacctgtaggacatctgtctaacgaaatgtatgatctacagctatcttgagggaaaccattagtaggagcataaatttccctccattaacacgtgcaatggattcttatatctcttttagtttgctttcgcacttggagagcgatacttgggttttaccgagtatgccactcaacaccttttacaaaccggccaccatggtctctaacctctggttcttccaatggaggttgtttatctcctcttcatagaaacaaattcaggagcctgagctcaccaattatattaagttatcttttctaagactattgcttaagacgcccaagccttgtagagcaggtggcgacaggcatcataccggagacggttatctagatggtcagataaattcatcgatggggttagctactgatgacatcatcgtgccatgtgatgtcagaggcatcctctaagaattcatttggttttctcttttggtttttgaagaaactcgatctctcatggtttgatcttctaagctttggttgtttccacctagatgatgcccggaggggtaaggtagggggtctcctttgatagtgaccaattgtttattgtccacggggattctgatgccttgtagacatcaagaaggttttggcatcttcgaatgttattgaaatagcaaggaatcaacaaaactttaaactttgtcgctcccgaaaaacaatgccaaattgttgacgataagaactcgtaaacgatacttgtggctagaaactctgagtatatatcagaatgcgagaaaatatatgaaatcaaagtataacttaagaaaatttgtagaacaataatggtgggaaatgagcttccttgtactatcaattcaaggatattttttacaaagagtttccaactacttttaaatttaagaaagggagtatttgtaggtgagtcctattggttctcatttacatattaatcctctagtggcccccaagttctagggaaggacgtcatgttcttgcaagctacagttacaggaggtggtcttgaaatttttactgatgtcaagtgtcacgtggtcttgggggcaggagtagtggttgcagcattctcaatgtcgggccaccagagcttacaggtaagatgcctctactactccttctcttcccatgcttatgtgttacagttgaagcatggttgtactcgtgtgtgatgtcgttttgcttcttcccctcacaacatgctaaatgtcaactacctcattgagagagtgatgatttaatacaatgtcctgatagggttggtgaggctaagaaacatgcattcatgcattgagattctaacacatgcgagtggcttgcttcgtgcaagtggaatgatacatgtgagtggcctactgcatgcgagtggcttgatgcatgtgagtggcctaatgcatgcgagtggtgtgctccatgcgagtggtcatgtacatgcaaagggcctactgcatgcgaggggtctgttgcatgcgagtgacctactgcatgcgagtgttttccaaaagttgggtcctctcgcccactctcaccctcactcaccctctagcccactctcatcctcactcaccctctcgcccactgtcacactcttgccttatcccaccacctcacttgctctcaccctcttgcccactttcaccctctcatccactctcatcgtcactcgtcctctctcatgtgaatggcccggtgcaagtttgggggtgttgaaatacttgcaagcccttacgcttccttttgtattttgtgcataattccttgaatattaatctgatttagattattcaaatgtttcaaaaagctaagaaagagatctaaaaatccttgtgcatcttaagatgtttgcaagccaacaagcttgttgagatgcttgtattcatgcaatcactttgcttaaataatctcggaacatagtcttactaaattttggggttaacatcttcgtaattaatttgtgatatgttatcatgatcatatatgaatgtcttcacatttaacattgaatattaattaatcctaagaagacgttatgtgtctttttgttgcaaggatatcatttaataattttttttggatacgtgtcgtgtaaataggcttgtgtattttattgctcaaaatgtaagcataataattgactcctaaaaagtgaatttgaaaggactttttaatcataaataggggattatacaatactttctatgcatattgagtaagttttactatggcgattttatttttttgagaaaaatctctgcatgcaattaatgtcgtcttttcaactaatttatgggttaattaccgttgattaattattattattacaatcgaatagtgcccataaggcgattataaccagtcatatttactcttcatcgtcacttttgctattttcacgaccagagcaagcttagagtaaatatgaaaaacccaatatctcctttcctggtaaatgccctctctatctctattatatttccttcgaatgatagtaattatttttttgatacccagatcgtggtacataccagacccttgatatcgtagatttttggtgagaaattcatctagaatgccatgtattcgaaaaactggtaattatcgaagtcctttctcctttgaaactttgtatgtatatcatttctcagttttggtcactctaaagtttagctcttgaatttttaaagaatcttatgatattttttataaaagaaaatgcttttatctaattccaagtgtgaatatccaaactttctagaataagaaattggatatttacttgttttacccattgaaccaaaccaaaattttaaaacaaaacttttcgataatgatgagcgaattagggaacatattgattgtttaaatcacacagatgtatctgctcgttataaatatttcataaatgaaattattgaggatagacctcgttatttatgagatgcagcttagcctaacttgtatcaactgcttaaaaaccccttagccaaacctttacttttaccttccgttaatgttctttattcaccaggtgccttaaattttcagataatggctcctcctagagcttttaagcctaggttactccaagaccctactgtaaaatttaaggctaaattttttaagtctaagataacttctattggcctatgcgtcgggcctttaataatgttgtgtgacataaagcaaggaaacagttttgtgtgtcgatttgtacagcttgacgagaagagttgctaccctccaaactgttttaatgaggatgttgagtgtagcacgagcgactcttccaaagttggggcttagattgtagaacacattaaggctatggaaatccttccactaaaggattatatgaaagtttattctaactatgtgaccatttccccattttaattaatcccaaatgggtataagattttgtcttgtttgatgtctctttaccacgtgatgtgatgggaaggaccgtcgccatatgagatcacttatttgtaaactctaaaagtgaatctagggaggaagaattgttctagggggttcttttatctaggaatctattcttatgaacataagatcattgttgatctttctaacaaaaaagagttcaaagatcaattcaatccgtgtgcttataccacttttcaaaaacctcgtaagtcatgttgcttttgtctttgttaaatcattcgctcgccaagagttcactaatcacatcaaaaacctatctcgaatgaatcacatagtgcaagagaaatgatgaatgttacgaccttataataattgagcaggattctaccttggaaaggattacttttctataagcaaaaacaactaaaataaaacagttgaaggaaaaagtcaaggtcaaaattgaagagctaaagaagaatttgctcgccaagaaggagaaagcaggaaaggatttagcttcccacgaggaggatacccaaagaaggttaacgaaatggcctagttgtctctttatagaatctggtagaaggaaaaaaccatgaatacgtccttcttggagcct

SEQ ID NO: 20936 - DNA, 3140 bp, Cannabis sativa
aatttataaaatcaagtaatatctgagatatattttcatattatttccttgctcatggaactggttccttgcaggactttgaatctgagagaaaatggaaattgtctcaagcaaagaaagtcgctttaagagcaagtaagggcatgctcgatcaggctacaagaggagaaaaaaaattgaaggttctgcctaattcttttggcatagaagtttttctgtgatcaaatttgttgctaaagtctttttggccattgtgttgtgaattttgtcttgaataggaagaagagcagcggttaaaaaaagttgcactcaacatttcaaaggatgtaaagaaattctggttgaaaattgagaaactggcaagttcacctctaatatcagtttacatcaatcaaatctattctattgtcctcgaatatttgaaattttacatataacttccaaatttgctgttcaggtactctacaagcatcagatggagcttgatgagaaaaagaaaaaggctctcgataagcagcttgagtttcttttgggtcaaactgagaggttagtctgtgattttcttgtgctctaatcataactttcttgttctttactgaattctaccttcaacttctggctatgcatttccaggagaactggaatcacattatctattgtgatatactttcaggtactcaacaatgttagcagaaaatcttgttgacaattacaagcctttgcagcaaaatcctacacaagatcaacccaaagaagaggatggagatgacgccaatgggtcttcagagctgaatgttggtaagtggaaggttgttgtttcatcacattcatcttttaattttcaaagaactgaagtagattttttccttgcaaataattatttttcaccacatttggaacagaacctccatcagatacagcagatgttgatgatgattatgatatacaatctgatgatgaatctgtaggtcttacttatccttttatttctcttgatgtttggtatctctgttgaacttcagggtttgatatgcatgtgcattataaatatatgaatattgtaataaataaactacatgtatgcattaagataaatttaaatatgctcctttactagtaaataagaatggtttgcatttatattaattgctcatggatttataaaacaaaagaggttgtaaggatatcattcttggatttgtgtagagagtgaggcaaccttttgctttaggagtagctgtacctgtacaagcttttggattttagcctttcattatgttataaattctgtcttatgtttcaaaaaaaaaagggtagagtgttgattgttgtagtaggcctttcctaagttttcatgtaaccgaggttttcctctggctctcaataaacttgggaggaggtcagtattagacatttgacctttgtatcttttttaaaaaataaaatatcaattgcccatgaatgtccacaaaagttgtgtgatgttgatctttttataaattgtggattcataaaggattttttcctagttgaaaaacatgacaggagtgtttatgaaaaaagattggctgctgatgtatgcctccatcttttctttgattgcttggcattgagcatgcccaagagtatagctgaactcactaatgtaacatgaaaaaagaaaaaaaaaaacgctgcgcagaaataagaaggaattaggaaagaaccaaataaatctttgttcttcagaagaatgcttccacctgtctttcatgttgtgtcctatctgcttcatgcatggttgcctatactgaggatgctggccaatgctcacatctgctggcattccactttagtttacagtgttaatgaaagaatgaaccaagtgccatcttggcagatgatgcgtatagagtagagaaacgtactttaaaaagcagaccactgccaatgttgatcttgtttttcaccttcagtgatagggtcaaaagcaatgcctggtatatttttgggtgctgttgaaatactttaatcctcatgagtcatatcccattgccaatttaaaaaaacaggctgcataaagcttgctatctctgcaatctttcctcttactcaatttatatcaaagtgtatcaaatatgattgtacatctgagaaggcagcacttactattatgtttaaccatgatgattcctatctgaagtttagactataattctctgtacattttttttatttcatttctgtctttgtattctcgacatgtttaacaaatttatctgcctgatcgtactgttttaggaagatgatgaacatacaattgaggaagatgaggctcttataactaaagaagaaagacaggaggagctagctgctttacaaaatgaaatagatctaccccttgaggagctactgaaacgttatgctgggaaggaaagtgagtactgaaaaatttataaaatttaatttctttttcaaaatgttttggaccttggtgtgaccatggaaattttcttgagagttttataggcaacattttttatgcaaaacaaatttgttagcagttattagttttatttttacagtttgtgtgtgtgtgtgtgtgtgttttttttttttttgttaattgaggattttatcatctccctaagtatcatcctctttgttttcatattaatatttttgttttgtaagagaataaaaggcaaccaaatattttggtccatgccatgaacgaccttgagtttatcataggactgttatatgaactgctttcttttctcacccttttatctgtttttcagagttacatgtgtgtatttcattatgcaaattcatgaatggaatgcttttctttagtttggtttggcttgggctattttattttgcatccatgcatatttattaattctggttgacagaagcttgtggacatagcatggagagtagttcagtaaagcatgacgaggatgaaccagcccggagggaggatagtaaagtaaaggataatggggatgaaccaacccagatggaggataatgtgggtgaaccaacccagatggaggatagtccagtaaaggatgacgaggatcaaccagcccagacagaggatagtccagtaaagggtagtggggatgaaccagcccagatggagggtagtc

SEQ ID NO: 20937 - DNA, 3258 bp, Cannabis sativa
agttttaaatttcatggaaaaaaatagttaattcagtttgtatatttgaaaatatttttgcatgagttttaaatttcatggaaaaaaaaaatagttaatttagtatgtataatggttatttatttttcaattttttttagttttttcatccaaaatatgttataataacatttaagaccaaattaaaaattgtttacaagacacaaatggtggaattacattactgctcagaaaatttcaggccttttttccatctaattttcactaccacatcatagttctaacaacaaatctttaaaacacaaaattttgagaggcaacatatgtgacattacaatatatttgaactgaacttgtactctcatgaatctcaggagaaatcagatcataacaacttccacttgatactcgagagagagaaagcgtaccagtcgaaaaagggggagatccttgaaattttgtgaagaactctattaagcttagccacccgaaatgatctcctatgcaaaaaaaagtcaatagcgatatactttgttatgcagtcactttcaacttacaacatgttgttggttatcatgaagatgagacgggtggtttttcttcagttccgttgatttcagggacgttttcttctgcaccattggtttcggggacgtttacatcagcaccattgacctcagtaagttgatcgggtgaagaagcagggggctggtcactggtttcattgttctcgggatgaaaattgatcgggaactttgttacccttggtttgtcagctagaatatttctttgaactttatcaatcaaaagctttggtggcggttcctctctcagctgttcttcaccgtaatcgttgttcacgtagtaaccaactctaataaactcttgtcccacataagaacaagtcaatagtagtactgtaacgccaatgatatcttcatctcggatttttgatgggtctggtggatctgcctgaaggaatttgacaagaaataacaaaaatttagtttctcacaagcaattggcaattcaagcctagctaaccaatagtcacggaatttacctgaagaacaaagcgatagttgccaacattaacaggaccaacaagtacactctctaaaagctgatcatatgtctcatcctcagcagaacccacataagtgagtttccattccaagtctgaaacaaattaagagcaagtcaaataaggttgttaacataagagcttgtttttgttggtgaggatttatatatgagcatatgaattgcagtaaattgaattaaagaggttggtataaactcataacaataaattacaagacagcaatatcgcaaaaatagctctatttcacctacacagattattcttccaactttgtacaagtttcaaacatagaagtgtaagcatttcctttatgtacaaagtggtatatcaaattttgacaaatcaagatgcttaagactatgaacatttaaaaaaccatcatttacttagtggtaggtaatcctgtccctatgctcccccaaaacaccccactaattatctcaaatgatcagaaagatttagctaatgagggtatgagtacatcatttaaacaaatttttagaaaatgattgcagggcaatgtcctgaaagcttatttcaagtcacattcgaaaataatgatttttgtatcacaatttatcacctaatgaagaattctaggcaagtggcaactaaattacagcccaatagataacatcatgatgatcgaacggtctaaagatgaaacaatagctatagttagagacctattaaaccataggtccataactttgaagctctaaaatgcaaaaaaagacatacttgagaaacacactcagatcactttcatgaaaccaattgataaatgaaatcaaaaatcaagaatgacaattaatcttgaacaaataccataaactaaaagcagtaaacagagttgttaatttatttattctattacaacagaacgaatatgaaaaacattaaaattcttcaaaataccaaaaaaaaagttttttagtttgatatccagttcagaaatggcgaaatctatcttcagtcaaacttaaggatgaggttacatgaaatgcctccacaaagcaaactcaatagaacatatttttgttcaaaaaataacacagaaagataaatcttatgcgatgaatttggtgtaaatcttgaaatgaagccagtatttggattcaaaatcaataattttcaggccttgtaacaacatgtcaaatagcagatttggactcaaaattctaaaatataataaaagccactcataaaccacagcaaattctgatcaaaacaataaataatcctcattttcgcaacttacctactcatcaccattcctaaacaaccaaaatcaaaaagcaaaattcatctgttcttcaaataaccatttctatttcgaaatttcttagctatatttgagcaaatattataaaaagttcatctgttctttaaataatcatttctctatcgaaatttcttagctatatttgagcaaataatataaataaactaaaactcaaatcgcatcaacttcagctgaatcttaatctcaaaaatcctaaaataaaccaaatatgctcaacgattaaataaaaaaaaaagatcagaacagagaaattttagtttaccgtctttaagaggagtcaaacactcgtaagaaatttcgaactgaaaagggttaagaaaagcggaagggttatccaaaacggcgacgttagtaatgttgacggcgctcatcttctcggctactctctgctactgctactacaactactgatatcatagaacaatcgaaaccctagattggataaagcttcatgaaccagagagaaaaccctagaagcgagattgttcttctctttgtttcttggtgagaagaaaacgatgaccgggaaccgactgaagaggtgtttagataaaactgaaactgagttgtgttttgggcattttataaaggagtgagtctgattcaattcgaagaagggtaccggctgtagccggtttcgctgtggagggaaacaacatttacaatttggcgggagctttttctaatttttgaccttttttcttaattctattttgattttgtatgatggaaagaaaaatataaaaattgttaagaggtattattggtgtctaatatctttattggtattataccattattaatgtaattaagtagtgagttcgatataacttaataaaataacttt

SEQ ID NO: 20938 - DNA, 2165 bp, Cannabis sativa
agttcgatttgtattcttagaattagttcccagttgatttgatatgtttagttagcatccttattagtcttggttatcgtggaagaaattaagatatctaatgttatattagatgctaaataaaaatgaatatatcaatgaactctagagtggcctactctaggcctaatccacatgtcaccccttccatagttcaccccttccatagttcgtcccttctgcgacgttgatcccacttgagggtgcatggttctgatgccacttaatataaccacttgggtagaactcactctcaaaagctagcctaagaaaggagggcacccaaatagttatatactattaatcatacatggtcaatgtaagatcctaacaaaaggctatgtccataagtgtgaaagtgcacagaaaggtacacgtagaatattctaacatttggaacaaacaagaatgcataaaaacttttgtcaaagaaaagaatgcataaaaacttactgaatcattcccattgaaatcaaagaaagcagtcggtcctttctcatgtagcattgacgaaacagtggacaaaagcaatgagcaatacttttgctgactcacaagcttctcacttcggaggagagcaaaaatcttacggatgtcctttccggaaatactgtgcccaccaataacttgaattaagtgtgcaatcttaaatataacgctatcactgctttcttgtggaaaccaatcaagcagaaaattaagcattcctgctctgacacaagaagctcggttagaaatcgagtctctcagtaactgttgaaacacatccagtccgtgctgctgtaatgactcactactctgcccaattaaacagcaaataatatatgggaaaacaaagttaatagaatgaaagttcagaataaaaagattcagccaaagagagaaagagagaccatttaagtttcaagataacattaaattagaaaggatacacaaaaaaaaaaaatcaccaaccttccgcaggacacttagataaagtatgattacatcttcattctgagtatgaaaaaaaaaaagttagaggtccctcaggtattatgatagtacattgggttaaatttaaaaatcagcaaaacttgagcaagtatagttgaatataaagaatcgcaaatgtggactaagaaacttttgagataatgtttgcatcctgtagaaacctttattatagcacctgcttttagatcaaacttcccatcaacaaccatatcaagcagtgcattcaaaagaccttcacttggatgccactggcaaaagtcgagcaacaaactttgcaatgcctggtatcctgtgccggctaaagctctaaatgcagcctgtaaaaatacaccaacaaatcaagaagttcacaagagacaaaggtttgacacatagacaagcaaagacacgtcattcaaatagcaatcaaagatacatcaaaatatctttagtaaataacatataattgaataccaaagaaaaaataaaagtcacacacatggagaagaaatgtcatcacacaatcacatagacagcatctcagtacagtttccagtccaagccaaaatagcagaatatggaatcaccacactcctaggaagacgaaatccatgtagaggccagcatatgaccctacaatcaaaacttctgcctgagttttataggtcacatatccaacggtaacattctcccaaatttattgagagtcctcacttgtcgcagagtaaaactgtggttacaactgttaacaccagttaactacacctagttatttttctgttagcttaggttagttaacctgtgttatcagttaaggtagttagttttctgttatttgttttttctttgtttcgttctttaattctcttgtatataaacaatggttgtcattcaatacaaatgagcttctttcatcttcctttcctctgttctttcttgcttgtgctctgtttctctacatggtatcagtagtcttgacccaagaccatgtcgtcgtcaacctacgatcctcaggcccctgccattaatcctacaactgaagctcctcaggctcctgtcatcactcccgctgctactgaatcttggaatccgttctccaactctctgtcttcctcactcacggtcaagttggatcgtgcgaattttctctc

SEQ ID NO: 20939 - DNA, 2047 bp, Cannabis sativa
  modified_base (1878)..(1882): a, c, t, g, unknown or other
  modified_base (1908)..(1914): a, c, t, g, unknown or other
acctctataaatctggtgtattctcttcctttatatttctgcaatttctatattatgttcatgtgatttctgggttgggtattgaatcgatttaaggtgtttttcatctctggtttttctgggtttcattattgtgttcttcgtgttcttcagagaagaaccacgaagaagtgtctctcagttttggggtagtattcgatctgggcaggatagtgtatttctggggtttgttaatctggttggggggttgtttctgggtttatttttgcagttgtgcttcgtgttcttaagagaagaacaacaaagaagaagactgctgcagatagggctcacggctagggtttattttgaattgggatgctggttatgtgttttggaaaataacgtatatatatgaaatagatatttagggttttctgctttaattgaaacgacttgtagctaggaaagaaaggttgtcgttgggtttattgcttgggggagtcaacaagttgtttgactggggtaaaaagtctaaattggccttggcttttgattactttctttgctgtgtgtaggttaaattaggaataaaatttcctacattttgtaatgttggatttgtatattgctttattgaagcacttcatcatgttaagaatactataatagagttagaattcatgattgaaattaaagtttttatgggaagaggatgagactaactactaccatttaacccaagttgcaatgtagttattatgcttttgtgttatatcattcgagaaaaatcactcatattttatgattgtgccaacatatagacaactctagtatgcaaccaaactaaagccaaactcttaattttaaatttaatatgttttcaattgattaatttcatttatagttttatctcaagatagctactcgaaaagagaagaagcatgataatgaatctattaattactttgcaacctcaaatgaattttatttgcgacttgaaaagtctaaaatgagtttaatttgtacttaaacgataatcttataaaatttcatgttgatttatacttcatctgactttatactattctatgaacaaatattctgaagcaaatttttatcatgaggaagcaagggttttttgtttattttttttaagactgttatatttaaataattaacaatgatacttattattattagtgaagcagaatattttattgtcaagccaatggaggaggttatatcatcaccatattcattattattcttattcatgtagtcggtatgaagaattattatattatatcattattttgtatttgttattaaactttgagagttatgattagaaagttttatattattaggagttgcatgtttctataaagaatgggaaggtattgaataaaaataagatattcaatacttttcctttaagagaaatcacagaagattcacaaagtgtatggcaccatttttttttattaggctataatgcttcttttttttttatatattcgtcgagttcgaaatgtcagtgtttagcattattataataatgtatataaattaatatatttacaccttttattctgtaaaattattactgcaattattttactatttcattcttttttatctaaatttcaatgatcatatataaattagttcttgtcatttatttttattagttttgagttcttgtttctttggtttaccgagatttttaaaaactaaatatttagagcttaagaaagaagtaaaataatgaacaacaaaaacaagataattaacgtggtttaggcgttaactatccttagtccacgagtctatttcattaattagccatatcggtagttgatgaatattacaagtcactacaaaaaatcttacttnnnnncacaacaaaacttatgactaaaagtnnnnnnnttgtgactaattataaattgtgattcttatgtagtgactaaaagttccgtggataaaagtattagtcacaaaaattacaatttattgttactaaatgtatttttagtcacaatatttgttgtaactaaaacta

SEQ ID NO: 20940 - DNA, 4269 bp, Cannabis sativa
  modified_base (3151)..(3157): a, c, t, g, unknown or other
tttgattgattctagtcgtcttctcaggtgaagttgccaaaattaatggtggttctctttctggttgaattttcgtttcgattgcattgagttgctgtgtggttgcctgatggttgcccaagaaagatgaatcatgtgttgaaggtgtgtgtaagtggtatttgtgtaatttttttatttgagttgtaaatttatttatttggtcaactgaaagtatttttataatattattattattattttggttaaaattgaaaaaaataaacctttttttattgtgataatctttcttaaaatattgagtaaaaacttataatacagagatggtaacgagtagagaatgagttaagcacgcttattctacgatcctataccttaagaaaaatgttctactcataacaaaattattttttttgagtgttgagtacaagtattataccctaacaagtagtatatgatggtaatcatactatgataaaattaagaaagattgagaatacttaatatataattgtcttttttaataaaattataaagtattataaataattgataacatgttattttttttaacaaaaaagttgtagagcccataaaaatatctcatatgttccactccattttatatatatttattatatgattcagtttagcttttattggtaaaaatcagcaatattgtaaatatttttcttatataaatttgagcttgtagtttgtagaattcagttgagtacatatcttcattttattacctttctcattcatttttaaagcaataatacaaagcccaaatccattgtaaaataatgggctttctatagtaaagcccactttagttaggggtaaattgaaaaatacctcttttatttatcaattaactaaatctacctctaatttatatttaattgaaatatatctttttatataaactgtacccaaaatatcctaacataagcgaatcacatgaaaagtatattgaagtgtcaggggcgaaattgataaagtgtttagaagatatgtaaaaatgatagactttaaaaaagagggtaaaaattaaaaaaaaaaatatatatatatataataaaaaaaaagactataaaaaaggtatcaagtctaatttccgaaattaatcaatttctagcccaatattgtcaagagacttttaagttttaagctcaatccgcattattttgctcatagtacatccgatatgtactaagtgtagatttcatactttggatccaatctaatccacacaatagctctcatgcaaaagtacgaattggatcgattattttagattgattacttttcaatattaaattatttaatatttataaaaaatatatatttttttcacataactatattgttattttatgtctctaacaacaaattataataaataaaataataaattcaaaggaagaaaaaaattgtatgtataaaaaatatttaattttattttaaattatatgtagaaaaaaaattatatataagaataaaatatatatttaatttattaagttttgaaatatatgtgtattgtatgtattagatttttaaattactatatttttacattaaaattttaattgtatacataatttttttaaaaaaaaaaatcataaatatgtgtgcattggattggatcggttacttcactcacttggtcattctaaaatacaagggcttcaattttttttcttttgctctatgagaaaatcagatatgatgcttaattatgctctctacaatagagagtagagactttacaattatagttattatgttataataaaatttttcatattttcttatttacttcatttgatacttgatattcctcctttttagatatgttggtgggacaacacacaattcagagatattttttatatatataaaaattttattgtctaacttttttggggcatctattttttatgtaagtcgcaacattaagtttagcatgcctttagaatagacaataaattttttttggatgaaaggaatctcctcattgcctttcagtatttttttctctacctataacagcaataaaataatgtaacagtaatgttaatataaaggtgttattcgtgttcttggaggaaagacacgtggagtaaccggaaggtaatcaccatatctaaaacacaagaaatcttgctcatattgaacatgaaattcggaaaaggaatgcaaataaaaataaacagggtcgttcctaggcataggcgggctaggcccatccatagggctcacacctttcaggggcccaaaataaaaaataaaagaaaaattattaggtttttatttgattaagtgtattgtaaacaataaatattcataatttagttggttaaggtgtatgacatgcatgttatataatcccgtggattcgaatcccataacactcttttcaaaatatatatatattttgaagggtcccaaaatcaaatttgccttaggtccataaattttcagggtcggccctgtcaacaaggcaaaatctctccatgcctaaaatgtaattattgatcttctactgtattttgcttcggacaaacttgatatataggacatgtctatggtaagtatcttacttttgtctctatggtaggcacatttttagaaccatagatatttaatctaagggtcataaattgagtgcatataaataagaatacttacaatgcattagattattcctaaaattatttttttaataatatttttaaattaaataataatttttttaacctcctccaattaattaatctctttttaattgttctctctctttcattagaaacctcctccaattgttcattggttcatcatctgggttatttcaaacaattgacattgtattgattatattgacatggaaggaaactcaggaagagaagaacattgtcctcagttactagatttgattcctcaaaacagagagtggttcatcaacaaagaaaaagagaagagaagccatggcacatcaaatgagaaaaagttaaagcttaggcttggtccaccaggtcaagattgaccactaaaagataacagagaaagagatgagtctctcctttctcttggatatttctttcaaaacactaataccatcatcatcaacaacaacaacaannnnnnnaacaacaacaacaacaacaatagtggaaaccatatataaccaaaaccacaagtttacttccttagagaacggaggagttgggaatgttctatccacttcccccatggccttattctactctgtcctcttcaggttaccaaggaaaagctccaacgtcatttcttccaagcttgcctgttatagcaaaggaagccctagagtcttgttgccctaaaacattagtagagtggcagtaggtagagaaaaaagcattttcaccagctactattcctacaaatacagctgttaccaacttctctcaggaagaataagaatggacaaaatggggctcatggaaaattataaataacattaaaaattagcttttaaaaagataaaaaaattaaataaatttttattggttatcagataaaaatttttaattgggtgttaattttttttaattaggaaaaaaaataaaaaaaattgataacctacaaacatatacattttatacaattttgacttttaaaagtcatataaatcaacggctaaaatatgcatgcatagtatacttgatttatatacagggctggtcctaggcaataggcatgggcgggcttagtactgtaaatatgggccgggctttttgacacgacacgaaaccggcacgagtctgagaggcacgagcacaatctgacacgaaaaaatatgggcttgagcacgacacggcaagatgctacaaattagcacgacacggcacgaaaaaaatgggcttaagcaccacacggcacgacaagcctgaaagcacgacaagcaagcacgaatataaaagctcaaaaaataccacacacaaataaatataattttttcattttttacttcatatttatatattttgatatttatatacatatttttattttaaaaaataattttctttaaagtttatttatatgaaacactatttatatgtatacttttttaaaaaaatggtaatattataaatatactgtacatatatgttataaattatattataatacaaatatattaatgatatatcaaataaaataaaggcggaagcccatatatttttctttaaaagtccattttgtttttctaatgctctt

SEQ ID NO: 20941 - DNA, 2186 bp, Cannabis sativa
ttaggatgttaatgaaacatgcttgttagtaaatctagatcctggtaaaatatattttaacaatttcatgttccttgaacactacatccctgctaattatacatttcttatgtccttcttccaaacaccacaacttctatccttttacccctttagggtatctaaggaacatacacttgagagccattggctcaagttaatcctatctggtatgagcaaaagttatgcatccaaaaactctaagatgatcaactgttggaacatgtcttgtccaaatctcttaaggagttttaaacttgagtgtagttgagggacacttatttatcaaataacacgctttcttcagtgcttcaccccaaaatttcttttcaaggccagctcccttgagcatgcatctcactcttttcaataaagtcctattcattcttttagtaagttcattttttgtggatttttcacaattgttttatgtctgtcgattccctcatgttgacagaacctagtgaactcatctgaacagaactctaatccattatcagttctgagcttctttatcttccttcatgtctggttttcaattagtcttttccaagtgacaaaggtgttgaatgcctcattctttattttaagtaagaaaacccataatttcttggtatagtcatctactatacttatgaagtaacttgcacctctcaatgctttaatcctggaagccccccatagatcagagtgtatgtaatcaagctttccttgtgtagtgtatttccctagtgtgaatttcaatttacagcattttccatagacacagttatcatagaactctagtttctcacccaattttcctttgagtatcccttatttttccagctcactcatacccttttcactcacatgtccaaatcttaaatgacatagtctagtgctttccatatctggccttcaacaaccatgccactctcaccagtaactgttttaccttgtagataatagttgccatttcttagttctcctttcatgaccttaaaagagttatctatctttatagtatgaccctttcaattaattcaccaatggaaagaaaatttcttttcaagtctggaacatacctgacatcttagatggttttaacttgatcatcatggagcttgattcttacagttgcaattccaacaactctacatgctttattgtctcctaataggactgctccaccaccaagcttcttgaaattatcaaacagttctcttcttggtgtcatgtgaaatgaacatcctgagtcaagtatccatgagtctccaaattatcggctagagataaccaaaacatcaaatgatttgtagccatttgtcacaacacctgcatctcctctttctttgcttttgtctatctgaagtttggccttcaatgctctgcactcattcctgtaatgaccctcttttttgcaatagtaacactattttttgtcttggaattagatcacggtttgtgagatttattcgagcctttgtattactttcctttgtgacttgtcttgtgaaaaccacctttattttctcttgtttctgatctacctctaacaaacagcccttcaccgtagctatttgattattcttcacttcttttttgaatctcttttgagtttaatgctgacttaacttctgtcatggtcagtgattctttcccatatagaatattatccacaaagtgctcataactttttggcaatgaactcagcagtaggattccttgatcctcatcttcaatcttgactcctatgttactgagacccaagattatcctattaaactcatcaaggtatttcctgagatcttttgtttcatctaggactgagcatcgatcggtttggtcggttttttttttttatataaaaatttagaattcggttttcggtctggattggtgcaatccgaaaactgaccgaccaatccagaacctatattaaaaaatgaccattttgaacatcggtttggtcggtgtaaacacataattctacatttatagctacaaacatacaaattaattgttctaaaactaattcccttattcttttaactttaatattaataaattaataatatattattattatatattattagtaaacacaatacataaagcaaaaaaaaaaaattaataaattactatatatatgtataacggtcagt

SEQ ID NO: 20942 - DNA, 7754 bp, Cannabis sativa
tgtaagcaaaattattttgtatagatgaatactaaatgtacaccgaatcttactaaacctatattatatatcaaagattataaaaaaaaacaaaaaatataatgttttatttttattatatattttgggattcttttataactaatttaaaaagacataatattattaaaatacaatttttaaaaaaaaattaaacatttttatttcattatgcatttatattatattgctttcatgttgtttttataattatattatatttttttcacatgattgctgttatgttgctttctaaaattttgtaaaaaaataaattaatataaataaaatcagtaaaaaaaattgattatagtctattaaaaaaagtaaaaaaaaaaaacaaaaaaaaaaacaaaagtaccattttagattaaaaattcttttattaagaaggccataaactaaagaaaatgtagctctgattttttggggggtcaaaattgaatgtcattatattataagttttggaaaattacaaatcttataatgtttcatgcattattaagtgaatatattcaaaatgcaagcataattaaagaaattataagacaaggaataatgtatttaattttgtagttaatttttaatttatgctacttctttttaattttttctaacttcttatattcttaaaaacatatatatataaaataaaaataaaaaatatatattttaaatattaaaacaaaaatataaaatataaaattttattaaaaaaatatacataattttataaaaacaaatatgaaaataaaattaaataactattaaatttaatacaaaataatgtgaaaaaataaaatttttaaaaaatattaagagtactttttttttaaaagttaattttaatttattttttaaaaaattattacagtgtaacaaaaaaaatcctagaaaagaagaagaagatgatgaaattcatttataaaccaaatctaccattttattctaaaatatataacatcacacatatttttcattatatattatatacaaaaataaaatctcttcctctccaaatctgatctaaattgttggcttgctttggcacttagcaattaatactaagaggaatctagaatgccacttgcagacctgaaaaaattaaaataaaataaaataaaataaaataggtgtactcaatctgggtgagaattaataaattttagtgacattgtctgtaaaattttattatagaaatattattatggtttttatttttggtgatggtaaaggacaaatgtgtggatagtatggtagtagtagtactagaggagaggttggtgagagtaattaaagtattaactattaagaatagaagaaaggaagaaggaaagagttatagagaatttcttctttgattcaacaaaagaacaatttggttcccatttggagtttgactatatgtcctcttctctttctctcatatttatttataagagtaataaatgcaaaccatcataatgttcctctttattcaatttttcaatttgtgttatttgggtggtagttattacaagagcattactcattcttcaatattattattatgtggtaataatttttttttagagtaaatactattttaaattttgtattttgtaaagtttattagatttttttttattttgaattgatatttttattaaaataaaatttagttataattcggattttagagatactatgataaaactgattatattttcaatatccgtttgtgttaaaaattatctttaagttggttatatttaaaaaaattatcgaaatttgagttagctatcctatttttacaattttaaaaaatataaggtctatttgatcatttaataaaacagataattcaataaataatttttactaatttttacaaaacatttacaaaacataaaataaaacataaaatttaacataaaatttaaaataaaatttaaaatagaatttaaaatagtatttttttttataataattattaaattaaaatattagataatttttttaataaaaagattacaaattcatattttatatttgtattcatgttttttttagcgaaagatcatttttatttttttaggagacatttttgcctctattttattagaattaatatttttgttttacttctcacaactaatcataaaaattcacatatgatattttactttttttttttttttttaattttttaaaaaagtcttattaagaaaaaaaaaattaaaaactttgtaagtagaattttttgttgttgtttcacaaagaatttcaacttaaaaactagcaaattaaaattggaacaagtcaaacaattaatagatctacatttagattagggagataatcattataagtgtaccataaaaaaataaatgcaatttcacctaatttattacggatatataaagatactagtacatacaagagttaatcaattacaataaagaaaataattacttatagttagttaaatttatttattttctatttatggaagatattctacataaataattaaataaataaataaataaaattccagtaatttaaactttggacttcaaaccgtttacgtcaaaaagtagctctcattggtttgacatttttccaaaacacctttctttttttcaattacgtcacaatcttttctccaatttttatttaatttttctatctaccgtaatcttctgtattttcccatttttacccttatgctcctcgccacataatcagttatattctattatattcttagtggtattttcgtaaatatgtcataatctcatgacttaatatttttaactaaagacaactatataaatatgtgtaaaaaaagaagaaaaaaaaagagtcaataaataaaagcttttctcttcttctctagttgagttgttccgtacactcgccggtattatatatcgccacctatatatatattcaccgcagtttagttcataatacggcgtcgttttatgcttttattttgttttaattattattattattatttattttagtttttttttgaagataagcttagcgagcttaagtggcgggttttttttttccgatgccggagctcgggtggtaatatcagttccgatgttgaaacggaggtcggagagttgaccccatgggttgtgtactcggtacagaagctgccggggatcgtaggagatctaccggggctcaacgcagtcgccggaaagttgagcaaagtcgctctgctaacaccgtcgatgttactgctagaaataagaagaaagaaactgagaggcagaggacgaggacgagtaaacggaacggtgatttaccggctgttgagcaacggaaacctaggccagaaccctttcttactaaccagcaaggttggccttcttggctattagccgctgccggagatgcgatccagggttggactcctcgtcgggccaatagctttgagagactggctaaggttatttatttatttatttattattatttatttatcaaaatcttaaaatcaaacatcttcattatcgtttatttttttttttgttcagattgggcaagggacttatagcaatgtgtataaagctagagatcttcttagtgggaaaatagtagcgttaaagaaggtgaggtttgataatttggagccagagagtgttaaattcatggccagagagattctggttctgagaaagcttgatcatcccaatgtgcttaagcttgaaggattagctacatcaagaatgtcttgtagtctttacttggtatttgagtacatggagcatgatctcgccggccttgccgcccggtcaggggtcaagtttactgagcctcaggtaaaaatttgagcttgataactgggcacttgaagtttaactacaatgtagatcttattcaatacatagacaaattttggtatatgagttggatttatatgttatgtttctaagttgatttggatgactttgattgtgttttttcctacccacttttgttttccctgttaggtacttaaactcatgtaggctgtttgtttgtccttttgttttttgttagctttgatgttactaaaagagcttcctagactatattattgggtcccatattcctaacagcttcgagatactcaaatctttgatttatgtgctttttaatgatggatttagcttacatgtgtggttttgattttaccttttttggcttgctaattcatagaaacttcgtatagcttgataattatgggaaggagactggccaattaagatgtcgtgttttattatattgttatggatttgccaaagccattaagattagcatttaatgtttgattatgaaagggacgtgattgtgtgtggttttctgcttatattttgatatggtttagacctttacatatttcagattaagtgctatatgaagcagttgctttctggactcgagcattgccacaacaatggtgttttacaccgtgatatcaagggttccaatttgcttcttaacaatgaagggattttgaaaattgctgattttgggctggctactttctatgatcctaaccacaggcaaccgatgactagccgagtagtcaccctttggtatcgacccccagaacttcttctcggggccacaatgtatggagttggtattgacctttggagtgctggctgcatcttggctgagctacttgctgggaagccaattatgccaggacggacagaggtattactttttatcttgttttgaacatttctctatatttttgcactctttttttagagtgaattattatcagtaaattatttgtaatttctgtataattgagtagcgtttaaagactaatttatgcacttccttttagtttgaagtaaagcatctggtctgattcatcttttctttgtggaagggtgggatagaagattttccttttcttcttttctttatgggataaacagaaactctcaagtacatgctttaggaaatttatttcttcttgttgaaagtcttagcaattctactcagccttgtattttgtggtttactcatttggagtttggtcttatctactttacacatttttctacatccaatttcggttacttgcataactgtattttgctgttgaaaagtatacttctcagcttgactaaccaaaccctttgaaatttgtttccatgataaggttgaacaacttcacaagatatttaaattatgtggctctccatctgaggaatactggaagaaatataggttgccaaatgcaacactttttaagccacaacaaccatacaagcgctgtatagcagaaacgttcaaggactttcctccttctgcgctacctctaatagaatctcttctttcaatagacccttatggacgaggtgacgctactacagctctacaaagtgaagtgagtatcctttcaagtttatttactttgcacaaatgaaccacactattttgttctgaatattgactcataatttgaaagcggatacataaccattattatgtgtggttgcagttctttagcactgaacctcatgcttgtgagccatcaagtttacctaagtatcctcccagcaaggaattagatgtaaaattacgagaagaagaagctagaaggttactttcgctacttaacaactactatatgctctgatttcatcttggttaggtgttgacggttgatatcgatttttaatgtcaggcaaaggggtcttaatgggaaatctaatgttgttgatggtgccagaaaagttaaggttcgcgatcgtgctggtcgagcagttccagctccagaagccaatgcagaggttcaagcaaacttagatgtatgtattttctctctgtctccaatctcacattatctcttttttcatctctgtttcttttcttacattatctggtttttctggtttctgcaaagtcaaactatttaaaatcaaccatatctattttcattctcagctgcctctttatttatgcatttgtaagtaaagtttagaattttatccccccctatatgcaaaaaccagcaatttagttttgagctaattctctgctcttgaatatcctatgcatttgttcatatcaatattttgatcaaaatgagcgaaccttgcataacactgctctgtttaacataaaaagaaacatagaaatactcatggcttcctatacttgatgattttcagaggtggagagttgccacacaaactaataccaagagcaaaagcgagaaatttccacctccccatcaagatggagcagtcggatacccacaacaaacatcacacaaaggcccgtcatcttttggtgcatctgactcttctttcggctcagctgtgttcaattcaagatcatcagactctatcaaaagcacgggagctgtttctggggggccttcaaggcggaaaactaacagagaagaccctcgggtggctccatcgcgcaatttcatccgtggattcaagccatcctcggtagggatatcgacaaatctacttttcaggagtaaataacaactttcagagtttctttttttgccgatcgaataatgaagaaagaaaaaaaaaagggtattatttgtcagagttttccttcttccttttaggcttagccctttttcggttttttggaatgctgtgtttttcctttttggctcatcattgttctcattatttgttcttttatgcttatgattgttttgttgttgtataatccaagtgacgagatcccacaaggacccaggtgtatatttcagtataatggagtccctcttctcttatgtggtaacatttttcttggggtgcaagtaaccctatctatctaggtagagaatctcagcaatatatttgattctgtttcttattcctaaatagtaatttagatatttatatattttgaaatgaaacaatttgattaaacaaaaaccacaagttttagtacacagtacaaacaacagacaaaaccactaggaaatacaaggaaacatgttgtttgataagggtacataaaatatttttattgatttagctaaggaacagtgaagttaggaccaatttcttcagctagaatcaattttctttgacagcaaaatcttcagtgtttcaaatggttccaagctgcggtaccaaggcggtgcgtgcggccacagtgacccttgttgctctttgaaccaatgtccacattcgaccaccgcgagcgatccaccaaaggctttatctgtttgttctctcaactcgagtcaactaagaaaccttccacaccagttcaacaggttttgagctatgggaattagttggttgtggttccaataatttctctaatactgtaactgtacctgcctaagaataatacaaaatagctcaaatttttcactacaaagaaatatggagagagtagatagtgctgaaaatgcatctaaaatctggttcttagtcaaatttttaacgttgaggaatgttatattgttttgtaaataatataaggatttgatctataagaatattttaagattagataaaatttatgcgtataacattatgcttaataattgaaactctacggataaataattgaagatatttcgatcattattattatatatgttcgattttatatttcatgtatttacaatgtttacatggtaaattagagacgtcgcaagttagaggtgtcacaaaattatttcttattagaggcgttacatgataaattctaat

SEQ ID NO: 20943 - DNA, 2398 bp, Cannabis sativa
tgggaggagtagctcattcctcttatatattctattatctttccacacattagcaatgtgggactatctaacacgcgttttaactgcttctaaaatactcgattttgttccgagccgctataaaaaaaatccccatataaaccatatttaaatttaattttacttctaatacataaacttcaacacattacaaacacaaacaaaaccattaaacataaattgtcaccccaacaacatgtcaaaccaacatgtcaaatccgacgtcgtattaaacaaatgttatcacaaactcatattttatccagactccgttaatatttatctcagctcattttctattataactttttatcacaaactccaatgtaaaacagtaaaaaaaaataacaaagaaattaactgtgggaaagagacaaaaacatggtcaattttttttcacggagcccaaaagattctctgtatccgtgcacttttgtcatacgtgtgtgttcagatctgtgcacgtcctctccactcactcacaacaacacaaatcaatctattatatatatatgcatcatacacatatatatacatacatacatatatatatacacatatacagtaacatcactgatatcactaactcacatgggtgggtttttgttgtgacataggacccaccaacaatctggcaaaaataaaaaaattacagagaagtagggcccacatgcagtgtcagcaaaccccatgtgatattgtgctttgtggaccccactctgctttttgcctttttaatttttttttttaattattagcaaaaatcaaaaaaagacaggctctctataccccacataataataattcaaaaatatatatatataaaaaaaagttgtgtagtggagcaaagagacaaactttacttaaaatcacaaaacaaagtgaccaattaagcaaaattagattttgatttcaattcaagaacaaatttttgcccaaattataagcctattttctttgtgtggattttctttgaagccaaacaaaaaccaaccctttacataagagatgataaagaactagattttgagactatctttctttgtttcattcatgggaaacaattacaattacagtgataataataatagatgatgttacaaaagctaaagatatttaattttttttctctcttttttttttcacctgtggttcaacttcaaagctacagaaattggagatatgatattgatatagataatgatgatgatgatcataataataataataaatagtacaacaaacaaagaaagaaaaaggagtggtggctggctctatatgacccacttccctttactgcctttcaagtatgaaatttgtattgtagtaagtagtaatatggtatttcatgttgatgatgatgatgaggttgatcatgttgatgttgatgatgatgattctctacatatttatatgactttcttttgttttttttttaagggggttattctttattcatcttcctgcaaatttccaagaacaaaaattaattatagccaaaattatatgaaaatgaattttaagtgatttataactttttttacctattcagaaagctaaattccaactgggcattttgggccaccgggtgtgcctgcatacataccaatagcaccatgagtagaagagaacctgaaaacaaaaacaaacaaaaaatgagttattattagatagtgacatgactaaatttaatattactatttggggttttaagggggaatccaatgaattttaatgagtggtaaaaaaagggaaagatttaattttttttttttttttttttttaccttggcatttgacaattgaaagacttgaaagatcccatgtccaatgttgtagcagttggaagaattgaagaagaatctaagtcattgatttcagtggcaatattggctgagaagccagcagccatgttgtattctcctgctccttttgttggtgatgcaaatggactatcaggaagattatgctccaaactgcaattaattagttagttaataatcttgattaaattatacttttgtctaatccccgaaactcgaaaaatatgtgcacgcaaaatatgtactcgaaaaatgttgctaacctatctaacaaatcgccgatttcatcacgggggctttctctatcgttgctgttttcgtcattggagtttgattctttcccaattggcagatccgaagaagaattcggagttggagtaccagagccattttctaacacaaaaccaaaatgttaaaaaaatctctaagtgtaacaaatattagatagtctcacgtcgctaataaaatatataaaaggaatgggctactactctcgttaccagaaagaaccccattcatcttattctaaattctaa

SEQ ID NO: 20944 - DNA, 4378 bp, Cannabis sativa
  modified_base (3655)..(3658): a, c, t, g, unknown or other
  modified_base (3741)..(3765): a, c, t, g, unknown or other
  modified_base (4031)..(4034): a, c, t, g, unknown or other
tgtaaagggttttatttagggcacaaaacccaacaggttgtccgacgtatgcaacggagaggagagggagaacgacgggaggtggggtaggtggagatcgattgacgagagagacgagaagaaatggagatcgagagagggaagaagacggcgagagaggagggtgatggtgcggatgtgtgggtggggttttggagagttaagatttttgttttagggtgtcggaaatggagaagaaataggtgggaagaagtgggtgggcatgtgggaaatagaaaagaagtaggtgggcacgtgagaaatgtggcaagaagtaggcaacgatttttttattgggctcttgtacccgacggttgaaaaccgatccctatgagggccaaataaattttacgaattccaattaaaattgtcccctattcttgtaattactgttataaactgtcaggaatagtaattttctcgacggttttaaatagttacttaatttttttagcgacagtctccaaaaaaatagtttttaggatcgtcgcgaattctgacttttgtagtagtgcagttaccttttcctcttcctctataagaaattagtttttcaagtgggattatagcatccacaagtgttccatcaagtgcaccaatagcccctgcaatacattaataagttcaaatatttataacatatattttataatacatttatgattagagaaacaatacaataaaaaaaattctaataattttttgagcaattggaaaattagaatcaagattaattgtgggtactatgatctcttttgaaaagtgaatcattgattcaagaacctcaagaaaatacttgcgaacaatttgtgaagaatgttaaaatcttcatttcatgataataaattgatcattatgtgctatggtagttaaaaatattgctatcttttcttcaactgatacatgcttactatctttaatcctttctctttgtctaaagtcattagacaaaaatacaaatgcatcatgagacatccacatcaactctatgcattgtagatttgagccatataataactccaatgtgtatcttgtaccagatagagttaatgtagtatctttaactctaggtatatagttgcgtttacaatatacataccagtagaagatcattatgagtaaaagttgatctttaaaatttatataaaatctgttaagaaaattatagcgactttagaggaacaaaaataatactaggacgaaaaataaaatattcatagattattgaaataaatcaataaacttcagtacacaaaatcaaaaaagtattacataatgtaacaaataaaaagttatctaagcataattataacttaatcaactatatcaaaaatatcctaattttttcccatagcttaacccaattctctattaatgtgatgtctttcatgttcatccatgcttttctatagctatcgccatcacaaagtacaccaatagtttcaatatacaaaggctcctcccatccaagtccatctaatatttccatgtagtcctcaatttcaggatcattactttttttaatcaacaacttcaatgcaacagacttcttatcatcaatatcttgttgagataagaactttcctttcttcttttttcctcctaaaggatttgaatattgagatggagaagtgtttacaacgtcattaatttggttaccaagtgcactttcttcagcaaacacaccatatttacatatgtagataaagtaacaggtcgaggaattgtacaactaggaccaactataaactccaactatcatagtaccatgaaagagtgctctacaatgttccagaaatagtaaaagagaggttttcaatgcttttgtcttttggtgtgcctatatcaaattcaaaaagagagtatgcccactcatgccaaagcaatacctagcatagtgaggaagactgtgtccaaccaaattgaaggagagaaaagctaagttcaaatcttgataatgctcgctacagtcaggaatcaagggctagagatctaaatggaaggagtcattatattttgttgtcatcaatataaggatttcttaatcacttatgtgtttatttcaatattttatgaaattcatatttaggatgttagattatagattataatcatacatgttagtaaatctagattctggtaaaacaagtgccaataattttcctaagagctttagtaataatttattttcatgaagtatggatttaaaaaaatgatttagttgatttggaagtgttcatgttggtttacgtgttaattgatgattgaatgtgaattacaaaatttttctatgaaacataatcttattttcgttctaaaaatattttatttggataccttgaaaaattttagttttacggatctcaatttggattaaaattgggaaagatatgaaatttttaaaattggaggttggcagccacacacgaactagggttttggccttgaaacccctcatcagtgcgtgaaattcagacaaattttgtttgaaatcctctgccaacactcgctcagacaacgaaagcctcgcgcacaagggaccctagaagtgacaaagtttccttggtcagggactatgcaaatctcaaccacgaccgcgatttacacacagaacaaggctgcttgcagcttttcttggcagccaagggttctttgcacgcgaaattcaatttttttgtgattttttcaccaaattttaaatttttctatttcaaaacaccaaatgtcaatataaaatattatttttaatatgtgaacctaaatatcaaagtttaaaattaataatatttaattattttaatagtgtagtattagtttttgacattttgatgtttaaatttaaaaattagttattttatattttaattaaagttagtttttaaaaatttattaattttttaaattttacagattatttagttataagattagatattttaattttagatatattttaaattaaaagatatttattttatcttcttaatttaaaatattatattataaattatcataaatatcctaaccataataattttaaattcataaatttgttattttgtgatataatttatgatttaaaaatcataagttagaaaaataatatttattacaatattatatcattttaattattaaaattttttaaataatattatatatatttaaataaccttgatgaaattttgaaaaaggcttaatataagatattttagaatataattttgaaaattatcatttatttattattttattttttaaataatactttcttaactatatctagtctaaaatttatttatttcattattttaattatattaaataaaatattgggcaaatttcacacatagtggccggccactaaagtggccttttactagttacaattttgccactttatttcaattagttattcttctttcaacaatttcatattttcaatttcaatcctataaatgtcaaaactatttatttcataattataattaattattacataaaatttccatttatattatttattaattagaacatacaaagtctcttaattaataaattaacctcaaaatctcttttcttcacaattaagtccttgcttagtaaaaattcatannnnagacatagtctaatttaagaattgtagttgattaattaaaaccaattaactgagtatgtaaacaatattatctcaactagtgnnnnnnnnnnnnnnnnnnnnnnnnnagcttccaataagtagatctataattttaaaaaaaaaatctttaacttattaattcctccttgtgccactatagattcgaaattgcactctcaattatatagaacactatgtatgtaccaagatagagacaggttatgatatccattgttacaatcctaatagttaaagatcctctctagatgatctacatcaaatagggataaatttaccgtttcacccttcaatgtattaaaacacttagctacctataaatgatatttcaatnnnntaatataattactgaaatgagaccccaatcatttatctctatcaagcaaagctcaaaagaaatcattgtttcacttctaaatacttataaaagttatagattccatgtcaatgattagcgctcccactcaattgaacaaccatgttccaaagctgtatctgtcagaaccattggttagctttcacaaacagctgaaagatcataaataatacagttgaattgaacctaaccatatcaagattaagatccatacatctaagatcaaccagtgatattaacttagaaagatataatggtaagtttaagatatcttatccaagatcaatatcggtccaatccaatgt

SEQ ID NO: 20945 - DNA, 4436 bp, Cannabis sativa
agattgcactgtaattgaaaaagcactgtagcgtgacttagcattagggcgttacagtcatgttctcgccctgtaccaactcaacaaactccttccactttgcactgcgaattgccgcattgtaatacttagcattaaacaagtcccagaatttttcccaggtcattctagcaacatccttagtgagggacaccatctcccaccacactaaggcatcttcctgaaattgaaacgtggcacatgccaccctgtcatttccgaccacgcccataaaattcaatatcctctcaatcactgtcagccactgttctgccttaagcacatcaggaccacccaagaacactgggggtgcttgcttcctaaagctctcatatgaaggctctatacggttactagcaataggttgtctgctggcaccgcaggaatcgcaacagcaggaggctgcaaaggaggcccaataggagcatcccgttgtctaagccttcgaatctcatcttcttgttgagtaattttggcttgcatctcagtaaacctctgctcccaatcaattggagcctgaggtggattctattgaccacccctaggagcacgaccgtagcctctaccgcgtccacaggagttttggggatttctaccaccccgaccacctccagtctcaactatttcgccccgtcctctaacgtttcgttgggcgtccattacttaggacttagcctgcgaacccatgaggcatgcaggttagacagtggtcaaaatattttcaagaccacatttagagttaaataacaattaatcatatgcaatatatatcttaaacagtttgcaaaaagtaaagcttatgaaactgtgaattgagctcaacactggccttgattgtacatattttgacggtcttcagtgaacaacctggtggctctgatacaaaactgtaacacgcgtatttaaaacttgctaaactcaaatatgaaatcttaaatatattatagatattaaaactttatagtcaggatcccaagctttacaaaacgtagttgaaaatttacactttactgtatataaagtagtaaactttccttagtatatattttttaacaacaggtaactcaaaatattgaaagattgaaaccctccaggttacactgccgcgatatgtacaatcactgttgagcgtcaattcactattcctctagcttagccttccctttacctacacaaggtagcaaactgaatggttaagaacgttcttaatggaagtacgaccattgtaccatatgcactaaagtaccaattctatactcgttttggtagggtcttcactatactcccaggagttactaagtgttgtaccacatgcatgacgtacctcccctggtactcttgttggtaacactgtaactattctattatcttacactatactaacactcttaaaccacatttccattagcgttagtagtgtaagcaattaacacaagcatacaatcggctatacatattatttatgctatcttacctcgttccagattcaagcgttccggtcgacttgaattgaaaatccttgagctagacggaggtcctaagtcacataatacaattagataaattacttgaacaactaatacaaaaaactaactcaaaacctagagtaatcttaatgacacattcaacgtactatcaccctaaatactaaggaaaaccaaaccatgctcgaaaaataacacagattcacaaaagttgagatttcagggtcctggcatgtaaaccggtgaaccggttttacataccctgtaaaacaggtggaccggttggcaccaatgaaccccaaaaatcgcacagctcgtccaaatcttccccaaacgcaaccataccttccaaaacacctgaaaatacattctaagacaattctcaaacaataatagcaagaaaaacacaacagaatccaacatgccattgttgagtcaagtttgagctccatgaactcaagcttgaccaacctcacaaattaccaccaaaaataattccaacaattttaaaacatcatttaagacctactgaagctaaccctaaacgaaaattatcaacacgtaatcaaattcatcaaaatcatccctaaacctaacaaaaccttccaaaaacatcataaactcacaatagaacaagcttagggtttttacctcagatcaagccctcaaattccacctaatagtctctgaaattgaaagaaaatcccccttggctgacgattcttgctgtccgaacaaagaagaaggagaacaatgaaggggtttttcctcttctattccttattactcaaattaactaataaaaggttatttaattaacctttacctaattaattggaagttgtcaagatatggtgaagacaaccaattaaaataaaggtaattttctaaattacccccatcactaaacctagttcaaaaatcggcttaggagtaaaatggtccacaaccacaaccccaccaacaccaaccatttgaacttacatgacatattttctaacattaccaaattctatatttcctcaagtgactaaaatatcctccgttgcattttctatcgtcgctgagctaaaatcacagagatggcatattttacatttaacttaatcatttacataaaatttcaatattaatgataataataataaaattagcacttattacctcactaatctatattcaaatattgcggtagctacacttgaaggcatatttttccagaagcaaataaaatgccccaatttcaatttttcctatatctaacaaagcttgattatatgatacgaccttaattgatataaggaaagtacaattgcacatttgtatatatttttattaactgatataagtttgagttggctaatagttttaattgattgtatattatggtttaatatctatcattttagatttgcttattgctaaaaaggctatcgtttaatattggtgatctttttttcgatctcatctttagttttgcttgtagcaaaaatattaaagtttttcaaaaataaaaattattttttaatcttcaacaaccaaaaaaagatatatttttatataaaattttctttaataaatatgaaaaaaagggaaggaggaggagagagagcacgtgaaaaaaaattaacttatctttacttttataattattttattaactctttcaatttttttattagattttaaactatcatttgtttcatttttaaattttaaacaaaacataaaaataaatcttgagtctaaaattatctctaaaattcttatttttttaataagaatttgtttaataattttaaattatagagagtttggctacaagtattttaatactttaagtgcaaaaataaattattgttaagaaaatcttatttagtaacaaattgcaaaaaaaaaaaaaaaaaattaattagtatcgtaattaatttaatttttaataaaattaatcctatttaaattttatcaaaataagaaagtattagtttacaagttatctattattttattttatttaatttctaaattaatcacaaccatttaatagtgatttaatgactaaaaataaatgtaaccatgatggttacatatttgatttaactattggaactttttttttatatatattagggtaagtctacatcgatcacactctcttaaatgggtgtttcgatacgtcctctatttgtttctgcattaaggggagcttcttaatttattatttttcataatcatgtacgttgtaactatttaacaccacatgtaaattttcagaaaattttcagtagtttacaatactaaaaataagatttacatattttgttgtacgtacaactatttttcttatacatgttgtaagtaagtgtttaaagtttattttcgacactgtaaaatatttttttaaaaaaaaaaattacaagtagtcctaaatagctacaacatatgtgattatgaaagcaaaaatagactaaaaaattcttctaaatgtcaaaatagataaaagaaaaattacgagaatcacacttaagaatgttgggtccgccccttgttagtgagcttggactattcaagggcttaaggcccattttggtttaaaaaaaattaaaagaaaaaaaaaaagagagaagtaggagagggcttcgtgagcagcaagccaaaaagaaaacaaaaaaagagaaagagagggaaagaagagaaagaaagctagagagagaaaggggttttgccattttgcattgaagatcaagtggtggattctcatccattttagctcaaattttgggtggtgaattcttgcaaggtgcacttcaaatctgccggtttcgatttggcgattgtcctctctaaggtgctcttctataatacccacttggtgagacccaaactttttctatttgtgtatccatcttttga

SEQ ID NO: 20946 - DNA, 3870 bp, Cannabis sativa
tacgaccttcccaactctgtattcacttgagcatcttatctttcagaaaacccaatattgcatctttattcctccccatagtacaaggaagtcccaatattgcatctttgatataaatattttattttaacataacttgtatttttgtttttataattcttagataattattaccatgcagaggtaatacctcaactgttattttattacatacaatgcggagtttaattttatttataacacgagacaaaaaataaaataaaactataattacatggaaattatttcaataaagagtaacacttgttcgaaaaaaatagagtaaaacttgaaggtggttttactctctttatctatgtatgtatttttcttacaaaaaaataaaaataaaatagctttattgtgttctttaaagccttagtatattgtgaacttgtgttggtggttaatagtaataccattttgacatggctcttgggttagctctcttctaaagcatctttacttgtataagaaatgttttgttctgttgccattaatagataatgtcaatttcactttttatggtccctcaatatcatatcaactttgtgcagggactgatgtccaatggacaagaaatagctgtgaagaagctatcactgacttcaagacagggagtgagagaatttacaaatgaggtgaaattgttactgagacttcagcacaagaacttggtgacattgttgggatgctgtgtggaaggaccagagaagatgctcgtttacgagtatttgccaaacaaaagtcttgattattttctatttggttagatacttaatgtttgagacttttgtatgctgcgaaagaatttcatataggctttggcacacgtgaaaaaagctaatactaacaggtgttgtgaaatatttacagataaaaaaaagtctgcatctttggattggacgactagatttcggatagttatgggtgtggctagaggtcttctctacctgcatgaagaagctccagaaaggatcatccatagggacattaaagctagtaacatattgttggatgaaaaactcagtccgaaaatctcagattttggcttggctagactcttcccaggcgaggacacccatgtaaatacatttaggatttctggtactcggtgagtagtttctcgagcttgcctgtgctttgtatttgctttagatcaaaactctaacgttatgccatagtgtattagacgattattccaattttgttctgttacatctttggcttgtactgtcaaccaagaacacaaatattttaaaattcactaattatatagtaattttgccttgcagtggttacatggctcctgaatatgcaatgcgtggatttttatctgtgaagacagatgtgtttagttacgggattttggttctagagattgtaagtggtagaaagaatcatgatacgcatcttgctggagaaaagtcagatcttctgaattttgtaagtcactgttttctagttttcgactaaatgtatgttcttgcttctattttttgaaaagtgattaaatcacataatgattgaaataaactagtgtggtggaatgtgatcttttctatttaaaaaagtccattgtctatatgtatgcaaattgaagtcatcagccccaaaaattgcaatcaacatgagaaaaatgtgtcctataaatcaccttaaaatcaaataaacattgataagtaacaaatgttcagtgtttgttcaataaatttctatatttgttaccagttctcaatctctttgattgatcatggcatgcctacttgtaaaaggaataaatctttattcaacattcaacttacaaatacaaataactgttttgaatcacattgaagaatcctatttgatttgtgcacatacaacaatatctgacgatccctgaattgtcgctatccaatgtatgcagtctcactttaaaataatagagattttttttttcgaaggggcattgtttcgccactgagattcctctcgtttttggttgctaaagatatttacttttggctgatctatttattgagcacacaactaatcatcactcccatttttcatcatgcatttccttacacttttttctcttttcccagacatggatgctatatcaaggaggaaaagcgctagacattcttgacccgaatcttaccaagtgcaaccgtgatgaggctgcaatgtgcattcaactgggattgttgtgttgtcaagcaactgttgctgatagacctgacatgaacgctgttcatctcatgctctcgagcgactcatttactttgccaagaccaacgaaacctggaatccagggccgtgtaggacgttggacgactgcctcttcttcagcttttacaaatacaaaccctagtagtggatacactggtgggacaagggcttcagccagtggcagtattattgttgaagagtgttctagaaactctatgtctgtatcttctatagatgaaggtaggtgaaatatttttgtatagtctcactaaatgctcaattttaccatgtaaagttcttttcattttattttttttttcattttttttatatatataatgttgaagtattcaggcaggtgatacaaatcttttcaattcgttttctagtgaaattgttcacgtagttcgtactaattttttagatgtaaaattgacaagttgagcagatgccatgttatcatatccaattaaatttataaatggtttttaccaatttaaattttatattttgcatcattacttgtttggacctctgaaaaaattaattattagctataccagaagctcaaggatgaatctttatcaacacattgatagataggtcgttaaaggcaatatctaattgaataattagtaattttactctgaatttttgacaatattaattttgttttctaaaatatacaatttgttaagaatttcctctaaacttttatatttatagattagtttttctgttaggtttcgtcttattattccgttttgtagaagctcaaaggtagagaaaggaagaaagaaagtgcagagcaatgaacaaagaaaaacagagtaaaggtgccaaaagagcttaaccattatggttagctgatacatttatttatatagtttagtaattacaaagtttgtacaattaactaactttttgaacagaaaacaaacacaacaactaatctaacagaacacctaactaactttgctattgtcacacgtgttctggtttacatcccccctcaaacgaaatggcgaaattgccatatgaagtttgtctttgagatagttgtagcgttcagtagagagagactttgtgagaatgtcagctgtttgatccacagaaggaacatatcggacagcaagctgtttggtgaggataagatcacgaacaaagtgcaagtcaatttcgatgtgcgtgcatcgagcatgaaacacaggattggcagctaaggcagtggcaccttgattatccacccacaacacaggtgcttgaggcataggaacttgtagttcagataatagatatgttagccatttaatctcagcagctgcattagccaaagcacgaaactcactctcggtactagccgagccactacttgctgtttcttggcagaccatgacaccaagttgtggcctaagaacacagcatatcctcttgtggaacgcctatcatccacacaactggcgcagtcgacgtcactgtaagcatgaagagtgaaacactcagattgttgaagctttaacccgtaagatatagtgccttttaaataatggagtaatcgtttgcaagcctcacaatgagtggttgtaggagcatgtatatgttggaaattatttt

SEQ ID NO: 20947 - DNA, 5030 bp, Cannabis sativa
aaataaccgtaaaataataaaatataataattttttttaaaaaaaagtgaagttttggtaatatatgtaatttaaaagtgtgttgtaagagatagtcattttgcatgtaataatactaattattaagacaaactttttttacagcaattattaagacaaacattaataatgatgttaattctttggcattgctttatggcaaagggcttaggccttaagttgatatgattgaatacatagatttttttttaattgtatttgaaatcagtatattttacacaataatatatacttcaacttcaacaacacaaaacatgttaatgatcaatctttataatacataatagattctgaactaacaatattgacgcatcttcgccataatcttggagagaagaattgccagtctaagtactagattttgacataaaacttttatataaatatatatatatatgacttagaattttcctcaaaaattaacaacaggctgaataaagaactacaaaaatggaacaagccagtccttcactagttaaaacatttccacaaataatggtaacctatcaaaattagatgacaacgtttattatttacctctttcactcttaaacattgtgtaagctatctcactccgatttgcatgaatcaagatcaacatcctcctcctcagactcgagttgcttcccaaattttctcaatgcaatcgaatacacagttttctttttcattgatgttccactagccactaatttaacagcctgtgtacaataagaaagaatgtcaaatgccagtgtagtagtcgcagagcgggaatgtcacaacaagtccagatagaaagttcattctaatgaaatgcgacagccattaccgaagaaagactatgaccatttgagatcagatggcttaattccttctcaagctcacaatctgatggagtttcaacagtaggctttgcctttccttcaattaacaaagtaatctcaccctttggcttatgaacagaaaatgcttcttttgcttcccctaatgtaccccgccaaaactaatgaaacatatcatcataatcaattcaaaattccataaaacagatacaaatccagtgtattacatacacttacagggactagaagatgcaaatattttttgaaaatttatgccaaaaatatagatcaatcagtctattacacatgtacttattttttcttatgcgcatgtggaacaagttttctgaactctattttcggtactaatttaactgaacaaaaaaaattcaaaaatttacagaatgtcgtaagtatcaatgtgcgagtgcaccaatacaccctttttgagggtacatttgaaccaaccatatcttcttcattaaaccatgaataatctattttgaaaaggtgtctctaaccatgaaggcctctgaacttagaagttacagcaacaaggaaatgaaaaagatagtttagtgaacttaaaagtacagcaacaaggaaatgaaaaagatacttataggtatagaatgtaaagagaaagtagtatattgagtaaaagcaaggaaggtaggacaattcatgtaatttcaaaatagatatatatcaaggtcctaggtcatcaaatgattgggtgactagttcactcatttaaaagtcaagttctgacaaaagatgaagattctgcaaacggtagggaaacagccctgctatacatccgaatatattctatgaaatgattatcatttaaaatatacctgttcatgtagtttggttatttcacgagctatgacacatcgcctgcacaaattataagttacagaacaattaaaaatcaatacgggatggtgaggctgtagccgttggtctgtatttggtttggtttggtttgattaacaaatttcttttcttgatcaaaagaaaaaaataaatcaataagggagatcaaattatatggtgtaattaaacaagctaaaaatactttgataaataaagtaaaacatcaaagcaacagtgaatttctgactttacaaatcttataatacgtgcagtgccaaatgtagtaaacaaagatgagagtagctctgataatacaaatattaacacatttcagtgttggtaacaaggtacacaaggaaatgacataaaagtgaaattacatagaatagtaatgtatgggacagcaccaaaatgtttaccttgtatcactgaatagcacagaagtctcttcgagaaattgaagaagcttgtgtggaggtacatagaatatctgtgttgttgcttcatttgcggaaaccattagcctctcctttctagagcttgtgtgtttgggaagaaatccaactacagcatgattttgaattcataacacacaagtaatatagacaccatcacaccaagaagtagaagcagaacaccaaaatctacagcaaactcaccaaatgtaaactcatcagtggccagaccagaggcagaaagagcagccacgaaagcagatgggccgggaataggaatgacgggaatattctcattgacgcatagcttagcctacatgaaggtcatgttatatacattcatcgacttcattagttgaaattgagtgaaaagttaaaagggcaaactatattctagcaaactcaccaattcggtaccaggatcactaatacctggtgttccagcatcactaatcagtgcaacaatctcaccttccttcaacctccttaacaccgtttgttccctttgagattcattgaatttatgatagcttaactgtaaaaatctaaaactgagaattagaatcaacttcaacgcgaataacaaatagtaaaatgagttagatggttaaaagattagaaaagcttacaaggggagttgttatattgtaatgatgtaaaagcttcccagaatgtctggtgtcttctgaaagtatcacatgagctgattttagaacacggagagccctgcaatgaaaaataccaagtctttgtggagtgccatagcaaccaaataaacaggggagaaaaagttgcaatggggtttgtgaaatagtatgagtaccgtaaagtgatatcttcaaggttaccaatcggtgttcctactagatataatccagattccagaggaccctgaaacaagaaccgtgccacatccataaccaaagaacattaacaccaccctaagcaaaattttacagaagggttaaaatttacaaaatagagtactcaaccggaaagtgctagggtttaggaaggtttcaaagaaccagattactattatagaatgaaatcttacacgctttgatgattctttggggaatacatcaccagattctgctgaaatttgaggactggaacaaaaggatacaacaccggttctataatggaagatggcaagggatagggaagaaaagagtgatgtctgagagtcgagtaggaccggaagtgcactccagcgccacgagagaggtctggccagcgaaaccgccggagaagaaactacctgtgttaacatttgctcctttgctttgcaccttcaattctgagttcctagtctgatcctgaaactcttcagcagtaaaaattaattgttggttaaaccccatttccttgcaattagttatatcaatgcaaacctgtgaactatttcttacacaaaaccaaaatgtttcgaaaccacacaaacacaagaactacattttcaaatcaattaaacaaaaccatttataagtaccagtgctagtctccttctacacttttgaagctattgaaagtgcaagaactatttacttgaacattttgcttattaatagctttgaagaagtctctgactcaggatacaactatcacattttcacacacatgtatggaatggatttgatttaaccaagcatgtcaatatgtttcttagaattgcccaagctcattgataagcctaaaatttcatgtgatgaacccgaatctaaacatttataaaataaaaacatctaacagcgagaacatatgatggcaccttcaagcttcagcccctcatatcacacatgactaaaactaatgcaggtaaattgtttctctacaaaaccactcccacatgggaatataaagaaaacttctgaaagtagtaaacattaaacagaaaatatatgagacaaccagattttaactgcaagaatttttgtaagggtatcatcgaggatgatactgaatatgtaaactaacctttagtaaaataattttaaaaaactaaagtgatatattacatttctaaccatatcaatacatcaactattttgaaaaacttaccaattcaataaaatttgaaattccatatttatctaattttttttttcatttattttgaaaaatttacaaaatctctacagaaactcataaacctatattcatcaccaataacaatatttatcaataactaaattaaattttagaataatcattacaattataacgaatttaaactttttcattccttatttccttcatcattttaagaatagcaagcaaaaataaatggtgttatgagctcactagtgaatgaaacaaaatttgctacgaaatggttgagtttcataaaagtagggagggaacgtgttgagtacggacgccattgaagccgagtagagctgagctccccaaaacagagggaagaggttctgggttttgggttttgggttttgggctcactagttttagttgataactctggttagagatagactccccactctttggccatctctactgattttatctgaaaattaatgaaatttaaggctcattaataaataaataattaattaatcattaattatttttttaaatcactcattaattatttttttttattttttttttaaggctcattaattttttttttatttttttaaatatccaattcattcaaaacaaaaataattaatcataaaaaaaaatagtaatgtaaagtaaagcaacaaggagttttatatgttgttatattaagtttttttattaagttgtttaccgcaaataaataagtttacttatttaa

SEQ ID NO: 20948 - DNA, 6436 bp, Cannabis sativa
aacaacatctccaagaactagtgatcagctttgccagaacgcggaaatagactaagtgatatcaaaatatcacttaggaatcataaatttcatcccttggacatcttttccacttacccagcatctgttgacatcatatgtcaacctaggcgctgggatgtcaacctgaacgttgggtcatgaacagtgttcagtaaaatgatcataactcactcaatatggatctgattgatgtgattcaatttgcgttttgaagctatttcaatgctctatcaagtcatgtctcacacttcaatcataattctaaatctatcggtcccaaatttcatccctaagggagttacaaaaataagcttcgacttacacggagtaggtctcgtcgtcgcgactcgaactctgaaaattgatgatcaactttagaagttaattttcaccgttagatcatcatctatggtcaaaaataaacaacttttatttttctcctatttttgtgggcctcctttacctataaaaggagaactcccttaattcgtttttcagattcaaaaaactaccgacaaggtcagagcttctctctctagaaattggagctttgacactataataccatcttgtgagaaataaaaactcgaagtagatgtaactccattactgttaccatacagggaatgaactacgataaattgttgtttctctctttacttttacttaataaatatttcattctcgccaatctagcaagcgggtgtagcttagaagtctgtgtccgaatttctgagacaacagtaaaataacaataaaaaaaataaaaataatgatgagcatgttaattattacaaatgaaaaatgattaatgcaatttttttctaaatatttttttaaaaaagaatcataatagaaatatatgttttaaatatgtgtagggtttaaatttaaattgattgcttaaaaaaaatattttattacatagccacatttaatataaaagtgatataagataaaaggtacgagatatatgtagtaaatataaatttaaattataattttttttaaaaaaaaaacaacactttttattatgtagtcatatttaatatatatatatatatatatgtatatatatttcttttaaagtatctatatcctactacaatataatttaaatattttatttgaaaatttttgttacaacttataataacactcaataagccaatgctaccatatatagaaaaaaaaatataaattgagttgtactatttagagtagcaatatccaatctaataaaattaaatgaaactgattcaattcaatctaattataaaaaattagatattcaattacaattggattggatgttaaaagttcaattctaattggattggatcgcttattggatgtcaatttcaaaattcaattaaaaactgatctaatccaattacatttatatattttaaaaaaatatttatacttatttatataataaaaatattaatattttaattatatttttggtggttttttttttgttaattttataacacttaattattttgtgtatttgttagttatcttgtgtatgtgttttcatgatgttttgttatattttattacttgacagtattgttgttttagttattttaaatttttaattgtattaaatttgtaatgataatatctttatagaattaaacttaaagaaatgatgatatttaatttttgcttatttttttcatattatgaaattaatattaaaaaatagatatgtaattatagattggattagattttgagttttaattgaattggattacttttttttacattcattctatcgttttttttattatagaaatgctaaatattacatgtgtttagtatttgtaggaattctcatattattatttatttgaataatttaacattaaatctcatttatcttactttaataataattaaaacaactgttaaacatttatagtgcgctaatgctctttctttagcaagaaaaatactgaaaaacaataagatttcttttttataataatgtgacatatggcacaaaaccttgtgactcgccaaattattattgttgcgctatgagctgtatagcatttcaacatttcaaccattattgataacattttctttctttttttttctgaaaattattgacataacatttgcatgggggaaatttttgttttcttcttcgttattgggtgaaagtactaatcaattttgtgaacacacaaatacacgtagcatcagtttcaacctttattggcttgacctaaaaacaaaaagaaaacaaattgtcttataatgcagttatctcaacagtggtgagccaaaaggcagagactggttgcccgcggaatgtgacgtttcaattcgaccaggatggttttggcacaaagcagaatcgccaaagaagctaagcaagttactagaaatttactacaactcagttggaagaaactgtgttttactactcaatgtgccccctaacacaatggggcttatatcccaaaaagacgtaaaaagactcaaggaatttagaaatgcaattgacacaatattctccactaatttggttgagaaattcttcttaatcaaggctagtagccaaagaggaggcaaaggaagtagctatggaccggaaaacgttatcgataatgaccatttatggacttattggtcccctaaggatgatgatgatgcaaaaggggaccattggattgagttcagatcaagtacggatgaagggctgagattcaatgttgttaggatccaagaagccattgggcttggtcagaggatcaaacgacatgagatttacgtggatggtaaaagagtggcgaatggaacgacagtgggttacaagagacttcacaggcttgaaggtggtgtggtccatggccgaattgtgagaattagaatcttagaatatagagcattaccattgatatcttctgttggtttacattttgatccatattggaacccttaattaattggttagactacgttcggaaaagacaaatctatagctaaccaatttgtataagaaagcaaatattagacattgatatatattatcaactacctatgtttagatacttatcaaaaactacctatgattatttaataaatgaataaactgcaatattttgcagactgcagtacacaaacttgagaaagtgaatgaatcaatgtggtaaagtgcacaatttattatttattttatttatattatataaaatagcatgcctatatgttcagcacaaatgttattatttttgtttattcctcacagattcctgtcccagtcaatgtatttaggacttttaatagtcagcctggggcaaaagttaatgagagtaaaataataaaattaaaaaagagaaacataacatgtaaaagttatagcatataaaaacacttgtagccaacatctaagatagcacggagacctgataattaccatcatgataacatacgtacttatcaagtttcatatcatcatataacacactcaacactcgtagtaatctctccattgccacatcaggcgatcctcttactgaaaattcatgaaccatcccatcaatttcaatcatgctgcagcctacgacttccttttttattcccgtgtcttccatcaatgttctaatgctctttgcatctttaaatctacaagatttggcatatatatcacacaaattcacgtagaaagcatgattcagaggttccaaatcaattaaatacttggccaccctttctcctaattcttctttcccatgcatttgacagcctccaagtaatgctccccaaacaaatacatctggcttcatgggcatgtcccttataaccctttctgcctcgtcaaatagccctgctcggccaagtatatcaaccaaacatgcatagtgatggacctgtggctcaattaagtgaacacgtttcatcacatcaaaacaccagcgacctttctcgacaaaaccagcatgagaacaagctgacagtagcccaacaaacgttacatggtttggtttcaccccagtcatttccatctctccaaacagatcaaaagcctctgtactgaatccatggagagctaatactgaaatcattgcggtatatgccaaagtatccttctctggcatttccttgaaaaccatacaagctcgttcaatgcttccacatttaccatacatgtcaaccagagctgtaccaatcaccacatcacactccacaccacacctactcatataattatgcacccattttccatgatcaatggaaccaagatgagcgcaagcagcaagaacaccggctaaagtaaacttatcgggtctaaccatatcactgcttactatctgcatttcatggaaaagttgcaatgcctcctttggccgaccaccttgaacaaaccctccaatgattgaattccaagtgactatgttcttgttattcatcatcctaaacagatccagtgcctcctctagacccccacttctcagatacccaacgatgattgagttccaagaaacaacatctcttttaagcatttcatcaaacagtactcgagcagtactcaaaaaaccacatgcagaatacagatttatcaatgaattctgcacataagtatcttcgtagaacccatatctaataatttgacaatgtatactcctaccggtgccactatctaccctcttagcacattccttgacaagaaatgggaaagtgagacaatttggcaaaatcccatcgcaaagcatagatttatacagcagcaaagacttgaaagaataagtcttatcccaaccaaagtctttactggcgtaggctctgatcattatgttatacacatgaagatttgggttctcaatgacccggaaaacatcagcagcatagctgagagaacccgtgtgtgaaatggcgcaaaagaaaaggagacgggaagtgagcaaaaattggtcagtttgctgtatgaatggagattttatgatttgggtgtggatttgtttaagctctctcatgttcttgcattcttcgattagtcgtaatattgcattcttaagatttagcctttgaccttcaatcatactcaacattaatcctttggctccaaagtccaaattacagaaagtttcaggtgatacctgttttagctggtggttcagtaaacacacccaattagtatttcttgcttttttccttcatgagttctcataccccttcagaaaaaattagtacaccaactaatgacaaaatttacatgtttcttcatttattgtcagtcaaaatttgtcccaaaaaaatatctgagagcatgtcaggatctcgattacacttgaaataatacaatataaacttaccctcatcaagaggtacgtttcaaggaaaaaaacaaaaacctgaaaactgagaaatttcaattttcaacccgtacaacttacaagggatctttttctttctttgctttttttttttttttttgcccttaaagaaaaccttcgaccccttttccatctctggtatttttgtatatagtaagggcctcttccatgaccttcgcttgagccagcaactgagctctcttctttcctgatggatgagtcgaaagataatctcttaaagcagattctccagtaaccttgcccaacttctcatacacctttggtgccactctagggtcatacccagctgaagcgatcaatagtagtccaatataatcagcttccgtttccatcctaattaatacacacaaaattcaatgattggcaagggaagtaacttgaacaatatcttggattgcattaacatcaaaaaaagaaaacgaataaaaaagtagattccaatgaaatcatgtttataaccaaagctgttttgttagcctaatacactattgatctaatctaatacttagaaagaattagaatataggtaatttattgatatcaacaaaagaattacaaagttccaaattttccgagacagtttggtatctacacagaaagtatttcactttcttcaacacaaattctcactgatccctctaggaagataggactagcctttataaagacagccactaactgaaaacaaataaaagaaagctaactaactaactagcaagtagcaatacaatcagccctataggaacttaagcttgaactaactctctaactaacttgtgacttattcttacacctgcatatgttaggcgtgtaagcatatatttgaggcctaacatagcctaaaaactatgttccaaaatttgattgcaaccttaaaagaagagaatcaaaagaccatcttcaaaacaaacattcatagtttccaacgtttttaacagcagaatcagagcatgctaacaacctttgtgtgtgtgaatcaattaattatatataaaacactttaactaaaatct

SEQ ID NO: 20949 - DNA, 1652 bp, Cannabis sativa
tcttcctctccttcgtatccaagaggccagtccttacgaaagagagattcctttttctctcttggtaggtcgaagagagagagggcttgcaactcggccgacttagcgagttcggaggagatggagtggttaatgagttggaagaagccgagttgggaagcggaggagaggagatcttccattatactattatttccgacagagtcattatcatcagtccgatcggtaaacgagatcacgggaggacacgtggcagcttggaggcctacgcggcgccgtgtggggagagccagagaaggcgggagccgatggagaagccgagataaggcatcggcgtcggctcctgcgccttcgttggtggacaagaggttattgggttgagtcgagggagtcggcggcggcgctgaggtggcaccaccggcgctgtatatgcttcgatgagttgaggatgccatgatatatatatatatataataattatattcaagtatgaatttttgacttgatcaaatggatgtgttctatctacttctatatatatatatgattactttctttgcttacgaaaatttagttagtctttatagaaataagtagttgtgcatgttatataataattttagtttttttaaatgatcattaattattatttgaggaattacttacgtgttatattatattactggtggtctggagcttttttagtgtggggcacgtgtataattacaacaaatagatttgaaaactgaaatttgacttaaaaagaaaaagaaaaaaaaatctaagctatatatgcaaatgcaacgatatatggctaagcaccataaaaagccatagtgggatcttatatgttcgttaaagtgagttgtaatattgtatgaatgatgacaatttatattaattaattaacaaagttttttttttttgaaatggaattaaccaggtatcttatatgtacagtacattcctctttttggcatgcatgatcattacaagaaattcataaaacactatttatgtatttagttattatttggaacttttttttttaccggggtgaaaatgtaatagtattttagtttcttgaaaatatatagaatatgtataaatgttaatcagggctgctggcctatttatccagcaatcaatggatcctgttttgtattgtttcagtcaattatttatgtactagtgactcagtctgtaaccaataatagactcgaggttttgagcagggttttttatttattttttttttaggatagggttatatatatagtatatatttatacccaaattaaatttaaaatacaaaattagagttgttatgtggtcttttagagcgtctccatcttgttctctaaacacatatattctttagttaaactcatataatggagaatggatagcgagtttcctactagctaaaattaaagaaaaataataaaaatgactcattattttaattatatttaattaaatattagactatcatatcttattttattgatttaattacgcacatagtattaactgattatgggttaaagtttaatattaagagaaatgctaaaggacactagtggtgcttagtacctttctatgtgttaatatcgttattggtccaactaagtatcgggtctcatataatt

SEQ ID NO: 20950 - DNA, 3387 bp, Cannabis sativa
gaaaatcctaagtcttgttttcttggaagatcattacccaaaatcactacaaagattatctctacaagatggattaagatcatcactatctatgtattatggtacgcttccgctatttgaatttttctctttgtatcaacaaaggtattctttagatctatagttatacactcataattatatgtaatatatttatctatggagttgaatattgttattgcaaattttatgagtgataatgaattctaacaagtggaatctgagccacttttgattgattctttgagcatttaaagtttatgttaaaaaaaattgagaattttaattttactctaaaaattagaattttgatcttccattattattttgggttatggttgtttgatatttatctttagactaaagaattaattgggatttggatttggtgattatgaattattgtcgttgatcgaacatatttgattatactttctgatgaattgttgattaagtaattgatttcctttattaaagaaatcatggctgcggcaggtccatgttcttttccatatcagaattgcatttcttttatttatatgtaattttgaattaagtttattgtattatattgttacgtttatagaaatgacttaagtttcagacccggaggaagttatagactcttcgaacactcccagcctcctctcttctgcgagaatgtagatgaatatggtttcttcaaaatcatcttgttcacacttacacccaaatcgtttccacactgtgaaaccttacccaagccccatatctcgagatcttggtggctccgactcctcatccaacggtgaccaagctagctcggctagctccaaccgtccttgtcgcatcaagctgtgaagcccagaccgtaccaagcgcatcaacaataactccggccaacccctcaactccttttcccgtcatcgcatttatgagactccttaaggtattcttcttccctttcaatttttctggtttctgtcaatcgtctctgctaaagaggggattaatcatgatctctaggtataaattcaaaagaaaatttaaatccttacatgaccgaatcctactttccttctgtggggatattatgaacaccatcatctcatcaatttattgctgtggctctcactattcttatcaaaaagaatgtatcaatctagttaatgcacttggtgttgaatgtgttttgccctctatctgaatgagatcttttgtacaactgctctgcttcccattaaatgtttgtactacagggtattatttctactttggggagagtccgattctgcgatgtgatactcaaccactgagtatcatattaattgccttatttggaaatttatctataaaaggacccttgtcttcatcccccagaccaccgatccctagcctttactgtatttcttctctctgttattgcttctgttattttgttttctgcactaacgaagtcaccactatggatgacttaacaaactctcttaccattgctttgaatctcacagataccgaaagcactatccagaccttatatgaacccacccctgcaaacacaaacgaacctgaaaatgtcccgactcaatttttcctggtggcaaatttgcatacggttaaatcatttaaccgtaaggtttttattgaaaaaatgactggaaattggaaccatatctctagattcccggttaccataaccgatcgctctcaaggccttttcttggttgagtttggatgtgagggggataggcgtcgggtgcttctacagcagccttggacctacctcaaccagccccttcttatggatattccaaattccttggatgtcctaaatgggaacaacctcttaaaaatcccactctgggtgcaagttttcaacacaccattcctcaaacgcactgaacaacttgcggaattagtctccgcttctctcggccacctcttagaagtgtatcggccatctttccgtgaaacgtggggcccatattttcgcatcagaatcatgtttgatgtggcacaccctctcccccggggaattcccgtcaatttctcaggaataaacaaggtggtgtggcttgagttaaaatatgaaaatctctcagatacttgctttttctgtggtcgtatgggacacaactataataagggttgtgtggactatatgaaagcttgtgatgaagcccctcttccacctgagctcaaatattatatcaaaaccatttctggcaaagttaaggttactactaattctctgctgtgttctgaacaacttagctttgccaaccatccggtggccacttttatgactttaaatccggctagtgttgtgtgtgtctctctcccggaccccatgccctcaagaccaacccccaacccacggccaaacccaacttgtgggcctatacaagttgggaccttcatcgcatacacaggacactgttacatggactcatggagagacccaacctaacaacaccaatccaccccaagccgaaaataaccaacccactttcacggcactccttaatgccactatgagcaactctagcgtccaaaaagctccgcaagcctagactcctagcttttcaagtacctcacataactctagtagctctaaatctactagttccaagtactgccatgtccctttgcccgtcaacattcctctccttgacactagtaaaaggttggaggctatgaacctaacttaccaacctggtgttgcaaccccttctagctccaaaggcacaaaaaggaaatgcaaacccaattcgaaggatagcttcaagagacaaactgagatgatcaatggggaacttcgccatcaaatcaagcggtcctgctctgacaaccatcaagacaccgagatctctcctggaaacgcaggcctcgccgttgagcaagcctggccgcagccatgaagcttgcagcaggaatgcacgtggtattgggagtgatcgtgcattctgacatctctcccgtttggtctccttatgtaaacctaatattttgtttattatggaatctagactggccaaaaatgctgttgattggcttagagttaggcttcattttgactccggtttggaagtccctaggataggtagaggagggggccttttgttattttggactaatgatgtaactttaacttttctttctcaatccattagtcattttaattgctatgtgtcgctttcttctaataatgtcttttttcatgtcacttgtttttacggatcgcccatcgaggcttatagaccccaaacctagaaaatccttaataggataggcagcaacaatcccagggatccctggcttatcatgggggattttaatgttttccttactttggaggataagcaagga

SEQ ID NO: 20951 - DNA, 7558 bp, Cannabis sativa
  modified_base (7472)..(7485): a, c, t, g, unknown or other
  modified_base (7532)..(7533): a, c, t, g, unknown or other
atcagaacaaattaatataatatataaccgttctttatatctacaaacttggagtagctcaatgaaaccttctacataaatcatatatgtgtggtattattatataccacatctacatttacgtaggtacgtataccattataattttcataatttctacgtggcttgttgaatgtttctgaatatataaaagtccttaattttcagatattataattaagttaattattggtatatggctaataatagtgtgtccaggtcaagatgtacacatatataaattaaatttggtttttgaaccgctttagtctttaattaaggattattgtattgttattgtagtacctacttgtctcaaagtaggagatatgttgctaaaaacacagatgctacttgtgttatacgattttgtgagtttgacttctaataccataaaaaatatttataaagtatatataatttaattaaatatacaagtgaggcaaatgtgaaaccaaatacacagcgtatatttactgttacgtacagctgacaatgacatggtcgatcaaaagatactgttatgtacgcctgtataatcacaactggcagaagtaataaatttctgtgggccaacttattcctataaatacacaagcctttgttgcttctaacaataacctcactcgatctcacacctccctcaattaaaaactactaagttttctaacaggtaaggccattttaatcttattataattactactgctgaattaatttaatgtctttccaagtttagttttcagcattattattaatttcacttctcttttttctttacgcaaaattaaagttttgtttattattgacacaatatatactctagcatttttacactgatgatgtatatttcaatcatttataaattgtacaaaaaaaaaaacttagtttaatatatagcctaattacttttatgcaaataataataaagttaattacttttcatatatataataacaccattgttttatttcatggtttctctatataggtttacctttgcagagatcatgggtacttggcatcctgatcatcaagaagaacatcctctaaattgcataagcaagattctgttggaggaagacatggaagaaggaacctattttttctcagatgctactgttgaagctgctcaaaggtccttttctgatgcacttgcggagaaaaaacatagctcagcagaacaacaacggttaattaatgcttcacgtagtaattattcatcaagatcacagcacatgattaacttagacacagtacataacactactactactcgttcttgcaattgcaatagctgtgatcattgctttaatgtttttagtactgctgctaataagaatgtggacaaaccctttttgcttaatgatgatttcagtagtactattcacgaaccatatagttccaataacaatatgatgatcaactacaacaattttcagctcatttcatcaactacttcccaccttgctcataaaatggggtttgattttgaaggtaaaaattgtcaatatgatcatcacttgaataatagtggattattgatgaaaatgaaaaatataagccaacttgggattgagactttggctagaatgaaggacaagagattattggcagggaattctactgatcatgattctgagctatatgcagaaacttttgatatggttttactggccaatggttgggaaaatcaactcgaaaaatgtgaaatgagcgagtcatcatcaaaagtgtctaatgctagtaattatattgcaaaaaccaggaagaggaaatgtgctgcaggatgtgatgaagatttgcttgatttgagaactcttctcactcattgtgcagaagctgtagcagtcaatgatcgtgacacagccgcagaattactacttcaaattaggagaaacacatctatttcaggtaatggatctcagagactaactcactactttggtaatgcacttgaggcacgattgaatggtattgggaatgagttatacacagcactctctactaaaagaatgtcaattctcacctccttgaaatcttggagactgtttctttcagcttgtcctctcatcaagttatctaactttttcattaaccatacaatcttagagttagctgagaaatcaaacactcttcacatcattcactttggcattttaaatggttttcaatggcctagccttatccagcgcctctcaatgaggcccggaggccctcctttgcttcgaatcactggtatagatctccctctacctgggtttaaaccagctgcaaggcttgaagaaacaggagattatttgggaaactactgtaaaagattcaatgtccctttcgagtacaaaccaataatatcacaagtatgggagaacataacatgtgaagatctcaacattaacaagaatgaaattattgttgtaaactctctgtattcattcaaatacttgcttgatgacactaccgcagggttgcacagctcaagagatgatgttctaaaattggtgaagagtattcgtccagatattttcattcatgggattgttaatggggcttacaatgctccatttttcactacaagattcagagaggcactctactatttctcatctgtatttgatatgttggaggccaattcacctcctgaatatgagcaagacaggaaggtgtacgagcaagagggttttggtaaagagatcttaaatgtgattgcttgtgaaggctcaaaaaggatcgaaaggccagagacctacaagcagtggcacgcaaggaacttaagagctgggttgaagcaacttccgctgagccaagagattatgaagaaagtgaagaaaatgatgaaggagacatgttaccaaaaggaatttttggtcgatgaagataaccaatggatgctgcaaggttggaagggacgagttctatatgctctctcttgttggaaatctacctagctagctagctataagatcgtcatattaaaaagattgtaattaattaatatttatatatattgggaatatattcagttaacctctgtcaagtcagtagttcaatcttaactctactcagatgaatttaaagaaagttgatgttagttataacagttggctttgacactaacatctataaatagaagtgactctactttctcaatacatctccaaggctcataatttcgatttcagagtcaagtttagagagagagtccaagatcttaatgagtgtgtgtgtggagggatgtaatgggagtatcacttttaagatatttccctcattgtgaggcacttctttgtaatcgtctactgtgttgagttgtaatgttacacatatttgattgtgtactgcagaatatacttcatcaataaaaattcacaattcatttattcttgagctaagtttattcttgcctagttttatctaagttcagtttttaattttgtgattggttctagtttgaattgtgtgttcataaacatcgctactattgtaatattagtgttttgagagtaatctttcactagaaatggtatcagagctcagggtttaaagtttaataatcacagccaaccaataagattcatcttcaacattttaataagaatcaaacttaaactttcaagaaccataatcaagcaatcaagaacctagtttgaatggctacaacaagatttgaagtggacaagttcactagttcaaataattttagcttatggagaattaaaataaaagattctccagttcaccaagggatctatgacgcacctgatgttgagccatagaatttattgaagaaaggaagaagaaacttgagattaaagccaaggcatacagtgcctttctcctcagtcatagtgatgaggttttgagggaagtttcagatgaaaataaggctttgggtctctggaataagttggcttcaatttacatgaagaaatctcttacaaacaagttgtatctcaagaagaagttatacacactttgaatggatcagccaaaggaattgacaaagcatctagattattataatagaattattcttgatctgaataagggtgaaaatcgatgatgaagaacaggctataatccaattgagttcacttcctaagacatatgagcagtttattgatacaatcttttatgggaaagaaacttttaccatgacaaaggttaaggctacaattaattctaaagaaatttagaagaaaggagatgagaaagaagagaccaatggtgaatgattacttattgttaaggcaaaattcccaaagatagtatacaagtgaaatcaaaactcaaatggatacaaaggtaaccattcaagatccaattctagaaactccacaggagggccaagctctaatggaactacaagaaagcaatattatcactgcaagaaggagggccactttagagatgattgtttggctttataggataaactaataagagaaaatcatcacaagtccaaaaggcatggacttgttgatgttgcagatggctatgagtcatctgatgcatttttagtgtcatttgatgcacttgtgatgtctagatcagattcaagtggagattggattctagattcaaggtgttcattttagatgacaccaaacaaagaactattcaggacttattcaaagagtcatgggggcacagttcttcttgggaacaacaaagcttgtgagattaaaggtgtgggaataatcttgttattgaatcatgatggagtcatgaacaccttgtagcaggtcagtatgcagatctcaaaagaaatcttttctgtaattgtatgtttgataaacgggagtatgttgtcaaagttgagtaaggtgtaataaaaatctcacaagacactaaaactgtgatgagaggaaaattgagtaatggactatatttcttggttggaaagacaataacctgtagtgcagactgatacaatttatacatttagtgactcgcacaaaaagtgcgggtcactaaatgttttaaccaatatttagtgactcgcattgtgtgacagtaaaaaattcacattatttttcataatgtgggtcactaaaattttagaggttcactaaaagcttatttatttatctatttattttttaaaaaatataaatatatagtgacgtgcattgtggaactctaaaagtgttcagaatcacacaatgcggatcactaaagactcaatataaaataaaaaatggataaaataaaggacatgacatggtgaaatgggacacatgatggtattctagctaggctctcttttttactcttaatttatttattataggaaataaaggaaaaagaaaataaataaataaataaataagatataaaaaaaatatgctgaaaccctaatgccattcccactaactttttcttagaaacaaaccctaaatttccattctctctctcgtgatctcgatctctatctctctatctctcctttgttttggtgtagcgattgtaagccatggctagttctggccatcaacaacccttctctaccccaaaaaatcataacccctcttccatctctgtttctctcttcccttatgcgacggtgctgttaggtcacgatggccaccctctaaacgatagtgtccaaatggaccacatcatggtgctcacaatacctagaaaccaaaatgatgaccattgaccattcgtaggcctcgatgggtgacgacctattcgttcgcacacatcaacggaggaagacttcatcggacgtgacagttcattctcaacctctggttcccaacccaagcttcacgcaactcctccgtctccaatcttctttcccaacgacgggttacccatcatcatccacgagccatcatcgtcaacgagccatatgcagcttgaaatctttgtatttttttcattaaagattgatggggactcgtccatagtaggatttatgggttgttcaaatatgtgacattttggtgttaatttttgtgtaagtgtgatgattaggacaaaatttaaggaagtgaagtgatggaggagaaatcacaatattataccaggccttatcgtgaatttgagatttcattttcttgaatatgtttcatatcttgtattgtaattttatttttgattaagtttaagacattgtattacctattaatttgggattgagatttgcatttagatttttattctattaatttttgtatttttttctgtaaagattaagggatttcggttttgatgtttatgcccatttgttttatatttattttgtccttcaagtgaggtataaattttgatttaactattttttgattcactatatattttgcggtatttttcttatattgatttttatttataggcaaattaaaatgtattaactcttggtatgtagtaattaaattatctcattaattattttattatccaaatataattaattaaatcattattataaatttataatatataatttgaactaaaaaaattaaatattgattttttaaaaaaaaaaatgcatagatatagtgacactcattgagagtagctattgctttcacagtctaacaatatttgactctgaaagcctatagtgacgcgcgatgagggactctaaataggtttagtgacccactccaaagggtcactaaatactgcttttctggtcacccacattagtgacgcatagtgaagggtcactaaatagtttgagtccctcaacccgagtccttgaaacctatttttgtagtagtggcaacacctattattaactaaactaaacatagttaagtaaggctatggaacctcagattggcgcatgtaagtcagaggggacttgaggaaatggaaagtcaaggattgttcaaagagaagctaaaagaaagacttgaactctatgatgaatgtgttttggggaaggctcacagattaaaatttagcaagatataacacatcaccacagaaaggttagcttatgtccattatgatctttgggggccatctaggattccaacgaaaggtaaaggatactatttcatgagtatagttgatgattacaacaggaaagtctgggtttatttgttgaaaagaaaagatgaggctctaggaacctttgacacatggaagaggctgctagaaaactaaattggaaacaaacacaaggtctaaggactgataatggtcttcagtactgctcaaatgagttcaaggacttgtgtgccaaaatgggaatccagagatatagaactgtgatcgaaaccccctcaagaaaatggttttgttgagaggatgaatagaacattgattgagagggttaggtgcatgttactaggatttggtttagacataacattttagagggaagctctaaaaacagcctactacctaatcaacagattctcatctatgccaaacaatttcaagaccccactgttggaaattattttacnnnnnnnnnnnnnntactcacaagtatgttgattaagatcctaaatatgaacttctaaaannattataaaataaacacatataaagt

SEQ ID NO: 20952 - DNA, 4365 bp, Cannabis sativa
gtaaccactaccatcgactgaacctagggccgatccaaaagtatatgaggcctaaaaaaattaaatttttgggttcctttaataataattatagtattttggtgtagtgttaaacatttttaaaactcttaagagctaaatgttcaatcctccatatagctgcatattaaatatttctaaaaaaatgtaaaagtaaaggttgggaatcaatcccttaacccttttgtttaaaatcacactctctaaccataactaaacactattttgttgtatttcttattatttaatattttatctttatactgataatttttttcttcataattttgggactctaagcgtacgggggcccaaggcgcacacgcctggctcgtttcaccttagaatcgaccattattaaatggccagagacccaccaaaactaccgattcaaaaccatatatgaattggaccactttcgaagaaaagtccctttgtgaaccgaagaaaattctaacgaaacacgtgacccatcgcccgagaatcaacacgacctagccaaagagaaatcggtaaccagcaaggacatcacaggaacaaagaagcaaaccatgataatagccaccattgaacctgaacccagtctcaaaggtcaaacacatagccatccccctgactatggcctcaaaccaaacccaaaaaagggtcggagagggagtgtgaaaaagtactagacgacgacatatgcaatacctagatagaaaaccctaggagcgggcccaacatttcaagccaattggaggtcttgggccaaaaaatttaattgagttttttaattttatatgaaaaaaattgtgttttttaattagaagaagagagtcaagaaactggtcatataaaaattgtggaggtgtgtgtgccctatccttaattgattatttctttcttaattaattaattaattaattactgttgtttatctcacttttaggcaaaaacccatgtggaatttggaaaagacaagttggctcttaatgatcaaattcacgtgaaccataataatgctcacacgtgtgagtaattaatatatatgaatttcaattaattaattgatgcttatgagtttatgacacaaatataaatatacacctggtttttccttgccttcaagggtcgcttccaatattaatggtaaaaactaatacatttatctaattattattacaaaaactttaattatttattttgtatttttttttcttctctatatatactaaagtttgacttgagcatcctccccttaatttgaaccattacgagagaatctaaactacctttacaacattattaatacataagaaaattaaattagaacaaacaaaaggtagtcttaattattattcattatatatatagaaatttatccaacttattttaactgtttattgtatatactcatgtagtttcgaagtacaatttttatagtactacttaattttatttatttatattagataaatttaacaaaagaaatgttcaattagaaatctgtgatattttatgtagctatatattccacacgaaaattcttccaactattagatataatcctacattttttcagttggctcttattactggtttagataatgcagcaaccacttctcctttgtgatttctaattacagctccaatgcctaatattggtagtgatgagcattatactccatctggtgtgtaagtcctaagaatgacaagtaatattgatcaattcttttgttcagattggcaacaatgatgacattgatccacgggcattgcatttgaaagttgtatatatcatagtgttcttattcacattattaataaaaataaaatatataatttacttataaatgttcatagtagttatgtgcgtctgtagatacctagtaattttagggccgactttaagtataagcgagtcagactcgtatttagggtctacactttttgaaagctcaaaacaaaaaataaaaaattttattagtcttttatttaagtaaaattaagagtaatataaataataaatattcataacttagtaattaaattgtatgagatattatataatgttatgggttcaaacctcataatattttttttaatatttttaagagctctaaaatttaattcgtcttacattcatatattatcaagaccggccaaactagtatatttatagggtgtaaaggtacgttacgtagcaaaatatcatttaaattaaatgagatgattatagtgtgttttcggcggagttgaccaagtaataaggagttgtatatagttgggtcccttatatttttgcatgcttgatttatcatcatttagaaattttcataattattagaacacctattatgtatatatacatagttatatatataatcattaataatgattgagtgaagctgattagtagctatcacatttgtcaatatcatcacttgattaattacattacaaatcaaacagcacacacattcttttttgcccatataaattttatcttaaataatacatacacacaagtacttataattgcataataattttaatattgatgtaatatatactcaaccaaaatatttatatataccgcgattttttttatttttgaaaaaaaaaattggtatttaattttttacaatttattttcaaaatttagacaataaaatgtattttttttttcttttcttttttggcttcaatatatttatatttactgttctgtactgtatttctttttttgagctaatattgtattataatgtatagaaaattgtataatttgaatatatatataatgtatcaattattactctctcaatttataatatttgattatcaattttttttaaaaaaaaatataatgtctgtcgtatgcatatattataaatagaaactatatatcttcttctatatgattgggcttacccatatcaataaataatgttatttccattttcatctagatatggagtatctatacaaataaataaatatatatataaataattttattaggtacacataaataaaaatgacaagcacacccacactttaggtaacgaagacatgtcaccttaattaatcgaaaatgtactattataatttataagtctgcaaagatttgggcatctcccatttcattcatacttttgtccttctattattattccttttattttttttttctctcttttgttttcatatgtggattatttatagattggtgcaatattagatataagaattattggattgctgacttccaaatttacatctaccaattacaactaaacaattaactcaagttctactaaatttatttttaacaaattttagagaaccaattcctatcattatagtttacacttttttaagcataattaaagtaattctaagttatactcttgttttattttctgtacagtgtttgaagtatgccagaacttttgattgcaaaacacattattttgaactcttactcagccccttcgcattatcaatccaacgaatcaattgactcagatccacagcttttgagttccattccatccaccttttaacctccatcaaatacttcttactatattggtaaagaaaaaaataaatggccaatattctcattcgagtctccaaataataaacatgtttaaattttaatccaccaaaggttcaaatttcgcgatttggtctctgatttaggccaagaacaagaatacaacttgcaaagaattttaaatattttatagattttatttatagaaaatatagatttttgatgttttcatgttatttttatattgtattcttattttattttgttgttgtttttttttattatttgtatgttatttcgatgttttttttttgttactttcatgtaatttttttgttgttgtgttgtttgtatatagtaccgtaaaaatataaaaaaaaatatttaaacttaaaaatataaaaattttacaaaagataacaaattatgtaaatttcccggatttacaatgggtgaacaacacaacattttttttggttacataaaacataaaaagtgtacatgaaccactgtccttgtaatacattttgatgtttttggcttgttgcgttactactgacaatgagacccttcttggtggcctcctcgatcaaaatcatcacctcccaacttatctgaataaacatcaagcttatgaattttgatcgagtcagaaaattatgtttataaatcttcacgaattatgagcatatctctaatgaaaccagagttgatgtcgtttggaaaaagctagaaaatctctttgcgaaaagaacagttggcaataaaatttctctacttag

SEQ ID NO: 20953 - DNA, 1510 bp, Cannabis sativa
gttcaatctataacctttacaaaacacacaatctgaaagtagtatttatccaaaaataataataatctttttttcatccattactcatatatatgtgttaaaacttacaattgaattaatcaaataaaaaataaattaaaattgtattatttgcccggtgtgacaggatagccaatgccatgtcttcgggtcggaaaaaccacaaacaaaagactacaaaccaccccgattcccaccggaactatatccaaaacctcggccgccgccttccccggctgaggacacaaacacatagccacattcctatccctaatcgccacaaccccaaataccaaaaccgacaaaactgcatgaacccaatccacaaacccgattctgtactcccccaaatcgggtaaacccgacccgactgatccacccgacccggtggggcaatcgaagaggaagatccctttgaaggtggctatgccgtagtagactctgccgtcggaggccttgacactgtcggtgaaggaggcgacgaagcacgagagagaaaggagagtcaacaggagaaaagtcaacgttcgggttaccgggtcgcatgacccgttttgggtgaaaataggggtgaggagttggaaggctaggagggtccctgttgggaggagattggctaagttggctgtggttgttagggtttgggatatggctctttggggtaggctctgctgacgtggcggtggcggtggtggttcggtgttggcgggttgatccgggtcgggttttgtttcgggtactgatcttcttgatctaataagagacatgtttgttgttttgtttttttttcttcttaaataaagttattaaggttatgtgtttatatatagctatatattatatatagatatgtattgagtagtggtagtggttaacttgtcgtgaaaggtgtttaagtatttaatattttgtatatataatatgtgtatatatgtggagatgagaattatatatagttataaacagaaactaagaagtatatattatattgaattgtgtcaacgaaagcaaactcacatggagtttgaatatatattatattaattgtttgttcctaagtctataaaagaatatatgtgcataataattaatatgtatttatttgaattgtttttatttattatgattagttattagactaataatggggttaggttgttaattaatttgttgaatatttgcatgcatgttgtcatcataattatgtgtgtataatattataatatgagaattactaaaaagtattattggtgcttagcattattctcggtgtaacattcctatcggtataattaagtatcaggtcctatataaaaaaataacttttagagaatatcgctaactaataacaatactagcaattaattaagttgtggcagaggttaattagaattacaaactccaactagacaccttttgcatatgtgttattattagtacctaattaataatccatttatatatatatata

SEQ ID NO: 20954 - DNA, 4843 bp, Cannabis sativa
ttttcttaatggagaagaagcatgattagctgagaaaccattgtagtccaagttttttttattatcaactaaaatgtgctctgttttatggaatgatatacaatattctattacataattgcccatcattttgtagtcaaaatagcactttttatgtttaagaaagcattttttgacaatttaacaatactattagtgtttgtaggttcaatatgaaagcccattaagtatattcacaaaaacagaacacatcttgcagtttactacataataattataagaagaaaaaaaaaagataattattaaatattggcaaaatgcatttattctattttgatttacggtagttttaaaagagagatcattttaacagactattagtcattatacattagatatgtaatgtgtttaccacttacaacttttgcatgccaatcttagtaggcatacaagaaaaaaatgattttttataatataatatgcatatgaatacatataatatatataggaaattcatataagaagaaaatataataggtttattaacaataattttcttgtttcaaaaaaaaaaaaaaaaaaccaataatcttctatgtctaataaaatatgtgtacattctattttctttttatgaagacgaaacaatatgtcctacaataaattttccctatatatgttgaattcagaaccttaattaaaaagtagtatcgatcatattagcttaggataattttattctggctttctaacttcctaatggctaatcatattcacatatataaaacattatatatagagagtaattaaatcaatatcacagaaacagattttattctaaattataatgtcaccagaaatgttttcattggaagcagctgatctaattttattattattaaattactctccccatatgatcagcacaataaataatgcaaaaatcctatgtatctacccacacctaaattttataatacaaattcaatccagaacaagctcaaaccagctaaagtgagccaaaaatgtggcaagacaacattgtaacctcagatattgattgtgaaaacttcaagtttctctatctgaattagtattcattacgtactgaattattcaatgttagctaagtaactaaattaaaaacatatatactgcagtaatagaaaagtgtaaaataccagcttacaaaaaactaaaaccatatataactaaacttgtaaattgataacagtagtgttttagtactcttaaaagagtgaaaagttagtgaaaataaaatcatttctattttgagacatgcaaacttctaataaaatcattcttgattgtgttgatattttgatatcacttttgttgttgtttctatttattagttgctgcaaaaattggtactgcaatatattatcctaattttaattttggagaggaattgttggtgtgatgatgtgaggctacccaatcattgaacaaagctagtaattaagaaataatatattggtaccctatttggctattactgtcatgcatgtttcttaaaattttattggatttaactaaatacattttagtatttgccatatggaacaattcttgaagacatttctttcttcacaagtaagtgatggcatgaacatggttcttaggcttacatgtctctcaatcaacaaagcaataaatcaagcatttcaagataggagtttctaaggaaaggaaaaggaattttttttaaaatagacttgtgtgatatatatatgttcagatattaatttatattgctgtcactttgtaattaaattacaatgtaacatattttatattaaattttgttttaaaatatttgtgataagtagttttaaaaaagtaataattaataacaaaattgacacatggaccatttaatggatgacatgtggcctaatacaagtatgacacatggacaaatatgaatatgctacatggctgccacataggatgacgtgtcactgtacacgtcactagcttagtcatcatcatctaatcagataagtagggcccaacatatacttcacctacaaatatcaatacttgtagttgtaggtggacagggttttagctacaaataaacattattattattatttgtagcgactgcgattggaagggcttcgttggtatgttttggtttgttgcctaattaaatatcctacacatgtgtactttgattgtatctctaattcatcctcacttcacatcatagtctcatatcttccaacttacctctctgattttcttttccagaaagcttgtaaaatcattctcacccttcatctggaaaaatctctctttctcattgttaaaacatgtgaatggtaatctatcaatcaaatttgaatagaattatatgttccttatatgtttctcattgataagagaaataaacttcttgttacacttattatattatatataaaagtatgattaaaaaaaatagaccttttaatataaagggtcttgtacaataatatataagctgctcaaactcataagagcaatttcattttcttcttctccagtatgatcaagttgccatataataaatagaacagatgaaagaatcaaatatgccgagtcacttgggtaaagttgttggattaaaaatcctactcgtgggcattgggcatagggcatattaatgtatatactattataaatggtgatggatgtaaaattaagttataaatatcaaaaggtattaaattattataaaaataatgtatgaatatcataagttaatttataattttatgagggactaaattataaatactgaaaactaattctataatcagtttataaatatatagtagtcctccaaaacactaaggttcttgtattttatcatttcttattagaaaaaaattagtatattcttagaagattaaaattttatgtgcaatctttgtcaataactttaagttagtgtttcttctcatctcatattcatattcatgttcttttttaatttaacaaagtttctatataaatatgatttaggattttaatattaatacttttaggagcatgcataattaaatttaagattatatgtatttttgagtatttataaattgagtcactcatatgaggaccatatgagttgtctcgtaatttatggaatcattttttaataaaaataagagttctaaagaaactctcttttacacttttttttatactcttctcaattgagtgaccagtgtaatcttttaaatcatgtttcaatataattactattatacttttattatcgaatttatttaattgtagttaaaataatattagtgctagtttcatataattattaattttaataaatacttagttgtaataaatatgatatttattattgtaatataagtcaattttaattagtaacaaacagtaaattttaatactatgtactattcggggttctgagtgttcagagaccgaagacgcacacctgatttgcctaccctcaagactggtctgtgcactattttattgtaatatagttactaattattatatgttttaaatataatatgtataatgttagttattaataaaaggataaatattattttgaattctgtgttttacaaaagttaccaattagattatttattttgttaaataataaaattgactttatattttttaaaatggtaaaaataggatcttgagctcaattttcaataattttatttttttaatataaccagataatttctaacatgaacatatattaaatgtaatcaattttcttataatatttttaaattggattattattaagttttattttaataaaaaatcagctcgaaatcctatttgtatataattttaaaaaatacagaatctattttgttatttaataaagtagatgttccaaaatagtatttacctataataaaaattacttattttacagtacaaatattgttacaattatgattaaataaattaatgtgacgattgttgccatatcttaatagtttatgtaatatatattggatatgattcatgttttattgtagcacaataacatattaatccattgaaacatgttgtagggcatgcatgtttttaattaatatataatgagtacgttgtttacacatagttgttcccgagagtgggggaaaagaatgattgatgagagtgagataataagagagaaaatgaggtgagcactgagcatatatatacaaagaggagtgtttaattacatatatatgaatatgtatatatgatgatggtgatgatgataatgatgatgatgacaaaagagagataaaaccatgcaaatgggcaaatgggcgtgtaaatattagggaattgatatagagagatctatcatatatatatatgtgtgtgtgagtagtgagtgtgtcctctgtaaaaataggtgaggggtcagtagtagggtgagtcagaaatcagaggagtgacgtaagaaaagaaaaggcgtgcatggaagcgtgtgaaggagattttggaattgaatgggaaaaaccccaaaaattaagtgaggagtgagaagaagaggaggagtagagtactatttttcttcacaacccacgtctctctctaaatcacaccacattgtcttatatatggcggcacagactgagagagagaaaatatataaatatatataagcttacatcagcatcagtaccagagctgtcaatcggtttctgagaccttcgtaccaatatcgtctctatatatatatgatatatggaagaaagagaggtcagagccccatcattgtctcaattatcactctagtacaactaaacactctcctaaattc

SEQ ID NO: 20955 - DNA, 3499 bp, Cannabis sativa
gaagaataggaatgaggatgatatttttatttctattatcatcttcgttcttattcttttgttttcattctacccaattaaatctattcttaatttttgtaaaagaataatagaaatagaaatgagatgagaaatgagaagaatagaatagaatagaaataaaataggaatagaatgaaatgaaaatttaaaatatataaaaaaaaattgataaaaaaatcattaagtttttactcatgttacatttaaatgatttttttttcccttttattcaaaatagtcattctactaaaatagtgaaaagggtattctattagaatgtaaaatgcagccaaacaaaagaatgaaatggaaattatttcctttccattccatttcattacctccaaccaaaagtcaccataaattattaacataataattttttttttctataatcataaataagtaattttacaacttttggtgggtctcacctcaaattaatttttctatctacttttctttctaaccaaacaaacatttgtcttttttcacttctctctacattttattccaaacttttcttttctctcccttttctcatctaccaaacataggtagtagttttagaactcttcaactcatgtcaatttctatgtggtctttaaaaatatttgcagcgtatcatagaaatgcacaactacttgacaagtgtatatgaagaaggagatgcaaggtctgctcttattgccatggttcaacagctacaacatgctaagaatggagttgatgttgtctcagaaagcagggtaattaatcattattaaacctcaaaacaaatactaattaattaataatcattaccattattatgtattatcttcagtttttaacatgtcacatttaaaacagatcaaaacacattttgcaagaccgaattggcgaaaagtgttttcggatttggcaactaagcatgaagcctctcgaattggtaagcaaaacaattttagttaaaagaatattttggttaattttattctaagaaatcttgaaagttggattttagcgaaaaaaaaaataagaattctcatgttcggtatgaaaagaaaattcgtatagaaaaaaacttgattcaacaaattttttttcataccaaacatgaattttttttttttcttttctcaccgaaattcaacttccaaacataattttaaagaacatgaaaataagtttgttgttgtgtttttgatgttgttattttcaggtgttttctattgtggaagtgctacacttaccaaaccattgaagaaactttgccaagagtttagcttaaattcatcaactcgtttccactttcacaaggagaatttctagattataattatacataattaacactcaaatacttttgttaaacaagaaccaaaaaaaaaaaaaaaaaaaacaagttcaatatttgttaattaccactgtatattaagaaagtgagaaaatatgtagaaaattaatgtgaaatttttgaaaccaaatatttatttactgcaataataataatggagtcacttgccctgtgaagtagttcaaggaaaaacagtcatagaagttatgatataaaaatgtcaaatctatattagtcttgctgcagtttgctatatataacaatttcattttatttttatattttttgtcaattatttattgaaaaaatgttggtgttaaacaacttcttttttattttttatattttatatgaaaaatatgtatttggaaaaataaaaaattccccaacaaccctgtcaatttttgactatgagatcattgtaccaatcaatggaatactggaagacaataagcaaaatcttattttagacaacaaaacttgtgactaatagttataaaaatcataatttaatgtatttttaatcataataaagttttattattaaataagtttatttttattaacaagaaagtaaaagttagtttattttttattattaagtattaataagaaaataattttttaaaaaattaaattaaacatgtagtattgatgtgataatgacatattagatatatcggtattttattagctacatgagatatatcggtattaatatcatatttaattgttatgtctcaaaaattcaaaaaataatgtggcattaatttttctcctagatatggaggagaataggaaatcatatcatctcaacactattttgggaaacctcaactaagtttaggtataacatcaaaagcttcatctcggtccaagtcgagataataactccaaattattatctcggcccaagccaagatgacaatctcaatatgtcattttggccctaggtggggtgctccttcttggccctacgtgtcatcttgaccctaagtggggagctcctcaccaaactattatttcagcctcacctaccttgcaacaccaaggcatcttcttggcccaagtcgagatcacaatactaggacatcatctcggcccaagccaagatcaagacccccctcatctcggccccatctttttcttggccctaggagcccctcaccaagcaccatattggccctagtcgaggtgcacattactggtgcatcatctcggccctagtcaagatgtttcacaactcagcacgtgcttctcgtgacttaccaatatcatgatctcgacatgtatttttcatcaacatgcattgtgctccttgtgatgaaaataaactagcatatgaggattaaaaatatcttcaacaatttttttttttagatatttattttgaaataatgattttgttatcattttgtattttaaacctaacccgaccatagttaggggaaggtgtgtcttggattaagagattttaaatcttaagaaagtcctagatgaaaacctataataaggtgatatcaattgtaaaggaccccaattgattctcacaaacttccactctctctcatttcaaaactcgcttgaggattgaacttttggagaatataactctggagaactctcctaaagcgcattaagaccaataacaaacataagtgcactagtctaataccgccgaaagggaggaatcactataaaatctttgtgtttatttttgttaatttttttttttataaaccggtttactttgattgacgaatacttatgttcattttatttatttatgattttcttagatccattaacaaaaaaattgcgtcaacattaagtactgtgaaaaatacaaaaaaaattatcaatagcaaaaagcataatttagtagtaacaatagttcaaataaaaaattctaaactaactattaattaataaatactcaaatatatattcctcatatttaaaatgtgaatactcatatatgtctccatcttctcttctaataatattatatccatccattacacttccaatcatccttaaactaatgggtaaataccattttagaccttgtgttttgcaaaagttacagattggaccctgtgttttgttaaatgacaa

SEQ ID NO: 20956 - DNA, 7364 bp, Cannabis sativa
caggacccagtccctgacctgggacccaagcccgaacacgaactcagacccagacccggacccaggaccttaaaccagacccagacccagactcggatttgaacacaaacttggatccaaacccagacccgaacccggacccaagaccctaacttggaccctgacccggcccgttgtcggtgttggggtagaatttattaaaaatatattatctttacacaatctattaatacatgccaataccaaagtattttatttaataatattaatacaaaattaaaatggatataaaattataagttaatacacaatcgattcgagtatctgatctagcgggacaaggcggggtagattcttacatgatctagatcaggtcggatcatagccagatcagatccgatccgacccatttacactcctaataattatacccgaaatttggctatcaactagaagctgacatgtgtactcgaggagaaatatgaattagctcaataattgcattattaaattacattattaaatgcaaattaaataacttgtttcaataattacggttaatagaaatattcaaactcgctgccacataagtagatgcaagataagaataataattattactagttaaagatttgcgtgataataactccatctcgagatagatagagtacataataaaagtgttcaagacaagataactaagagcttacagttcattgacccacatacataggaataagagcttgaaactaattgatccacatatgtgtacatagagagaataactatattcatccatctcaccctctatacgtagaagtaaccacctcgttaatgccatcatgataaaagaagattgcgaggagcattatttctatacttaacattttttctacaaaaattgtaaagaaggacaactcgtatttagtgaggaacaacctacttagtcagcacaaccgtttaaggagaaagaaaaagagcggttgggtggttatgaaatattatcccatgtgcataaaattgaaacgtagggaatgtccacatttcatgaacagttatgaatgattagattctaaggaaaataactgtcaccctatacacctataaataggaacaaaatttagggtaaaatggatggtaaatttgagaaaaaaagatatatatatatatatattatattcattgacataattgtactctgtatctagattattatccataataagatatactcgtggagtatgtagattttaactacaaagccacgtaaaaacatctggtttttatttatttcaattaattctgtaatatatttattacaaaaaaaagtttatatatttagttaataaaaatctgcgttaacaagaagtatgttagtaatatggtagctgaatagtgaattgcctaaaattccatgtatgtggtagtaagattaaaacttggaccgttaactaggctaacttataaattgacaggtttgtcctatagaatggataccttgcctaatatagaaagtcagagcaatgcggtcaaggctagtagcggttggaagattaaaattattgttgccctggcaacagaagtatatgctattggagggctcctggcataagttatgttatttcaacattaaatttgtaagattgggagtgcaagtttgtagaaatgcaagctaaagtctaaagtaaaggtgaggaaatttagaggatatggcagcagggatcttatgttgcacctcttcttcccggtgcccattgtccctaccttagtatttttggtaggacggtctgttgttgatgactggacgaagtcaccatatagaaagtcttgaggaaaacaagtttaaggagctttacgagttggatataaaggccttaatacttttccaaaatgtcccagttgtaagaaacgtcatcaaggtgagtgtaaaggaaaagcatgtttctgatgtggtgtaatgagacattacaagagggattgtccatgatcagtgatagaagggtcatgttttcagtgtggaattattggtcatttaaataaaacttgtcctcaactaaaaaaaaagaagttatactcactccagtttgtgaggttatcgttactcaggagctacacatttctcttatttagtattatctgactctggagctacacattcgcacacgatagatagagtgagtaataaactgggtagaccttgtgattattataatttaggtttgagaccctattacctagtggagaattagttatctccaaaaagtagactaggcctgttctcattaaaagttgggaagaggaaagggagtgatgattttgatgagttagtttaacaaagcgtggtattattttgagatggatttctcgcttaagtacgcagttactttgaatcagaagagaatgagttgacttcttggttagataatagagaacctttgggttttgtggaatcaggtttggattagattactgatcattttggtattgaagattaggaacctactgcaggttgagggttcctatcagttgggattgacttcagcaaactcaaaatatttgggctaatggatatgtcagtatagtaaaagaattcttagatgcattttccaaggagttatcaggattaccgctgcagcagacaattgatttcgtcattgacttggaacctggagaaatttcaaaggcactgtatcagatggctctggcagaactcaaggagatgaaaatgcaacttcaggggatgctggatctaggatttacccgacccagggcaacagagctccaattttgtttgtgaaaaagaaggacgaatccgtttgaatgtgtactgattagtgagtattgacaagctgacgatcaagaacaagtacccattacttagaattgatatgtacaattgatgattgtacatataataagccatattacttattatatttttttttctcttttccattttcttactattcacactcaaactattttatactattcttctttaattaatcaaattttataaaaaaaaatcttaattaatttcttttaacctttattaaaatatgattcttttactttcaaactgtttttaacactctttctctattttagaaaaaaaattaagagcactcctcttatatctttctctttttttacctcattaataaaagtagtatttttttttttttttggatattttccagtttctttagagttaattttttattttcatattataacaaggttgatgtcttgttatttttttttattgatttatagttgtctttttattatttatatttatttttatattattatttaggtgttttatagttattttataattgtttttatgtgttttttttttgtacaattgtagtttagtttatgtgtattttttatggtgtatatttttaatttatttcacacaatttttttgttgtatgtatgcacattttgttttgttatttttatgttgttttttaatagttttcagaattttttttaacagttattttgtagttatttttttattcatgtgtagttctttatggtgtatatttttagttttttcctaataatttttttatttatgtgtgttgctttgtagtttagatatacatatttaattttttaacacattttattaaaatacaatgataattttttttttaattttttttaattaatacagtgtgcagtagtagatattattaacatattaattacatgttacccattatattatatactccattttgaaatcataagattttattatttctattattaatgtaattatttatttgaattttaaaaaataaattattattttatctccactaactcaaaatgaaaagagaaaaaaaaaaattaaaagtacgaaattgtaacaacaaattctatgaaaaaataatagtagtacaaaattatatatcaagttatcaaaagtaggagtgtacgttggtcggtttggtcggtttacaccacatatattttttaacccaatgtaatggtcgggttataaaattctaagtaacccgccaaataaagaaaaaaaatcttaaaccgaccgacaagttggtcggtttggtccggtttacccaaccaaccccccaacgaaaacggattttttttttcttaaaaaaaaggtaaagtcaaataaaaaagtgtttgactataatcatagtaggaaggaactcatagaatttatcacttattattttatgcatacatatcataacacatatgtatatataaataataatcaaatatacttttaacaaaaataataaaagcctaggttttatagtttattatacctatacatattatatgtcaaaacaaattatataaatgcaaagataaatacaattagtactacaaactacagtagtagataaatgtaaagatagaatatattatatataatagaagtaaaaagtaaaaaaaaccactagtcaggttgggcgggttattttagtttaattgggcaggttgaacctatttttaacctgcccacttaacagattggcgctttataattttgtcgaattttttcggtttgtatttttagtcgggtttttcgatttggtttggacggtttatgaaaatttatgcacaaccctagtctaaagtaagtaagaaaaattcgtgatacaaaaatatattaatgagttgatattattttgtatattgcaattaggtcattgtttttttttttgttaccttgtagtttatctttttgttattttatagttatttttatgttgtttgttaaattattttacagttgtttttattttactgaaacataatatttttgtaattttgaaactttaacctagtatttttgcaaacttaatacagtaaaaatgtaaaacaaaaaatatgacagtaaaaatataaaataataataaaaaaattactattccacttgtaagatccccttctaatttccacttgggactattgtcacggcccgtgattgggccattttcgaacataacatggatcagattcaaacccataaaataggagaacgggcttgggcctcagcagtcccgagaggaacgacatcgtttcaaacgaaagaatagatcaaaatgtctctctcacccctgtataatgtattgatttgggaaaaagaagaaccgagaagtggaggaatcaaaaatggcaggaagattgagcaatgtggcctccaagatcatgggcgccaacggcgtcgtttcacgctccctcgcatcctctgttcgccaccgttccggcatgggtctccccgtcggcaggcacatcgtccccgacaagcccgtaagacttgttattaaaattatcagattctccgcaaaaccctaaactaattgaattattcgaattccaaaggctaatctttgaagttaatctctttttcttcagcttcatgtcaacgatgaattgacttgggacaacgggacaaatttaccggagccctgtatagatcgtattgccgataccgttggaaaggtatacaattttgggtttattggttgaaatcaagctttgattttgttttgttgagtttctgaattttatgtagtatgaagcactagcttggctttgtgggggtttaagctgttttgctgcgttgggattgatggctgtgtggaatgacaaagcctcaaagataccttttgtaagtccaaaaactcacgctttgaatctggtttatttgaaaaaaaaatcatgcttttataatagtattagtaattttgagtgtgcacaagatggtgttgtgttgatgtttgccattgattcaaatgactaggtgtaacatagacatgatgataatcaaatgtgtcttcttgaattgagttgcttgattatgaatcattattggtattggctttggaaaactggttacattgaatgcaactaagtgttttataattaagaaattgtgtgtttatatcttgatgctgagttaaaacatctttttgtttgagttctgatcttctttagtggatttcagttgtggtgctgcttccactgcccaacaaatgtttcaagtgttctgaataggtgtttcgtttttgtgcaatatggccttaactggctttgtaccgaatttagctaccataaaataggcttattttctgtgtcctgtggccatggtgggatctttcctttactggtttcctactttgtttttttctttacttttcttaaatgatttcctacctcgtttagttaccatatgaaaagactttcttctaatgctcatgtagtttccattataaatgcgagcatcattacttgtgttgaaagagatatgagcgcacactcctgcttcctttgaaatattttaccttgatggcagtgagaacttgactcttagataagtcttagaaaatgacaatgaaccaggaacctgcatgctcatcaaaaattgcaatgcaacttattaattacttctgttcctctcgattaatcatactttgatgtgcttaaaaccaatgtgtatgcaatactgtgaatctaccgaactgtacttgaggaggtgtttgcatcatttgagagtttataatcttgtacatattgagttttctctttagattatcttatgtttggctttgttttccatttgaccaggcaccaaaagtttatccttacgataatcttcgagtggagcttggtggagaaccatagatagatttggggttgtttggttattgttatttgaattcatctttcatcatttgtaagttttcagagtttgaaatggttcaaaataaaggatcatgttcaaattttccttaaataatgcatcgtcttcatctttaactaaagttacatcctcaaacgtgaagttggatattggttttccttctcttcccttgaggaattatgttatttcgatcatttttcaatttccatgaagtccacaccatggttcgggttaccattatgtggtatttgattttgataacaaaaacataaaatatagaaatatctatatagaactatcctatgtgggaaatcctcaggtgggggtgggggttgggggcgcaagtgaggagaaactataatatctttatatataaaatgtcgttatctaatcttttttttggcaaaatattttaagaatataagaatattctattaaatttaacggtttgtaggattagttttatgaatatagggtattctttaagtgagagcacattttgctcttataagtgagggcatttttgtagcctttgatttgaaggtaataatattttgaataattaatttttttagtccctgtacttatgacactatactatgatgccccttaatttataagtgtagttaaaaataccccctaaaatatatcagttggaata

SEQ ID NO: 20957 - DNA, 3650 bp, Cannabis sativa
ggcataaaacccaacagttaataaacatacttgttagtaaatctaggtcctagtaaaatatattccaacagttctctcgttgttttgaggtcgttcaacattaggtaaaggacccattggttggttccctcgagcttgagttctttcgggctctttattgaaggaactttcccttcaagagttctccactcctagtgttttcctagtgcatactcggtactaggtgtagtggtggtgtttcgagcattcatggttttgcctagttcccacgtgaccagctagctgacggggtgtctcactcaccaactcaaaaatacccctacaggaagcagttccacgattaaagtgattagcttctctaatccgttgagataggttagatctctactgttctagctcaaggagttggattttgatgttcttctagttttcaacaaaccaatgttaaaaccgttcagattacttatcgagggactctcgtagctgttgttgcaagttagcctgagttgagctacatgaggatcagtgtcctcaaggtcttctacctccacacatggctccgcaggcaggaactggtcattggtgctaatcgtgggagctactagaagtggccttggaggatgagttgaggaactagttacaaaacgtgctccttgtgcctagggcacatgagtagtcccaggagaagctccatgaactggcgtgcccctagttgattggctagctgctagagtctttctgtcaacacttgtagaacgtgttgcaaccatcttgactagcaactttcttgatttgtggctctcaataaaagtaccaaaatattgtctcaaaaatctagagtagacatctaaaccacacccgctcgctagattaggagaatgagaagttgtaaagtaattaatgagagacacaataatttatagtagttcaccccccatattgcgatactaatggggctacgtctgcttcgagcttttatttctcaagagatggtaattattgcaagtttttaagtatcaaaagctttgaatttgagagagaaaattctagagagagaagctgtaaccttatatgtagttttctgaatgtgtaaaatgaactcagggagctctctttttataggtgaaggaggcccataaaaataggagataaaatataaataaagtgttttccaccattgatgatgatctaatggtggaaattagcttctggtaatgatgtcaaattctttatgtctggcgggtctcgctgcgagctacccgaagcttatttttgtaacttccttaggagtgaattttgatgacaatagcttcagaatttctactgatgtgtgagatacgacttgatagagggcttaaatagcctcaaaatgaaagttgaattgtgtcaatcggatgaaaattgtgtgaggtaaggccgttttattgaatgtagtttaggtctcaacacaagttgacatccagcgcctaagttaacattcaacttggatgctgtaaatgtgtggaaacatccaagggaattcctttgagatgcctaagtgatggtttgacatgccttagtccttttatatgttttggtgtagctggacacacaatctcagagacgttgctgttttgcagaaactaaagacttgaaacttccagcttccgaatgaaccaaaagtgaagttcagaatttgattgatctgaattcatggatcattgcacttttgaaatatttgatgcatggtcaaaataacataagatttggattagcagaacctagcaaaccagccatttgttgacctaggcccctgggcctttaaactgagctcttgtgattctatttttgatacttccaaggcttctgaacttaaggatggagtctctccgcccattaccatttcaaattcaatggttacattggatttgaaattttagcaattgaaggtagggtcccaggttgattgtcaacctaggcacttggcctaacactaggtcaacttgagcgctgggccctatttccagggactcaggtttgtggttttctcgccgagtgttcttgaatctttgttattttttatgatggtgaagatgttagaagcactttttgctgaactgaattggaaacagtctaggttgacaaaatgtcaacctggcgcagggcctagtcccaagtgtcaacctgggcgctaggtccctcttctgccccttccatcattccgtttggtcattaaaaatagaagatctcaatattttctgaacacggagatgatgcttgaaagaattctaggaaaagtccattttttatggcccaagttgaaaaattgtcaacctgcgcgttgggccctatttcttctacccaagaatctttgtttttcctctataaggacctaattccccttttttgatgaagaaaaattcaatgtagaatttggatctttgatcgaatgcttagaaggtgcccaaatcgactgattgtcaacctgggcactgggtgctgggggccccgaggccccaggtgcttaaaaatcaacttgttttgaatctgattttaatgcctcaaacatgtccatggtatgtcaagttaatgtctcaaagcaagttttggccactttgcactaagatggtcccaaaagctgaaaccctagttgaggatgtgaacttgggctttgagtggaaaccctaggtgcccaggttggcttctagactgtaggttcgtgtaattttagctcctacaccttgtattaggttgttccttgtctttatggtacataatactgaaagataatggttggattcaagttattgaagttgaaatttccatctcagagaccttggagtcaacctaggcatagggctagcgtccacttgattgctatcacttgggtctacttaactccgtgacgtcatcattcatgccacatatcaaacattgatgtccacatcaccagggaaatttgatgggttaaaaaatatgaatatgataatgaagtagttttcattaggttaagagtgatttcaaagcccttgacatgattttaacttttaataatacaaattaattttcttttcctatatattaaattgattgtattcttttgtgggtaattttatgaataatgttctgatcatatttatatgtgttatactaaatttgttcacctgacgtggcatgtccacgtaagccaagactgaggacacatggagtacaaccttgtcaatagcaagacaaagtctccttacaaggcatgccaaaaccatcaagtaacaagcgagaggagttaagtaagccatcaaaaagctgcataactgtgtctggccagccaaagggagtatatagggcagctaggatgagcttgtatggctgactagggtttgagcacaggctggatggccaatggtgagtttcacaccaaggaggggcccgttcagccaaggaaacttgacctctataaggaaaagctgtataaaggttggccaacacctaccaaagtttgtaggaacatgacctgccagaccctggcaggaacatggctggctagaccccaacctacaaacattatgtggccggccagcctgcacttggcaggcgcatggtcggccagcttttccctagtaggcctttggggcacaaccttcatccgtggatagtaagtcaagcagtgaatt

SEQ ID NO: 20958 - DNA, 4822 bp, Cannabis sativa
  modified_base (755)..(763): a, c, t, g, unknown or other
  modified_base (4746)..(4780): a, c, t, g, unknown or other
aaaaaaaaaaaaaaaagacatacctttctaagaagtggcaaggatccaaagcaagtagttgaccagtaaatcttattgaattaagacaaagtttgactgagaggagaggtcttgtttctttggctccctacttagttatgaaataggaaaaagaaacaataacaacaacagagatatgcagctgcactaccattgtttgtaagatattcaaaacatatataattatgtttacaggaaagggaagataatgggtttcttttaagaaagaaaagttggcatttttttggggtactaattaacactgtgcatctccacaaatactgatatgggttttctccctcaatgctaatttattcatttttttgaccccaaataaaaatatatatatttatacatgtagtctcatctaaatactcctctgtctctcactcactcactctctctctctcctaatcttatggactttttcccataataataatatatgatatgatattattagaggaatagtggcgtttaacattttcttacatgtgttgttttgtgattgattagcgatactttttaaaaattattacattaaattatatgggactcaatacttaattgaactaatagatattgacacgtagtaagcaccactagtgttttaatatttctcttattagagcattgttatgaggcacacacctagtaccacgatgaagtatcgctttataagtggggcccgattaccctatatactatttttttannnnnnnnntttcaaatttacagtttggattttcaaaatagttgcagcactagttgcaatagagatttctatgtatattttagtaaaaatacaaaaaaaaaaaaaaaaaaaactatttaatagtgtaaaaataaaaaataaaaaaaaaaaaactcttattaaattacaccaataacaatattacactttttagtatttttcatattattattgtttgtccaagacaacccacacagcagcacaagaccagtagtagagtagtagtactaattggtattggaaatcagaaaaagtaaagcgataggcatagcctaacatgcacgtgacaagtccgtgccataccctttgtcttgtcttttaccataaatacattaggaaggctcaaactttttaccatttcccatgttttactttttttggttgcaacttggaagcttttgtacattctataagagaaaaaggggaaatattgaaattgtgaattttagtgggttatttgtcaattttctaaaaacatgtgtttttttgaaatgacatgttgaatttataagaaataagaatatacaataatgaattaaatgttgtagtttcaaaagaaataaagaaaaacaaaattgttttcaacacaacaagtaaggagaacttaaagtcaattttgatacaaaacctaacatcacactcaaaaatccaactaaaaaagattaatttacgaaaaaaatatttaaatttaatttttaacggtaataatacttaatttataattttaaaatttctgtaagtacttaaatattaagtgttaagtaaattgtcacgtgacaatttttaattagtctaaatcattaaataagaaaataacacgtagatattaacttaatatttaacgtttaagtagctacagactttcaaaaatataacttaaatattattatcggtaaaaattaaatttaaatatttatttacaattgaaaattaaatttaaatatttataccgtatattatttattaaaataatataatattagtattatttattcaactttttgagataaatcccccgtttgggtaaaatacattaaaaaaaaattttaaaaaaaaaaattgggtttagaaaatgaatcattggattaagtgagaggaagagagagaaagagaggaagcaaacaaatggatccttgcaatctctagatgtcttttagtgtagaaaaaagcctccacttcccacaaatattcttatttaatttttttttttttaatctttagtgctttgacatcaacactctctctctctctctttctctttcttagtttaattttttattttcatgtttgttaattgtgtcagaaatgttgatacaataacattattacaaccaatctcctctctgtaatacaagttatgatcttctactaccatgaccagagataccaacatagtattcccttctagtgtttgacagctcatccatttgacacgtgtcttactatgattgaatcatgaagacatatgtatttaccattcttgtagtgtaaaatatgagaatattagttgattctctcatcctattaatagaagccctgaaaattagggagtagatcatctactttctaattttcttttcttttaccaatgacactaatatgtaaaattcagcacacactaataataattattattattatattattacactttataatactcatcattccttcctcttttcttgtttggggtaatcactagttttttctttttttaaattgaaatcttattaacaagtttaatacatatcaataagaaaatatgtataattcttaatctaaactaatatatcatccacattaaatgcatacacaactaatttatgaaaaacaaatatgaactaaagatgctttaaaaaaactagaaagcaaactagcaaaaacatctaaaaaaacctaactcatttcaaaagaaatagcactattgaaaaatagaaaccaaataaataatcaaactccacattacaaagagaaagaacaatgtgcaagaccactccggcacatcattaagactaatgcttctgcttgaatgactaaaaagtaactaaaaaattcagatcttctgcagtatgtgaacttttcgcattttgaagtataaataaacaacctactaaataccaaaaaagataaaagaggtaaaaaattaacttataaaaaataaaccaaatttaaaaactactagttatagaaaataaatcactagttattcataagagtttttagcaattaaatcatctcaactatcattttatttgcatttaacactctaagcttaaattttaaaggtaaaattctccaaagtctaaattattaaactagtagtaaatttaaggtgttatccaattaagtgtcaatgtagactacttatgtatacactcgtatacacatgacacgtttatatttgtacatctaatattattatttaaaaattatcttcaaaatttattttgaaatcaaataaaattataaaaataaaaaaataaaatatttaaaaaaattaaaaaaatatatattataaattttaaagtaatttttatattttttaaataataatattaggtgtacaaacataaatgtaacacatgtacaaaagtgtacataaaagtattctatattagcagttaactgtagaaaatgaatggcatcttgaatttgctaccagtttaatagtttggagagttttaccgccaaaatttaaaattagagaattaaatacaaatagaataaaagttgagaaaatttagccgtaaaaaactttattcataaatataattattgattattttgtgtgaaaatataattatttattttaatctctatataacatctccaacatcattagcttaattattattatcttcttttcttttcttttttttcttatggatcattatttttctttacatttccaatcataacacatgattaacatataagcatattattaccaatttaaatttgttattatagcaacttttgagtaaatatctatctatcactataaaagatgaagatctttcaagatcaacaacctaatatttagttcttaaagacctgacaatggacatcatagaaacctaaatttggactagaagaaagagtatttcaaaactaattataggaataagaataaacatacctaaaattataatacctttgtactctttgttgcttgaagaaaagtatatcaccataaagttgatcattagttagaataagatgtatcaagaatcggtgggttaacatgagcataatataaattatataatgattaccataatttatctaagataatgacacttataaataatcatgtacgaatcaacatgatataattagtaaaaagattcgattggggcatatcagtattaagagaaatagattataattctaaatataaataaaatacatcaaacattagataatttgacggtcgaataggcaacagttatagattaattagaatatacctcttaaagactattaaagcatcctcaaaactttttgtatgttctatcctttaatccagatatgcaatttgaattcacaccagtgtcttccaaatcgatccaccacacataagaaatagtggagagaaaaaaataattttatttttccctctctaatttcgaaaattatagtttagataagtgtttaaattttttaaatcagacttctatttatagtagttaaatctcattaattagatcatattttaattaattaaataaataaatatatataattgaattcaattactggtatttataaggatttctcttaactacttgagataatatctcaacaactttgaaatatttataatcacttttcaaattagatatttacttaattgaattaattaaataattaattaactcaaaaggataaactctataggaacaggacataggtgtaggcatctatcttgttgttgggttttatgccttaannnnnnnnnnnnnnnnnnnnnnnnnnnnnnnnnnntaatatagatcagaaataacatatgttgcatggttcacatga

SEQ ID NO: 20959 - DNA, 2197 bp, Cannabis sativa
tttttttcttttttgtatttttctgtttttttccctaaaaagaatcaataatttagatgagagttattatctattattataataattattataaatgacatatgatataattactgcaaaattgatagacaatatgtaacttataaatttcgccatctaacaaaccatctcagatacattcacacacacacataagtaaaatatacattttggtttgttatgagagaacaaaacccgtggatatgtaataatacataaatatactgactaaattaacatttaaaattcaaataaaaagattgaacagagaaaacttattggttagctgatttgtaccatcgtagaagaagattttaagtgtctatgatcgctgcgcaaaacaaactcatagaggctaccattgtcggagaagatgaagaagtccaaaggcaaactctataccggcaaaggggaagctctgccctccgaccagcagcagctcctaccggcaaccgaccaactggatctaggacggtcggagctgacggtgcctctgcgtccagcggcggagagggtgttgtccactcttcccatcaccatgattgttgatgggtttcggcgaagcagccttccaagatttcattatcacaattttcttattaaaatatttacgatccactcttcaactgtaactgttttaacatttgatttaagaaaatttctctttgattataggtcagatatggaggaataattaagtatatagaagtcaagccatacttaatatattaataattaagtaaacaatactaatgaaaatttcatgagacaatatgtattgcattaactgcttcttattcatgtaaggaagagtacatagatataacaatgaaagcttctctcaattcattattagagacaattagaaatgaatgtattggcgggaagatggtacgggtggacccttaaaatttgactctggacgataacacacacacatagttttactctggcaaatagccttgattacaccaggaaactccttacacttttcaatgcatactggaagctcacattgatccactggaattataataatattaagttttccagcttcacttgttgcaatcatcatcaccatcaaagttactgataatattcccactattttcatactcaagtacttattaccaccttccattatatcagcagaaagaaactacaaaaagactaatatagattaatattattatatttggtttcttgtaaattttatgttttttttatttgtttgaggttgaaacttgaatatatagtaatcaaatacaacccacatttggaatatattaaaatatagaaatattctaaaaacagtagacaactatattcattactatttattgattttgtaaaaaaaaaattccttttagtaattttttttttttctgcttttgtgggatttttttttggtaaggtgctttaatttgtttgatttagttacttaatttacaatttttttttttgctttctcaattaaatgataaaaggatatcattttgtttttctttttttggagattaggataaagaatattaattacactctcctattataattttttaattaacttttatgcctgaaaccacattttgaaaattttcgaatatttttcatagtggtatttgttatagttacaatatcattcttgtaaaatttttaaaaaaatctcaataatttacagtacttaaaacaaagttcttgatatttcaatttacctcacgtgtttaaaaaactttatgccacatcaggtggacaaaaattaggataatggggcccatccaaatcagtttgctttgtgtgtgagcctatatattttatttgctttgctattggacttagatgcatataggaatttctggatatataaatacactagattgttaaaataaaatatcacatattatagttttatttaggcccaattaatattggattattcaatgaataataattatttatttaaaggttaaatccttctcttttgggccttgtatgagagttaggggccaataatagtgggtacgatatactgcacacatccctccctcacatgatcaatccctattgtgaaagctcatttaccttatttaaataattatattaggctaattatattagtttaacctaatttaaaatgaattagcaacaaaattaattt

SEQ ID NO: 20960 - DNA, 5296 bp, Cannabis sativa
tttttttttttttttcttgactaacacacttcatcatataatacaaacatgattttttttttcaattagataacaaaattacgcaaagaaattcaaattttttcaataatactcattgatgaataatacccattaaaaataaatgtatactatttaaaataaatatgtgaattggatatgaagttggattccgattgctggagttggctaattttataattttttgattattattatttgggttggagagtttcttaagctagatgatgacactgagattgatcttaattaatatcaaatttgaattttactgcaaatgggtgtttttggatggagaggttgagctcctatatgtatatacaatgtaattataattgttcttagggaaaactccattatatatatcgaattaacaatattggcaatgagatataccatatatatatatatgatatatatgtatcttataatcggtggtggccagctaattaactaagattattatttattatcaaataaataatagcaataattacttaaattgttcgggaaaaagattgaataatgaacattgtataattaatacctatctatatatgtgagttttacttttcttgttgtatcatatctctatggagcattgttattagatattgatggttctaattagtactatttatatatagatgatattttataattaattagtgatttttttttttaaatttattattttaagttatatataattggatatttaattatatcaataataatatatatgatcacaataaaatatcttctaacatatctctatcaatatatataaattcacatttctttttttcactacgctaatttttaaattcttaaaaagaaaatgaaaaagcaaaagttaattaaggataatataattaatacactcaaattatacattttttctatacaagcaattaatctcaactactatgtataatccattaaaaaaaaactacagatataattatagagtattggtattggatattactagtgcctataacattatctaagtgtgacaccctaaaattggttaggaagttccctatttttttaggttatataaaatccactatttaattatacaaataacactattacaccaagaagaatgctaagtggtaccttttaacaattctcataattaaaattgaccgtctacttatttaaaaatctaactagtattttatacaaatgtgtacgtatcttgaattattcataagttaattaggttaaagtttaattagtttttgattagtggggtccgagatgagaaaaactatatatgtacacatttcttattatttttttttccttaataggaaattagggatatatattttttattgtgaggccttaatagggatataatgatatatgattacttgaacatggaatttactaatttatatattcaagattttattataaactaattatgtttgtctctcgaatcactaactcttttcttactttttaaatttaccatttcgttgtaatgttttgtaattcgtttcatttatattatttctagtaattacaactttttttcattttggtaaatgtaagtatgtttgtattacttttaagaacactttacaacctagctaacagcacccaaatcaggcctaccctaccacaacaaccacctaatttttatcacaatatgctatatatgcaaccagtcaatatccacctgagctgtgttcctaggtaattaataaaatgctatctcttacttttttcttttacaattgtatttatagcatccactttgtgcagccaaaaacaatcatttcgaactttacacttgataaacaccatatcttcaaaaccttttcatcaattggatcttgggattcatctcagcaaaaccagagcagtagcatttgtaaccatatttttataatctcctaaacaacagttgctgctagcatgaaattcaaagccatcacacaactttatattaataacgtacacataatatgtgtaattatttcgtcgcgtcgtgatacattacgtacatgtatagtttgacaaactttttatatatatatatatacccatttttatattcaataattaactataataaatatataaaatcgaaggaaaagaatgtgtactaaagtaatatatcactatcatcattattacatatatatattaaaagacagaaaaatactattcatggacaaaatatatggaagccaaataatgtacgtactttcttattaatcaatattaagtataattataaatcttccttattaatatataatacatctgactctagctaactctacatatatttgagagaggtcgaatttgtaggccaaatatttatcaaattctctctctctatatatatttattattatacgtgccaaataagttttctagatatacatatatataactgtacatgcagtatatattataatttttaaagcatacatactaaattatattatgaagacaaataataatagtttcatgattgtttctttcttcttattaccagtaatccaactcttcattatggcatctccgactgacgcaggcggcggtggacggtggcaactcttgcagccaagcataggcatttcagccatgcacatgcagctgctcaacaacgaccgcgtcgtcatttttgaccgcactgattttggcaagtcaaacttgtcgttgcccgccgggaactgccgtagagacccgtcggagatggctctcaaagtcgactgcaccgctcattcggccgagtacaacgtcatcaccaataccttcaggcctctctctgtacagaccgacgtgtggtgctcctctggttctttaatgccagacggaaccctactccaaaccggcggtttcaacgacggagaacggagggtgaggaatttcaagccgtgtagtggaacaggagcaagttgtgattggaaggaagtgaacatggcactggcggcgcgtagatggtacgcaaccaatcatatattgccagatggaaggcagataattattggtggtcgtagacagttcaattacgagttttatcctaaaaacattgacaaaaatgtgcacagtttaccattcttagttcagacaaacgacaagggaatagagaataatctttaccctttcgtttttcttaacgttgatggaaacttattcattttcgctaacaaccgagctatacttttggactacgcgagaaaccaggttgtgagaacttatcctcaaataccaggtggggacccgaggtcatatcccagcactggctcagccgttctcttaccattgaagaatattattaacagcaataatgtggaagctgaggttttggtatgtggtggagcccccaaaggttctcgtgctcaagcggaaaaggggatattcttaccagctttgaacacttgtgcccgactcaaaataaccgacccgaaacccaactgggtcgtggaaaccatgccttcagctagagtcatgggagacatggttatccttccaaacggcaacgttttgattgttaacggagccgggtcggggaccgcggcttgggaattgggtcgaaacccggtactgaacccggttatttacagacccggaaataaaattggctcaaggtttgaacttcaaaatccgacaaagattccccggatgtatcactctacggcggtgctcctccgtgatggtcgggttctggtcggcggcagcaatccccatataggctatagattcagtggtgttctttttccgacggaattgagcttagaggctttcagtccgtcgtatttggagaatccgaatcttcggccgaccattgtttcgcccggttcacaaacccaactcaggcattcacagaaattcacagttgggtttagattttctggtaatttaaatccgaattccttgtcaacgacaatagtttcgccctcatttacgactcactcattctccatgaatcaaagactgttggaactaccaaagacaggggcagtgaggagtttaggaaaatcaacgtaccaagtagagattacaactccttcttccggtaatcttgctccttcagggtattatctattgtttgttgttcaccaagagattcctagccagggtatttgggtccacatcagctaattgagtaggactatacataagaaattgatgttttcgtaagaaagccacgtatatatataaataaatttattgtatttcttatataaacatatatgtattattatctctatctacgtgtgtattttatattgtgtaaaaattcacaattgtttatgacatatatatatatttttaattaatgtattgtaacaagactctttttcccttcttttttaacattaaatttcgcacaaattaactgcaatggagaatctagtaggaaaatcttgagcaaagaaaaggtacaaattaagcgaagatcattgatgatggagcttatataattagtccttatgaaaatgttacgctttactaattcaaggaacatattacgtttaattacatgagttaatattaatacgtgtttgtgcataatatacttgaacccaaaatgtaattaaaatagaaaatagtaatgattaaaagtaaatccactaaaatattttagttaacgatatagtggtgtctaatacttttagaggtgacatttaacaattggttaacgatatttcttaaaaaaattatattaaattatatgagacccgatagttaattgaaccaatagcgatatgacaacaagaaaagtatttaatactactggtaccttttagcattttttttttcaactagctaggtcgaaaaaatctgctgtccctaaatctgtgtaagcctaaatctgtgtattaatagtaaactccacattagacagaaatggtaactaagtgtaacctttgttactctataaatacgcattaattgaatccttcatgcaaaggattagaaattcttaaattgcttgctcaagaagagaatagagtactcatactcactgtaattcttccttaggattttctagcctatctgataataatactagctcgtgaactaagactcgttgatgtcccaaccacgtaaaaaactttgagagctttcttcatattttattttcataatcgtatttgctttagctctaatattaaaaaattagtttccaaaaatctttctaagtcaatatcatttagttgatcttaggtcaatagaacttaatcctgagatggttaggttctagcttaactgtattatt

SEQ ID NO: 20961 - DNA, 2794 bp, Cannabis sativa
gaaagtttgagagcaatcataaacagaacggtcgattaggatcagagatgttactgagagtgctgtccgtcctgccgtactagtagtggcagtaaaagaaaagggtgtcgactaagtagagctcaaagcaaaatcttcagatgaagatgccctaaacttcttagtccacgagggtgctcttctagaggttcagggtagaaacattttaacatttgcattgtttttatttgacctttatgaatatatactaagtgtctttttttttcctatgcagccataacgtccaaactttctagcatgttaaagagaaaggagggtggctcttctgattaaagaacaaaagtataatttcatgggaatatattgtctcatcaaaccttaaattctttaactttaaaccagcaaccctacttctatccaaactcaacctaaacaagctttaatctgagtataaaaacaggttctaaccccatctattctttagtcccaaaattcttgaaaccctaacccaagacctaatctaaatctaagaaaaccaagggaaaagtaccaagaattttacctctagtgtaaacactcttgatcttgctcaatcccagcttaaaatggtaggaaaaattcctggttatggttgcaccttagggcttcgaagggtagaaggaggaaggagaaggatctcaatacttatgtttttttatctctttattacataaaataagtaacaacctaaaattatatgtatattattattaacttaattagcagcccatttactataagggtacataaaaacaaattagagtaaaatgactattttacccttccccatcaacttaagctataacacaatctaggggcattttggtaattctagctaatttgccaaaccgatatcccaacactctaaactagtctggtataaaatctaattcaattaatcttttattatcgtgatatttctgacctccttgtcaagttccacagtcgccaggcccgaaaataatttattcgaaatatggtatctacgatacccacatagttcaataaaatctccgtaattaataaattagactttatttattcttatttccttaatcaactcgtaattagtttgagtaggatcataatcctactctaatgcccacttaatcacatatttaataaaatatgtccaattaaaatatcaatatattttttcggaatattacagtggccttgctactaaccttaatgttgaacaacaaagacgggatgcaggaaaaccactaccactaacacttgatgaagtgacaggcaaagtggttggcacaaaaaaacaagcttttgttcgtcagatgggtgttgaagtcataatgtattgccaggacactacttgaattttaaagatgtgtacctcagcactttaaagaccaagttgtacaaaaaatgaaggtaaaaaaaaattaacaagtttagtggtatatatttttaattttaatgaatacaaaattctttaacaagtattattcgtgtgtagtatttatacgatattgatgatcagttagatcctgaaaaggttatgcaaactctctaccatgagatgcaaagacggtattctgagtgaaagaatatcagatacaatcactttctagaacattattctagggatccaactgatttagaaattgttatcaatgctaaatctgatcactactctacagagagctagaagcaaattattgaattattttttagcccaaagtttattgtgagatctaatcaacacaagaaaaaaaaaaagaagtgaagtatatgtcgatgcaaggcacaaattcgatgacagcaatccgtaatgaatttgtaagtaaaactattaattttatattactgaaatgattaactttgtattagtaaaattatttacacattacacaaactaacactgcttttcaacaggatgtccctgaagaccatgcaatttatgcttgaaaaaaattccctatttagaaaagaacaaatacttgggttagcaagacatgccaggaactacacataagtttataattttcgtttataatatttttaaaatgaaggtaatattgtggttttaacgttttatttgatcagtagaaaatgaatgcaaaggttgccaacttgatgggatcagaaaatagttctagcgatggatcttctagcaaattaaagcaatttctagctatgaataatgttcttgaggatcggtcagactatcaaagaggagtggattatagattgaaaaaaattcggcatcaagttctagtactcaaagtcaagctcaatcataaggcacttctgcatccattagtcaagaagatatgggagtttttttttgttaaaagtgtgtaataagattgatcaattcggctcctccaatgaccattctctacatgacccacggtttgaaagtttttttacaaaagtttttaccatcacaacaccaaggtactacgtctactcgaaccccacgtccaatgtcagtgccacaacaacaagtttttcaacaaccacaacatatgtctcctaacatgtatgctagctcctcccagatgtctcaattctttcaacaaaatcaacaaaattctcctgagatgtctgttagctctccacagtcgccttaattacattacatgttcaggcatccctcatagtctcctccaatatattttttgaacgccagaggaggatgtcagacacaataacctatggttggccattttggaggctcccagcaacaacaacaacaacaacaacgtatgtatggtcaatttgggtcatc

SEQ ID NO: 20962 - DNA, 5732 bp, Cannabis sativa
actaatcagattgtaaagagttttatttagggcataaaatccaacataaagagcattctaagattttagccgtctaccaggaacatatatgattttggctctgtagacatatggccgaaccatataccaaatcatatagttttgccaattcaattgcatcattgtatttgtagacccaaataaatggtaaataccaagtcccgtcccaatccagacaatatttaagatatttacgaaaatactactgccttacaaactaagcatcagcatgtaccacaacatgcgccaccacttgaccaccacttggcaaacttgtgggcatcagttagcttgtaacgtgccatcttagcacgcacgttacaccggtgatggtagctgaagacgttgctctagttctcactattgttgaatggtttgaagttattgaatgaacaaatcacaaggttgcgtctgataccatattaaaaaataggggatcatttactctattttttattattcaatcagagtgaaaaaatacagctgtataggagcaatatatataggctcattaattgctaatggtaatttcttgggaggcctagctgggaaggtcatacaagttgatttagagaaagataaaccagtctctaggagtaagtctcttaagatcatgattgagattgacattgctaaacctctttttccgagagtctactttgacttagtttctagtgtcaagagatggcttcagttcaagaaaattggtatttttttgctataactgtggttgtttgggccaccagcacagaggtatttctttgtcttctccagtcacggtggtgaattgtaatagagttccattccctttgtttgggtcgtggttgtccacttcttctttgtacatggatgtttttttaggtgccaatacttgttttccttgtcgtgcctcttctaaaaggccggtgtctcagtagatccgccattctttccctccggtgaatgttggaaatggtgatggtggctttaagggcccaatatccaaaatagcccgtagctcgaggcgtgttaagatggtgactagttgtgcacctgatgctattggtaagtctcagcaagccatgtggattaccaagccgctgcctagacgtcgcatgcctccggttgctacttctggaaatggggttggtgttgggtgtgaggaaatggaaaagagacttgctaatttacctaaattggttttgaataattttgaccatttattaaatgaagagaagtcttttaaaattttggatggttctgaggtggtccaaggctcgatgcataagcttgtttctattgggccggcctcgtcttcttttgggcctggctttaaacttgatgatgttatttggcccgaggatgttaaccacatggattgttctaaagttttttatgttgattttggagtttcttttggcgtgggccctagtcggcttattaagggaccagttggagtgggccttttgttgatattggtcataataacttgaaacggattgaccttaatgtgatgaataactctaagaatagctcagtttgtgggcaagaggtcaactttcagtaagatgaagataaggcattatctaattttttccaagcccaagatacattgttgcaagaactcaagcaatttgggagaatggatttatatgagattcaggctttaggaggtgacattggtgccaagcctacttctgagaccaatgcttaactactcatttcaagaaaataaaatgaaatgacgcttcttcctccttatgctcaagacctttgaagctccttcgtcaacatcccggtgttatttgtgacttttcctgggatacgaaggatcacgatcaagcttctaaaatagcgttgggagaatcctctgatgacaacttgaactttgtgagttgctttgatgacccagaagagtggaatttaaaagataaaaatgttatcttggcacaaccaatggttggtacttttttgattgaagattctggctctcttgggtcaactcactctcatacccatgtggaggaaaatgttatctctcctccacaggagccatgagaggcatttcttggaactgtagaggctacaattcgcgagttgaagtccctgattcagtcgcgcttcctgaactttgtttttctgaccgagctcaaagttaatggtacctctctagtacgtactcttaactccctccatttttactttaatatccatgtgccagctattggtaccgcaagaggaattattttggcttggaagatcgggtttgtgtttgaatgtatttcttgctcccaaaatcatacttttggtcttgtctacttggatcctccttcccatccttggctcctctcttgtgtgtacggtctccttatttccatgctaagaaaatgttttaggctgagttcatgaagatcaggaataggtttaaaggcttgtggctaatttttggagacactaattttgtgcttagtgatttggaacgagttggttctaagggaaagaaccagtttgtctcgctcatcttaagcttggtgaattcttgggggcttattaacatgcctattcatggtgataagataatctgagataatcagtagtctggtacgaaccatgttaaatctactcttgacaaaggtttagttaatggggcttggcttaagttgttctcgagagttatccttagcagatctcagacttgcaactctgatcatagacctctgtgccttcttacagatggtctgggagaaaactttaaaagaagctttaagtttgaagaaggatggacttgggacgaaaggagcaagttggtaattgactatgcctgaaattgagttgttcactcttgggctcccgccagggtcttcaagaaaattggggcaactcgggtcgctcttacgcactggaataaaactcaatatggtagaattgacaccataagtaaagagttgaaaaggaaactcaactttctttagagtttacctgcggggtcccaaaattgggattctaaacgtgagatctgccggtctcttaatgaggcctgtgagagaaaagagttgtattggaaacaaaaggccagggtatcttagcttaaggaaggggatatatgttctaagttcttcttcctctcagcttccatcagagggagaaggaatgtaattgagagtatcttgagtaaagataatatttgaatctccaggcgggatttaattggtaatgaattcattgacttcttcaaaggatccttatctggagcagataatggtcttgatcttaattgtggtcaccttattcagaataggatattcgatgtggatcaggcagagcttgttaagggtcctactcatgaggaaatctgtcatactatttttgccatgagtaacaataaagcccttggccctgatgggatgtttgtgcttttcttatgcactattgggggtctgtgggtgaggatttttgttaagcggtttatgacttctttcggatgggtattatgcataaggatgtcaatgctacgaatatagtgcttatacccaaggtccaaaatctaaaaagaacaaattattataggtctatctctctatgcaatgtgatgtacaaggtcattttcgaaatcgttgccaatagaattaagcctattttaccctccttaatatgtcctacttaagcttcttttgttccgggtaggaatattcaagataacaatgtgatagtacaagaaattatccactccttccaacagaaaaaaaaaaaaaggcaaagaaggtttcttctccataaaaattgaccttatgaaagcttatgatagactgagttggagatttattgatcatgtgcattcttgttatggggctccttagaaattttggagttggatatctcaatgtatctctaccactcgctcaatatttgtctaaatggagggcaatttagaaagattacgccctcttgtggcctttgccagggcaaccctctgtctcattaccgctttatttggattgcaaaaattttgtcaagacttttggaggatggctagtgtaagggcactatcaagagtattaggctcaatagggggcccctattctttcacatattttctttgtggatgacctaatcttggttggtaaagctaatatggaagaagttaaaggctactggcaatgccttgagaggttttgcacttagtatggccagcaagtcaataaactaaaaacctctaccttctttagtaaaaatatccaatggcgtgaaaagaggaatcagggtagtgctaggaataggatcccctaaaggtaatatcaaatacttggggttaccgttgttcagatttaggaaaaaggatgccaacttcaattttgttttggataacctcacgtctaaacttcagggttggaaagcaaagacgttgtcaaaagcgggtcgttccacccttattaagtctatgggtttatttttgcccatgtatgttatgtaaacgactaagctcttgagtctccttattgccaagattgatggtatggttcgtgatttttggtagggttttgacaagggtaatcatggtctccacctaatagcttgggacaagttatgccttcttaaatcttttggcggtcttcgcttctgaaaaactatagaaatgaatcaggactttctggcgaaatgagattggaacctattgattggaaaccaatccctttgctgtcggatcctagaagctaagtaccttaaaggaaagtctttcctaaattgtacctctaaagattcagattcgtgattttggaaaaatatggtaagaaccaacattatcttaagaaaaggaacctgtaaattggtggtggatggaagggatactagtatttaggaggacccttggatcactcataggaaatatttcttccctcgttctaatggttcctctgctaattgggcgagcaaagtttccgagcttccgttagacagtggtggctggaatatccacaagttaaacaatttgttcgactaagggactatttctacaatcttgaaaggaggtaatccttctggctagggaaaagatatatgggtttggactatgaaagtaacggtcggttcatgtgcaaatcgacatatctttcccaagctttagattgggtgccttattgtgaggttgcaccttcgctttggaaaaggttgtggaataataaaatcttagagagacagaagattctttggtggtgcatcgtatccaaagcaatcctagttcatttagagatcagtaaaatatttccaattgaggatgttagcttccccctttgtgggacggaggatgaatctcttgaacacctgtttctctcatgtaatgtggtttttcacttgtggcggtcctctacttggggtatttttcttatctgtggtgctggtatttggatgtgggattgggtaaaatttatttggtaccttaaacacaaaggtatcaatgcagaggagttctttttttatgcttcgacaatagttgacaccatgtggcagatctgcaatgataaggtacacaataatttttcggttgatgtgaaaaagtgtatcgactgtattcatatatcttttgcagatcatcatgcttcttttttccctttcccttcttgaagtttggtggatgtctggtgtcctccctctcaagattggctgaagttgaattttaatgttagagtggggttggatagcatgtgtactgcagtggt

SEQ ID NO: 20963 - DNA, 4405 bp, Cannabis sativa
gtgcaaataaaatttttcatatatttaattaaatgagtcccctcaaaataaaaaatcatgttgaatacacgtgcggcgcacgtgtgcctcccactagttaaaagcgtatatgaaaataataataatataactaattagactataataacatttcgaatcttacaaatctataccttgaatatcatcttcaattaggtgagcctaataatacatttatatacttatttcatagcatctgtcatcatgttcttctcttcctcatcacttcaaacatgaattcatttccttcttcccaagataagtattatacattattcatcaaaagaagttaaaataaagaacaaaaacccctccaaatagaaatcccataatattgttatgtatcatatttcaattgatcatctcatgtagaataattctactagaaatataagaaatctatatatccatggattattccatctcaagtgcttcaagtacaaaaaaaaatcttttcgtctataaatcacgatacggtgtattagcagtggcaacagcggtgcccttggctatacttgggggtggcgcgtatttagcatttacttacttcaacagtggtgattggttgtggcgaaggaaaaaagctagaatacgagaaaggtcagttgccctagcaatcttgcaaggcggagaattcgccttgcagagattagttgactttgaacaagctcgatccaacaccacacaaacatttgcagcgattgagtgcttgttggatgtgttgcttgaaagagagtatgttgatcttccaatgatcaaggttaactattcttacatctctctaatgtttttatgattagtttaattagtctcaaataaatccactcttatgaattaaaatcattgattttttataatttttcttttctcattatgaatttttgaaattgatcagattttattatcatcactagcttcattgtgtgtaattgaaggtaagaaaacatgtagcaaaaagaagaatattgatatgtaattaatgaatagttaatttttatttttttttatatcataattattttatttatattaagttactaggtttcttaatttttcaaaagaatatatgtatcttctaaataagcagaaattacacattgtaatgagtttatatataattcttcaaaaaaattattttatagtaaaatcaagaaaaagtttaaaaaaatatgagaaaaatattatttaggccaactagtaaccaataacctctttaaggtaaccaattaacttatactgtttttttttcctatattttttattttctacttttcttctaaaaaaaacaaacaaactattctttttgcaaacttttaccataaaagtgaaaatttccctttaaacaatacaaactatatagatttagagttgcacatgatcaataaacataagggcatttattatcatatttgtacataaaataatatttttgcaaattgtgaaactttcactctagaaaatataactaagacttacaaaatttatatctagtctcattaatttgttttgtgttatatatatgtatgaaaattaaagagagtaattgcaaagtttgaaatgagtggaaatgaagctaaagcagtgcaaatacttcataaacatagattaaaggctcgtcacaccaaaaatttctataaagcttatgagatcgagatgttactcgtcgaaatgtacatttataaggtacgttaatactattttggatactgttttttacaaaagttattgatcgatcggttcttttattttaattgataatttaaaaatatgtatttgtaaaaaagaatagaatgatagccataatttgatttttgtcaaaaggttttaaaagctaggattagattataaattcgaccacaattattagggttagagaataggaatttttaagtttagggttaaaaaacaagttttatgaaaattggacttaaaatattattattattattatattttgtaagatataaaatctcaattgttatttaataaaatagaaatattgtttaattattaataacacttatagaaacacgagaacaaaaattgtatttcattttaaataaaattatattgtgactaaaaatattattattttcatttgacacattaaaaatatgtaataaaaaattacaatttattattggtaaatatgtttctttgtggcaacgaatttcatcactatgaatttatttctttttgaaaaaaataaaggtgatattaataaatgaaagaaaaaaggagaaaccagctacttctttttttgggtaactaaaaggggtaatcagttactttattctttttttttttttcatattttaaatttttcttataaaataacttttttgaaagaaaaaaaattcatttttgtaaatttgtaccttagaaatcataaaaataaaaatttcctttaaatatatagtatgatatcaatgtttctctaagttaccaaatattagcaaccaactccatagatgaattattaagcaaccaaataaaacctctatagataaatatataatataacatatatatgtctggtaccatatcaaatgtggtacattatagttttttatattatttatttaaataaaaattacgtaaaatattatttttggtcaaatatttatacttacattcaaagtttttttaaatattttttcgatattttataaaaatacaagaaaactacatgaaagtaacaagaaaataacattaatatacaaataaaaaaataacaataaaataacaagagtacaacataaaaatacatcagaagactgtattttctataaataaaatcttaaaaactgtaaaaaaatatttaaaattctgtatagctgtatttttgtgatttttgtgatgttttgctatttttatgtatttataaaactatctttttattcaatccaaatatgtagaatttaatataaattacactaataacaaataatgtatctttttttgtggtgcttgacacttaaaatgttgctcatgtttcggttaatctatagtgttaatttgttaatgcaggctttaatcttagttgccttagggcgaggtagatataaagaattagcaaagcaatgttgggaaaacttcaacgaattaagaaaacaacccattgatcatgatgaaggaaacaaacttgctatagttagtttcaatgagtttgagaagattgtcaagaggctcaagaatgatatttataagtcaaatgaaatgaagaagataccaattaattaaactttaaatttgtttggaaacatgaattttttgttgtgtacaaattattttaaaaacaaatctaaatttgccatgaatgaatttatatactacctttttattatccccttattttagcttttttattttttttatttttcatttatcaatgttttacaaatgcatttgatatttattattagattcgcgatgtgcttgagataaaagaattgtacttaaaaaacgtgcataccagtgagaatggttataatatgttgagaaaaactgtctaaaaaaaagcttaaagcttgtaagcgaaaaacgggcttagttgagcccactaactgagacagacagagagagatttgttgggtccaccacattagtgggcttggaccaaaatcagggcagcaacccatttgtgatgtcgtggagaacaagcacaggagagaaagaaagaaaaagaaagaaagctagagagagaaatgagttttgctctattacatcaaagataagtggtattgattctcaaattttagctcaagttttaggtagtgaatccttgcaaagtgttctaccaacctactagttcttatttggcgatggtcctctctaagatgctcttctacagtacgaacttggtgagacccaaaaaaatttctttgtgtatccatcttttgagatgatgattgtattggtgatccaagattgtttaatcttgatgttattgtgagcagggccggcccaagcaatttgggggccttggacaaaaaattaaaattgaaccttttattaaaaaatattaattaatgcaacataaattcagtttaaaaaaatacttcatacattctaaaatagataaaaaaaaaattagaatcatatgtattgggagcacaatattttaatagtttttttaaaaaaaaatgcatatttactattatgaacttttattatgtatattatacattataaaataatatttattatattatatataagggacgataataataaaatggggccttttagggggctttgtgcaatgacccaagttgtcatatgcttgggtcggccctggttgtgagccctggaacacacactttagagctctagactctaatttctcaacactttggtgtgcata

SEQ ID NO: 20964 - DNA, 2380 bp, Cannabis sativa
  modified_base (32)..(33): a, c, t, g, unknown or other
gaaccacatccgcagcctgagaagaacgaccnngtcaaagaagctcatttcgagctttccaaataccccatgctaccatcaagagctttccatatattttattaatatataatgtataaggtattttttattttttctcacttttatgtttttttttttatatatatttttctatttttataaaagttatttttattttaaagttaccatattttcattttgaagttatattatttctgtttttataattaaataaaaagtaaattataaaaatataaatgaaaaaacctttatttttatatagaagtataatttaattatgagacctaaaaaatgtataactaaatataattcttttttttactttaaacttagtaaatatttttgtgatacatattttcataagtttatgttatgaattcacttcctggatacaatttacgcaaaagctagagcagaataattaaaatgtcaaatatttctggatataaaaaataaaattgtattttgccaaaagataaagaaaacaaaagtgtgtatataagagttggtctatatatactaaataataagcatttttattaggtattttatgatatctgatagtatatcaatgtgtcaaagagtcgttagtatttttttatattattttttaaattaaataaataggtgaaatctaatattaatttatactaaatgataatatgacacctgttgctgtagtagttgacatatataaggaatataagtgccccttactcccttagtaaataatacttcaagaaatatcatataggctaagacaatttttacaaatatctctaagcaaaatcttctaaaaatacattattccgttaaacataattggcaaaaataaggtccatgcttatcttttattttttcctttataattctttatttataatattttatgaaatgaaaaactaaaatcttgatgaagagtgtacaaaataactaaaaaattaaaaataattgttactactgaaagtgcagctgagacgatgaagtggaaaatttatgataattttttaattatatatataaatatatattattactttctttgctcaagttaacaactttcctgcctatgggaactgaattattattgagtcatattatctctaattccatgaggctgacgctattgattgtgaggagttgttatcacaaatcagaactcagagaaattaatttaatatatttattaaaaaattgataaaagaaaaaaaaagtaaaattaagaaacccttttactttaattaatgagcaaaatgaagaagtagaagaagaatgacctaaatactactgtctcatctatctttttcactgttttgggctcaatgcccttattagtgatgttaatatttacattatatataccgttaattcacgttttgtttggggaagataccctctgctaaggcagtgggagcagtattagtacaaaagtccaccttacaccttcattcaattgcaactcaccaaaattaaggccagcccacacaaatattttgaacaaaattaaaataaaaaaaagttcaccaaaattaattaaggtgggtgtgttattgttaacaacgtatatattttttaaaaaaaaaataaagaataataaatgaattgaattgatgattatataattaataagtcaaatatatccatttttgaaatgggatattgtagtataactaaaaaacgttcatttcttcatttaattattttgctttaatatatatatatattttttatttgtcctttttattggggggcagaagttgtgacagaattttacgtactctcactcccttaagctgtcccacgtctcttcctatgttggattttggccctcaccctatatatctatacacaacttaaggatgtgtgtgtactgtgtatttgtatataatatatatagacgtgaatatatatatagagagagaaagagagaaagattgtcggttgagaaggtgatatgtaaaagggggaagagaaagaaaacatagagaagaagaagaagaagaaaaaagaaagagatagagagagtggactcaaaggtcttaatctggtatggtccccatgcaaattacctgtcttgctcctaaggaaactgacatatatgccttccctttctcacgcctctttctgactactcctcttctcatccatatatatatacatatatataacactacacagcgtactattccccctctctctctcttgatctttttctctaaacataaaagaaaaaaaactttgttgcaccccaaaagtgaagtagtaacaagaagaacctcatcatcatcatatatatataccaacctgtctcttatacacaaattcacttttgtggttt

SEQ ID NO: 20965 - DNA, 4049 bp, Cannabis sativa
gtttggttgaaaggaataaaaccacaggaataaaatggaatgaaatttatcttttcttccatttcaaaatgaatagccattctaccaaaatagcagaaaagacattctgatactttaaaatgcaaactaaacaaatgaatagaataaaaattgattcaatttcattccatttcgttacctctaaccaaacacaacctaacattctagtactattactacgaatcgcttcccatagaaattaacaaatccaaattgttactaacaaaagttatgttcttgacaggggttccatcatgtttttaagataacttctatctaaaaatatagttcgacgtgaaaagaagatgaatctgaaaagttacaaacgcgaagaagacactgccaagcgaaattctataatgtgtgaagcgattacactgtgaccctatgcatggttctgtaagataagtaagtaaagattttgtaatagataaaatgagagtattaccagcttattcaagttaaattggaaaatttctccaaccaaaatcatctttttggttaaagggtgcttatcgcttgtgcctccgagaaggacaatagaattgttgacaatcacccaagcaaattcgatatgggaatctggtttcggcattgggggtagttctttccacttcatctcatcatccaacatataaacatcattatatacaacctgcattaacactaacagttcagtaaataaatgaatgaatgaaaatttcctatcaaatgacaatagttacaacgataaaaaaggtgcacaaacttcgttacctcattccttcgagaacacttgaaaataggcgatccgggttttgccataaagtcaccttcctgaccaccaattacataaagtcgatcattaactacaacgcaagccctacaaaagaaaaaaaagtataattcagacggcatttctttagttgttgtaatcatttatgtgtccatgaaaaccatttcaattcttcatttctgtgtaaggaaaccattttcaaaagaaatttcatctgtgcattgcattcagacaaacctatgaggtcctccgcgaggaataggtatttcaggcctccattcggtttctaacgctttaccatccttcacagcaagactccagtgctccagtgcaggggtatgtcggttttccttactacctcccatcacatggagtctacctctccatagttgggttgcaggtgcatacctgaaaagtaaacaatataaaccattcatataagggagaacgaacttagtcggtttacaataatttacagagactaataaactccaatacccagatcacaaaatcaacaaaggcatataactgcatgaatacaactataattaaccatccctgccccgaaaaaagataatgaagcttttcggttaggaatgactttgcttttcagtttctgttgcttgatgatactaacattaaaacaagaaccaataataagttttagcaatagaatacgaatacatgtcccaatatcaacgtagtcgtgattaaagtacatacctaggaactggtaaaggtggcatgtcgttccacttctttgtcttggtatcgagcacaaatgtacgagctgtgggccctctgcattgcggtccatattgtcccgtcacgacataaatgtatctcccatctgttaccattcccagatgtgaatgtgccatctcttttggcatatcaaaccttcctccccatgtgttgtcagaataattgtaaatatcgacatgagaatgcacctgtagattgtcaaccaacgaaaaaagaagagaagattaggatccatgactgtttgtaatgagagaataagaaaatacacaatcttttccgaaataaacacaaacaagcaaacatcaacaaatatcttccacttcaaaatatgaaaactctagcctaacaacattatacaagtctcaaatgcatacattcatatgtaccagcatccatagcgaaagaatcaatgtagcataagcatattgttctagcataaatcagtatgaaaccatcgaattgcatttattaggatgcattgccccttgaatctaatcatgaacatgtaatatcctgtattagtagaatcatttagttcaaatgtaagtatccatttgttaaatttcaatagcaagtatttgctttatataatgtattggagttatttatagctgatcgtgagacattgttttgtttgtctatatcgttttctaaacatcatagagcttttgaagacagaagagcagcataaaagttaaaaattgaaggagcaagacaaagttctcacaagatcgatggttccatatccggcaaacacaaaaagaaggttttttatttgtattgcagcgccatcaagacgaggtacaggtgcaggagccatcttttcccattgtaattctggtgcaggcagatccgcataagttgctgaaagaattctcccggaaacagtttcattcttatatctgatagttttttcctgtaagcaacaggaatatcagtcattagttatgataaacaaaatgaaataaggactcaatgatggattcataagacaccaatggcattagttaactaacaaacaatgaataaggtttcataattcaatctaagtgaagaaccgtgccatcaaactctataatgtagttcaaaaatacactcttttcccctcatttgatcgggatcaattgaaaccgctccattacaggaccatatattgtccaaattataatattttgtcataactgtttctattttagattttgttgaactctcctggttacgctctaatgaaggttagttctttcggatcaaggagattgttaatgaagttttgtgagctgatcaacaaggagtccagactcatcttcgaaagaagttcgaagaaatctaccgagtaggttattcaattcgaagttactatagttgtaatcttaatcctagttaccgttttcaaatgttatcttttgcatacattcaaactcatattgttgatatacttaatctatcaatttaatagattttctttctgatttgatctaaagtttattaagcttgttagtttgaattgttctaaatgacacaattaacatttgagtagctaaaccactttcaaattgaaagatcattaaaacttagatccaaacataaaatcctaaacaaaaatagctataacatcaactcattccattacatttacaaccaaaatacaacaaatcaaatccagttaaagctctcaatttactcaagtgaatcattatccaacgaattcacacaaaccaaacaagacccagttgagaatcaaagtgaattcttcagaaattggaaacttgttactgttccaaataacacaatgaacattttgagtagctaacccactttcaatctaaagatcattaaaccctagatccaaacattaaatcataaagtaaaaatacaatccaattaaagttctaaactttaagcttaaaccatactcagtgaatcattacccaacgaattcacacaaaccaaacaaaacccaattaagaatcaccaaaagaaagaacaatgagagtaaagaagaagaaaaaagaaaggtgttacctttgggggcaatacaatggtggtttggggtttatgttgagaagtccattgagaggaaaaacgaggtgaagaagcccagaaaatgtcggcaaggaaagcaaaggccaaaagggttacacatatgaggagtaacctcgttgaagtgtgctttccggtgaccctaaccatctcagatatcaatcaatgaatgaattctcaattttctgaaaatgaagaaaggaaaagatccaatcaaaaaataaaaaatgaaaaaagcgtcgacagcaggattcgaacctgcgcaggcaaagcccaacagatttcgagtctgtctccttaaccactcggacatatcgacaattggctactaactatcaatttagaaattataatcaaataaaatagttcattggatcacatctgctgcatttgtgggtgggcatcatccaatccaatccaattacaaaaa

SEQ ID NO: 20966 - DNA, 1236 bp, Cannabis sativa
tgtcaaggaaaataatagagtaagttttcagttgtccgggaggttccaagccctgagattacaggtactctaggagatcatcatcgtgagtctaacacagattccaaagaacattactgtacaagaccataacggtgcatgattagcatcattgcaaattcgtactgattctgacgacccattcacttaggcagagaaatagtgacagctatgcactatcacatacctcgcatatgggatcaatcttatctcaccaaactcctaccatggaggctaagtagtatctagagactaatagttcacgcacccttttaccttctattgccctttatttttcctataaatacctagatacacaatacgaaaggggacttttagactcacacacaaaaagtgaactctgatatatatataacttgaatattctctaaccaagagaacattccaatcacaaataaaagtgactcgtgtactacttttcattaacactagaaccacgtaaaaatcctatcttcatttttctaaattgtccttattgacatttacttagtggttgctgaaaatctcgttcaatattttggtgctttcattgagagttgtagaaggctttcaaaaagaaatacaaaccaacgtctagatggtggtaacaaggaacaatcaaaagtgcgagttttggctatctcaggtgtcctttcttagatacattgtcagtaaagagggaattaaagtggatccgggaagatagaatccttcagggattggccgagactgaaaacagttacagaggttagaagtttcttgggtctgactggttattaccatcggtttgtagaggggttttctcagatttcaacacccttaaccgagcttactaaatagaatcagtggtttgtgtgggcagacaagtgtgaagcaagctttctggagctgaaacagagattaatcacagctccagtgttagccctaccttttgataaagaaaagtttgtagtttattgtgatgtatccagacagggtctggggtgtgtattgatgcaggccaattgggtcatcgcttatgcctcctatcagttgaaagaatatgaacagcgatacctgactcatgatctataacttgtcgcaggggtgtttgccttgaagatttggcagcattatctctacggagggaaatgtgaaatttatactgaccataagagcctcatatatttttttactcaaaaagattttaatatgaga

SEQ ID NO: 20967 - DNA, 1447 bp, Cannabis sativa
atataaataagtgaaatgttttaaaatgaaaggaaaacataagaaaatggccaaattggtttgcatggcaaaatgacaaagcgacagccccacttccaaatctgaattcgtatcttggaaaagatcagacactctaacatgaagccattaggcatttcggacagttcacctttcacagctgcctattgtgcaaatgagtggcctctatctaaaagtccccccagaatccaaaaaggcacccttttatttttgttcctggaaaaaaaagttatgcaatggtaaaaaaataaataaataaataaataaaaattaatgtcttctttgttaagttaaagaaggaagttttcaagaagtatcccaaataaattaatttactttttttttcattttcctttacattttgcagtctcttgttttgtcgtctgagagtctatacaagatctattgtttcaattttatttcttgtcttatttatttcttaataattgaaaagcgtattaaaacaataattttgtactcattatataaataaattgttaatgacatgaggtgataaatatttcaataatacttattaagtccgtgaatttatgtcaaatagtggataaaatagagtttaaaaaaggatagaaaatagtatgggtgatattttttcataatttattattggggtagatgatgtggacaagaagaaaccaaataaaatggaaagagtgtgacacgtggattcataataaggttgacacgcaagtgtgttttgttcatataaagcggtcgggatgggataagttggaacaatttcttacgcaattacaaatggggaaaggaagctttaaggcttttttttattttattttattttatttttttttttgtgaggtaaagcttttaggcttgtccacgtaaatttctttcaataatatattttatgtagatgaaaaaataaacaataaaaagacttcgggatttatttattttaggtctttttggaaatatttattttaggttttagaaagtatgaagagggaagcaccaatattggtacgtactttataagaaaagaaccaaatttaataaatgagatgcttccacatggcagaaaatataactatatggctgaaaactaagctttattgagtcaatatcaatgtcccttgcttagtggtacatttacatgcgtactaccattaactatgacacactaaacttgtatcgttatccaatacttcatcaatatatttttgtttacaaagttatttaagttcgaaatgacctatttaattaaatcatcaacccaaaaagacattactctagcaataatcatttatatttagtccaaactacatgggtatctaatctcattcgctcccctagctttcgtctctcagtgtcagtatcggcccaacagagtgctttcgctgtcggtgttctttccgatctctacgca

SEQ ID NO: 20968 - DNA, 2144 bp, Cannabis sativa
  modified_base (690)..(695): a, c, t, g, unknown or other
tcggatactaaaacagataggggtagatcaatatttctattttgaggggtgcagtactaataatgaaatgcaatcttagaagggcgttgaacgtatacgtagagggcaatatagaccttttcttaaaggttttgataatgactaatatgggtaggataaggtggttattaatattagcatatatgggtattagtttattccgttggttttgaaaagagaatatttctgaatatataagccacaccctttgactaaccataaaaactgcagatatttaactgtaaatcttacagttacacatgaatgaatgaaaataagatgtagttatagtctactacgtacgtaattacgttcttatatgtacatttataatctattatatagaaacattatattttcattaactaatattaattttacatgttggttgatcgttgatatattcttaagaccacgtatatacaattagccttgaaaaaaactaaactactaactaatgtaacggcaaaaattgaattattataaaatttacaatttgtttactaagggaagtttggtaaattttttttaaatttttttagtcacaaaaataaaaagtaaaatttgtatttttaaaataaaaatatattctataactacttttgtttttttttaagtattttctctttaacttttatttttatttttatnnnnnnattttatttaagtcaggtctagtttggggatggggtcgtgggtccatgtacaggactagggccgagaccggagtccggatcccgaaatccaagttggagttggagtacgtacaaattatttattaagaaaaaaatttgtttaaaaaaatttaaaagtgatttatttttattttcaaaattttaaagttttaatctcaattaaaaaattaaaaagtgaaaatagttttatagaacatatttttgaaaaaatattttcaattttctcgtaaaaaaacagaaaactaaccaaacacaccttaaataaacatttttacctataatttattctttttctcgtaatagtatttttattacttgtaattttcaaggatttaatttttgtaagttttatgtttttacttcaaaataggatttttaatctttgacatgcactaaattatacgcctttgaacttttttgaccattaaaaattatgcctgaattattgaaattgttaaatttaagaatttgttaaattttatttaattttactataattcgatgattgtttatatactaaattatgctcccaagactttgatatctactaaatcatgtctcttgaactttgacatgtactaaattatgtttctcaaactttcagccatgttagaatttttttactaaaattggaaaaaaaaaattcttaaatccaacaatttctatagttcaaaagaatttttaacgactttaaaaattcagagaacataatttaatacatatcaaaattcgaaaaaaaaaacattctaattatatatgtgttcaaaaaaaatgtttatgtatatattaccataaattttacaattttattttatattaattaattatttaacaaaaaaaaaatgatcaaacttatttttaattggttaatttatatctgatcaaattttgttttgtttttatggatttatatttacaagctttaattttctagcaattcatcatattttgggttgtctccattgttttagcctaacattttaatttcttttatatgtatgaactttatgttgaatgtttaaaatagtagtactaataataataataacattgttattaagcactttaaaatatttaaaactatattgatggatatagataaatacatagtagttagcagtttttttttataagtaactaaaatattaaacattaattgcatgcaaaatacttcttatgatgtttaacaccttataaaatgtcaattgattagtatttctctaaaaataatacttgtttaaaataatatttgaaataatactaataagaaatgccaatttatcataattctttaaatgtatgattctcatgaaatgaagtaaaaaaatgcatagttaatcttgaaagatactatatataataaattgagtaaaaatctaactatataaaataatgggtaaatactatttt

SEQ ID NO: 20969 - DNA, 8220 bp, Cannabis sativa
tttgttcattttcaactggttttattgtacggtacatgacatgtttttttactatatagacaataaattataagacaagccatgtgctgttctttttgttgtacctctctctcagatttacgaaaaatgaaatagtatttgttaatgcatcaaaagatacacttgggatttgattgattaattctttgaaccacacgatgtttgtttccatttgggatttgattgattaattctatttattggggttgttgtgatgattctctcttatccttaatttttacagacattgcatcgggccaattccaatatattaattgagagagagagagagggagggaggctaaaatattgaattgaatgttttggacaatctggaggaaagaaagattccaataatgttccaaggtacattttggtgagaaaagggtcaaagatgagttcatttcaggctttagtgggaaaggaattacccctcccctaccaacctattattctattattggttattactgttacccaacttaaataaataaatgtattattcggtcagtaatgaatgattgtacaaacaacatttagaggaagaggaccacccatagattcccattatcaatatcaaaatggaaaaggaggccctgaattgtggtccttataagtgtcctattttgattgatacttttgtagcatcgtgcattaaatcactcagcctttctatttggtttaacttatatatatgatatgatatgagatgacatgacatgacatgagggcctcccaatcaaaacacacacaaaattgagctcattcaatcaataactttttcttttttcccccaacaagtaactttttctttgcctaaatcttaccccccaaaaaaaagggtcctcttctttctccaaagaatccaactctttttatcttctacttgcaaaagattgttaggaatgaaaatgggtttaaggtaaagacctttcttcttagtactttattatctacaaaacgacaacattgatggttagcatccttcttaatgcaacgtataccaaaaagaataaacatgattacattaatatcattatctctttctctctttctttctttctattggccaccatcttagataggattgacaataaaatactatttttaagcaataactaaagctatattgagcaatgggcaacatacacctaaaaaagtaataggatatattcctctattcattttgataagaatatctttctacccacctctcttcatttagagttatattcttcaaactataaatatgatcgtataaaaaaaaattaaaaaagaagaagaaagaatcaagctaaaacaatttcttccaacattaatatgattgtctctatatttagtgtggcgagaaattataattcttgtgttcattatacatacaacgatattctattaatatttaaaaaaattcaaataatttatttaaaattttttgcattgtaatttttctttaaaatattttgaaagcaggtgtaatacccattataattacaattataatttttcacctatactcttctgttaggaaaacaaagtggtagtggtactataaaatttcttaatatatttatggtaggattatatttgtttacggtacgaaaaaattacaatttatacgacggtatataatataactatttaaaatcattcgcgaattcttatgaaacttcgaataaatacgatgtcaaaacatgcttagaaactactagttttacgtatgtataaaataagtttcaaaacatagaatacatttcttttataataataattattattattttatatatgatggtctaatgtacagttatttataacctcatacaaatttttaaaaaattcaaataatttatactaccaaaatatgaacaagttgctttgcaatctactttatgttaaacgaattgaattgacaaagatgaattcttattaattaacaaagtaaaagatacagcttatataggtaaatgatagagctaaaaatagaatggccaaactactctcctaactgagtctaacagcaaacagatataactaacaactaactaacgaattgtgacctatactcttaacatccccctcaaactaagggtggaaagagagacctatactgtgacctatactaacaaactgtgacctatactcttaacatcttcctcaaactaagggtggaaagagagactgaatcctaagtttgtctctgagaagaaggaatcgagcattggacagtgctttagttagaatgtcagttgtttgatcataggcaatggtatgcttcaccacaagagacttggctagaaccttttccctaacaaagtataagtcaagctcgatgtgctttgttcaagcatgcagaattgggttggcagacatcagcactatgttgaggttgtcacaccagattgttggagatcgaggaatttggatttttaactcaccaaggagggcctatattcaagtgatttcagtagtcagactagctaagcttctatattctgcctcagtgctagattgagacactgtgtgctgctttctggaggaccagcaggtgagattataaccaaggtaaacacagaaacctgtggtggatcgtctgtgtcgatgcccagtctgcatcacaaaagcctatcaagtctagagaaggtgagtgagacatgtcaaggccatagtcaagagtacatttaagatatcttagtattcttttgacagttttctagtgagattcgagaggagagtgcataaactagcagactttgttgactgcatatgagattaatagtttggttagagttgcatactgcagagcactaactagacttcgataaagctgagggtctttgactggatcacttccaatgctggacaatttttcccctctagtcatgggagtaggcaggctattagcaaattgcaatttagccttgcatataacatttgtgatgtatttagtttgagagagatacatgtcatgatctgttggtgtcacttgtatgcccaggaagtagttaatgtcaccaaggtctttaagagaaatttgactattcaattgagtgatcagtagagagatttcagctgtgtcactactagtgatgagaatatcatcaacataaactaacacataggtgttatgactgttcttgaaccttatgaaaagggatgcatcagccattgagctgtgaaaaccatagtgtagaagtgaccgtctcaatttgtcaaaccaagcactgagagcctgttttaggccataaatggccttctgcagtttgcacaccatatgtggaccttgttcctcaaaccctggtggttgttgtatgtacacctcttcaaccaagtcaccatttaaaaatgcagtgttcacatcaagttattttatctcccagtgattacgaagagcaatggtgatgatgattcgaatggttggtaactgttggactgaatgtttcagagaagtcaaaactatattcttggtgaaatcccttggccaccaaattagccttgagctttgagacactcccatctgcattttcatttattttgtgtacccacttgcacccaatagtctttcttccaaggggaagtggaacaacagtgtaagtgccatttgcttttagagccacaatttcaatattaatagctccatttccacgtaggatctttcaaggcttcctgtaatgtcagatgtgtttttgagctgatgtaaaccttgggcttatagacactagcttttgcccatattgtcattggatgtgtattagatggtggctgaggtgctgctgctggaatgataggtgatgttgcaagagttgtatgtgttggtatggatccaagttcaggtattggggaatgggcagaggctacgggatctatttgaggtgtatgttgactctgtgttgtttgagtgggtgagataattggtacagggacaataagcgtgtttggatgagtagatgttgaagatgagggacaagttttagtttaaacagcataagggaagctatgttcattgaatattacatctcgagagatgtagattctcccattagcagataagcatttatagcctttgtgattgatactatacctaagaaatgtgcactattctgatataaaatctaatttgtgtttattgtagggtctgtgtttggatagcaggagcaaccaaagactcttaattagttgtaatctggctgcaggttgaagagtttgtgcaagggagtgtcacctttcagaacagaagaaggaagtctattgattagaaaggctaaggctctcactgcttcatcctaaaattttaatggaagagaggcatgggccaggagtgttaaggcagtctctatgagatgtctgtgcttcctttcagccacactattcttttcatgagtgggggcgcatgaaagtctatgatggatcctatgttcaatcagatttgaggtaaaggcttggaattctcccccaatctgattgaaggttcttaattggtagattaagttccttttcaaccggggttttgaagttaatgaatgtctgaattgcatcagacttgtttttgagtaagtaaacccaggtaaatttagaataagcctcaataacgtgaacatagtaataatatccattagaagagaccatgagagagggtctccataagtctgtgtgaatcaattgtagtggttgagtgtaaactgtgtgtgaattagggaaaaagaacttatgaatgtaagtcgatgaatacaccaatagaagctaatctaaagcttggagaagatgagaaagaaacgctaggagattcaactttgtacatgaggattgttggaaaattgtaataattgacaattataaggctaaacatatcttactcagtaaataaattgagtcaatttcttacaatacattaagttagtcacatgaatgcaacgattagaatgttgttatatgtgaaagggtctcctagctaaggaatttattactttcctactgattcagaaataaaacttaaggcctacacatactcgaattgggatgcttgattagacacaaggagatcaacaattggtttttgtattttcataggtaactcaatcatttcatggaaaagtaagaaacaacacacaatttctagatcttcaagagaagttgaatacatagcaatggcaaatacaacttgtgaagttggttagcttctgtctatcctggaagagcttatagttgatcataacgaacttgcattgttgtactgtgataactaatcatccaacacattgctgccaatccaattttccataaaaagaaccaatcacaaatatatatatatatatatatatatagtccatcttgagggagagtatcaagttagttaaattaaaatttagttgattggttagtagtttagagtgagttgtcatagagttagttagtgtgtcttgtaactaactctgaattactataagtaattgtattcatttgtagtcagattgatcattcattcaatatatgatatattttttcttctcttttactttatttctttattgtttgattggtgatatataatttaatataataatttttatataatataagtaaccaatcacaaagtgacctctaaaaatgatggacacctttggtgtcttacttaagtattttttacccaaaaactggtgagagtcccacaaaactacttttaccttatggaaatggctcttcaaaattgattaaagtcaattaattaaatcacaaacagctgtggttgtgagatttggtgtaggatataaagattctgtctacactaaaaaaaattgagaaattatttaaataaaccaaattgaaaaataaatacaatttatatattaaattatgttgtaaaacgtgaagagattaaataagatgtataaaacttggatggcatagcttgaagattagatgaccttgcaaatcatgcctgaccacttggctaattgagattgtttgtgccaaatggcacgatttggttggtgtaataatctcagagttattatacacacatagatatacatgtatataaagtctttggtgattagatagatagatactcacaaatcacaacaaatcagaatcaatataataaaatattaaatgacgtgattagaataataagattaaaattaaaaaagagaaaatgagaaagaaagttattaacagcttattgtgacaaggcttgtccccaattacagcataagagtccgtgttcaatggtccatggacttgaaatgctgtcctaaaatgtttcaaaaagctacaaaaaaaaaaaaagtaaattgtagattagattagaattagagagttaacacttgaaaaacataggacaccttttatttaaaacactataataaagtttttttttcttctttaaatcaaatgaaatgacacataaagaaataattataggataaaaaaaaaagaaataagttttttagtgcatttaaaggttggggtccaagaaaattgctatatactaaaccaattttttggggggacttgctagagatgtgactaataaagtatgaaatgagtgagtatatggtaaagagttggtaaaaaagatggattcaatgaaagtaatgaatttagttgaaattggaatgtactaaatgggttcaacttatttaggtaaaagaatttctaaagaggaatgatttcaatagatttccatatttttcttcaagaaaaaaaaaaatgaaaacaacaagttgagtgatttccttttttccttttgagtatacaacacagagaaaaattgacattttataatgtagaatattctagaagaactttctatttagaaaaaaaaaaattgtacattttatttaataattccctaggtagagttttttattctcctttttataaaacacatatatttttctatttaatttgctattgttcttttatttattaatactacattttttttttaatttaaaagaaagttggggtagggaaaaattggtgacataataagttaataaaaatagcaaaaatagaaaagaataataataaaaaaaaatagggacagagagagagacatagaatagaaggcttaaatgctcataaatatttcaaaagagagaacatagttggtctaagtgggggctctgtgtgtgatattgtgataaaaacaatccaaaacagagcacaaatccagagaaagataaatagaacaaaaggggtttagactctacaagtgggagacagtagtagagctcttacttcataccaaagcagataaatttttgttctttttactgctgtgcagaagaacatcacattcaattcatccaatccttttcaaggtttccaagcatttataacttttttttttctgattctgcaataacttctcaagatctgcaattcaaggctcgagctttgttgggacacagctttttaaaaacttagtattcctcttgtgttgtgtgtagagaagggaggaagcaaaaaatatggaggtgggtcagatgcagagacagtgggttgactatacaaagtccttgttcatggaggtaaagtaaaaacacttgaaatgttattaataataaataatataaaagggtttatttccttgatgggtttgttttgtttttgctgattttggtttatagatgtatatttggtctgtttgtttttgtcttatttctttctttttgttgttgttttggtgagagaagaggtatctggactcccagttcttacagctcctacagttacaagatgagagcaaccctgattttgttgttgaagttgtgtctctcttctttgatgatactgaaaaacttcttaatgatctcactgcagctttgtaaggatccatatttccttcttatcttcagagttcttattattattcattttgtttgttcagcaaactctttttttctttttaagtttttaattgtaatgatcatgttttgcttttggtaactttgaatagtacatgaatgtttgttatgagttcttttataactttttctttctttcttcatacagagaacagcaatgtgttgacttcaaaagagttgatgcccatgttcaccagctcaagggtagcagctctaggtaaattgaagttttatttcagaaacattgattttaaagatccttatttgcaatcttgactttacaaaataatgcctctttcagttttcagttttt

SEQ ID NO: 20970 - DNA, 3542 bp, Cannabis sativa
attattattaatgtaatgaaataacatgaagaaaacaagctgagaccattcatggcagtagctgagaatagcaactctttaatttgaatgtcatctttgttggttgaacaaggtatttcactatcagcaacattgaattcgcaacccgaataagaaggtgactcaatgtcttttgtggctggaatttgttttgtaggtgtagatataacctcctaaaagggaagaaaaacaccattaaattttacaaaacttgtaaaaacaaatcaaaacaaaacaagtatagaaatacatacccctgaattggtaatccattgtccatttacccaatccaagtgaaatctcagttgagagtgattaaatacaatctcatttctattcttataggtaccaaaattaacagcatactttctttgtaacagaattgaagtgattgttccaaccaaccaataactagattcacagaaagcatcaaccttttccatcaacttaaaatctttatcattgctcaattgaggaggctgaggcctaatcatgtctagatgtacagtaattttcacagctttattattcttatcatatctcactacaacagaatctgtacccttttcaccaataatagtagctgggatccatgcatgtgcaaccatattatgtctcagttctactgatgttcctggtttgaattttgagtatagtatttcctgcaaacaaatactcatatcaaaatgacattttaccttaataatcacataaagcaacaatatttattctataatatgcatgttttactaagtagaagtaataggggtgctacctttacatgcatataaacttttttttttacttaaaagttaggatctttaaactactatatatgcatgcatgtataagtaataataacactaaaaaatgcaaaacccattaatattaataaggatataaagcttgcatcttttaaacaaaatgacattatattattggaaaaaatttatagtacaccgtctaacctatctgttctagaatccaaagagtacattttagcttaaagagggtgaacttagaactctcctatattatttacccaaatgctaagaacaagctgaaccaaataaagacactaccttcatacacacaaacttttttatttatttatttttgcttaaagttaggatctttacaatatgcatgtatgtagtaataacagaaaaaataatgcaaaacccatttttgatcaataaaaaacaaaacccattaatactaataagatataaagctagcaagcatctttaaaacaaagtgacattatcttattatattaaaaaaaaaaattagtacactccaaaactgttgttttggtacaagaaaacaaataaaggcacaacctttacatgcatataaacttattttcactatgatctttatataaaaaatgcaatacccaaaatttgtgtttgagcttttcaattcaattttttttaatagaatcacctaatatcatttacccaaaagccaaaaacaagtagaaacaaataaaggcactacaaactatttatttacatattgtctcttgcttaaagttaggatctttaaactacaaaatgcatgtatgcattagtaacaccactaaaaaaatgcaagacccatttttaattgatcaagaaaaaaaaacccaaaagatccaaactttgtgtttgggtacctgttttggagaaataacccattgttgttcaacccaatcccaatgaggtctgagcttagaaaggtgaaaatccttaacatcaggagtttccttaaagaaaacagagcaattgtcattgtgaagagagagcacaacaccagtacaccacacaccatcgtcgtttaagacatcaacgacgtcgtttggctcaaatggcttatcaagctgaggctcagtatgagaaggtggcaaaggtcttatcaaagacctgtcgaccctttccacttggcgttttttctttttggtttggccactgataaagatgttggtgtgatattcaacgacaactgttgaagagttgtctttgttttgttgttcttcttctttgtttttgttacattttctcttctttaatgggttggtacgaggagtaatgattgtggctggataccatgcgtttgtgaagcctgtttcctcatgggtttttcgaacttcgactctgtaatctttgtttctatctaccatttttgtttttattttttgaagcttgaaagtgtgttttttttcttgagattaataacttgtggaagaagaagaagtgaagtgcagaagatgaaagagtttttttttttttttttgctatttattgattatttgagtgtgaagtgaggagtcattggactcaattggaattattttaagaaaatggtaaataaaaggaaattacaatatattaggggtgtgttaggattagacaagacgactcaaaaattggcacgagttaccatgtttggatttgctttaaaatttaaatggatttgactcgtcttaacctgtttaataaacggttttggttacacgagtcgtgttgtgtcaatttgttttataaatgggttgtgttcgagttttattttctgacatgattattaaacaggccgttacttattatacatgagtctcgacatgatacgaatacgacccgcgaacacaaattgccacccctaaagtgtgtttgttgagaggtaaaaataattaatatatattacacttattagtagctaccaagctataaccccataatagagttttagtaatgaaataaatgttatgtttgatgtgattttatcaaaaaaataaaactgtgtaattactagataatgtaattattacggtggttattacatagtctaattattacattatattttaaaatacaatgtgtgcttacatatgagttggtaattacatgtaaattttaatatcttgtttgacaaaatagttagtaatggtaatgataatggtagtgaataggtccattatgcaattaccttcaattacacaatgactttccaaacccaccctcaaattatattgttacagtgtaatttgatggtccgacaaatataccaaattctgcaattattttcaattacacaatgactttccaaacccaccctaggtcatgatgtttggttcagcgtaattgtaatagtaatggtaatgataatggtagtgaataggtccattacattatctgtttcccttttaatttttgtaatccgttacaatataatgattattctattgagtattgtaacaaaatgggaaattaacattgcgagctcaagatgaagaaatgaattttaatgtatttgctccaattgacattcctacatgttgtaaggttgaattagtgaagaattattaagaagtaactatcaagaagaagaaaggggagcacaaagaacgatttttaactactcgatattgtataaaaagattgatgtgtaaaaattgtgaaggtgaatcaaatcttatggataacttcaacattagctacattagagggttttttttttttttt

SEQ ID NO: 20971 - DNA, 3490 bp, Cannabis sativa
aaaataaaataaaaaatgtttttttaatgttcttttattttaaattaaattatttttaaatatttatttacgtgggctaataatattgtgtcatgtgtatactgtatttatgtagacaataccctttgtacacatggacagtcaacctggtaattaactgccaaaaatagatgaaaataactaaatgctaacagaacgtgcgttttgagatttaatcatcaaaatttaggtattgagggttaattgctaacgaagtgaaagtcctaggaattatgtagatacagggtaccatgaagtatgcaaaataagtaaccacggcatggatttcatctttgttatttctcttcaaaaattggctgcaaagaggtgaagtgaccatttatctatataaatctataattacaatggaagtggagcaaaaagtgataagaacagagaaaaggttacattaatgaaaataaaacatttagagttgatcttctttaaacctaaagaagcatagagttaattttcttctgatctctctaatatgaaaatgttgcctttgtcatccctccctatcctcaagatatcatcaacataactagagtgattgaatgaaggtaacaaattatgtaatattcttgaacttcagaagaaaaaaaaatggcaatcacaaaatgtaatcaaaatcaaatagactcgttgaataaggatacgtgatttccagccaaccctctggattgaagatgccaagcagaagatcataatttttccggaacatattcattaactatagtgttcaaaaaagagaaagctaaggttaaaaagagtgggaaaaacaacacctcagagcatatcatatttatatgcaatgtcaactaagctttcagaatacctgatctggaataattgttgagtgatcataattgatctctactctctgtagaatttgaacagcagaaagttaggtgtatgatgttttttttttccgaaattaggatgctcgcctaaccctactatatttggggactaaaaaactatgaaatgtcaatttgcatacatacattcaatttttgtcttggaaaaatagtttttccaacaaatgagttggagttagagttgagattcttgagctaagaacaatagaatattatatgtaaaaaaaggagaaaaaaggatagaagagttttaactgatctggatgcaatcttgaaggaagcctcaatagtcagctgcccatctagcattttgaaacctctcacattgaacttgattacattaactgctttgctctccagttgaaaagaacaatttatgaaagataaaggaaatcatctcactattcatgatgcagaaaataatattttacactgtaatggtgaactaagtagatgttcaaacaaaacacaaaaaataacagtaacaataagaattctatttctatttcactgaaggtcaattttgacaaaaatttagaaaatgaacaaagattctgtttgtgagggaaaattcttaggaatattcatagaatcctaccttagcaacatcaatggtctggaagaaatctcccaaggagatgaagtctcttaatcctagttttgttctctttgctcctaatactgttattgtactatacacaagcttccagtttccagctacctttcatagaaaattgaaaaaaagaaagataaaatcacaaactaaggtcagcacaacatacaatatattaatagagatgaaccttttctaaatttctagtgggatttggagttggattctgagactccagctgcctaaccagattttcaatctcagattttttcgcagaggggactccaaaaatacctctattgattccttgaaaaattaagaacaaaagtcctatttcagttaatgggatctcatattagtattcgtagggggctgaaatacataaaaacgtacctgtaagagcttggaaaagctcagcttttaactgggtaagtgattcttccccaattaggccagagctttgttctgcatctctggctatgaaaatggggatggtcccaggtgggcactcaccaaatatagaggtcttagttctttgatgcagggttgtgaataatctgtgagttcttatcttgttggtggttctctgtatttgaggatttacaggaaaagctgggaatagtggttgtacaagcattgaggccatggaaataacactataagtaataaaaagaataaataataagccttaatgaccaagggccatggttgaaaagattggaagaaagctgaatcagtttcctttccaagctttttccatttgatgtttttttctttaattttgtttttttatatatttttttattatgttctgtctgtgtggtaaatattacttcttttgtcctttttattttaaagaaatttgacattaacttgtgtaaaaaaaaaaagttaataacatcataaaataaatttcagaaaacaaaagaaaagagaaggtagaagctggaaacttatcaagttttccattttgttgattttggatttgaggataggcttttgttttagtatagatgttagtcttgtggacgagactttacaaaatgtttggtaggagagaagtggatataaaaaaaaaaaagaaaagctaattaggatttttataccttaaattttgaaatgtattaaattatattttctgaatttttaatgtcgttaaaaatgctctctgatttattgagattattggcttttaaagatttttgtctaattttattaaaaaaagtctaacatagatgaaaattcagtaaacataatttagtatatgtcaaaattcgaggggcatgatttaatagatatataagtttgggggcatggtttagtacataaacaatcactgaaatagtaaaatttaatgaaattaaataaaagtacctaaatctaacaatctcaatagttcaagaaaaatatttaacagccagaaaaattcaagaagcatgttttggtacatgttaaaatttaaggggtaaaaatcctaattagccaacatataaatacaaatggtaggaacttttgattgtcttcttttttttcggatagatttttctaaattgtcgagacttaattctttgtatcataacgaactaataagaattaattaaaaaaagcaatataaaagagtttaacaaaaccaaatgcaagcattgttaaaaaaaaaaaaaaaatagataagctagcaaaacaatttacccaaaatcatatataaaaaaaaggtaaattatggcaaaactttctgttttcatctattttttagtattaagtgtcatgttggattgtacatgtggacaaaaatatacacatgacataatttaattgacccacataataaataaaaaaaattaaaattaaaaaatttaatgtcggttgaaagttaaaattttaatttataaataaaagaattaaattaaaaacttaaaaagaaaatctctaatttggggaaccttaaaaattagaaacc

SEQ ID NO: 20972 - DNA, 5694 bp, Cannabis sativa
tatacttccaggaacttgagtggaaataatttcacaggtcctattccagatgcacttcttgaaataatcacaaatataaatatagaatttatataagctttgaaggatatgagaataatcttttaattaatgtatggcattaattaatgaaattaaatatatataattttgtttgcacagcattgatacaaataattggaatagtactaatgcatgcccatcaaactcatgcggaaagaataataaaagctttgtggtaccactggctgcatcactaagtgggttgctcttcgtctgctttactattgtggttattatttggagactaaggaaacctcataataaagctgctatcaatttagaaggttaatttttaattatatatatatatattctggttatattatttattttagtacgtacgtactttcagagtttcaattactagttcatgttctgcaatgtgtatatttggattgtggatttcttgcagagaataaaaattgagaagaaaaaagtaaattcatttttgttgtatatatatatgttcaagtaaattcttgttagggcgatattatttacaggtgaaaacgtaaagtcggaggataataatgaagatgatcatgaatcgtataaaaataataaaatggaacgatacacatactctgagattggaaaagtaaccaacaacactttcaaaaggtaataggtgaaggtggatttggaaaggtttaccatggttacttaaatggcgttgaagtagctgtgaagatgctttcttcttcatcccttcaaggacatagacagtttcacgctgaggttttcttttttcttctttctaataaaaaagcatatatatatttatcttttaataatacataatctaattcatagtacaatatgtatattacagctaaaactacttttgagagttcatcataaaaacttgactactctagttgggtactgcaatgatggatccaatgttggactcatttacgagtacatggcaatgggaaacttacgatcacatctttctggtttgttatattatatattgttttaagtatatataattagggtcatgaatagataataattattatatattgttacatatttaggtaacagaagtagtggcattataatcttgagttgggaacaaagacttttaatagcaatagacgctgcacaaggttcgtaaacatatatatacgttttccaaatatatggtttgacgtatatatatgttcttattacctatattgtaactaattaagttttctcttaaataaatctcccatacatattatttatttcctgtccgctttactgaagaattaatattattatgctagttactaataaacattaaacacttgattaggactggagtacctgcataatggatgtaagcctccaataattcatcgtgatgttaaatcaacaaacatcttgttgaatgagaagtttcaggctaagttaggtgattttggcctttccaaagttttcggaaacaatcatacatctacatttgctgttaataccacaaccactcctgttggtatgtcagcaagtattgctggcaccctcggctatcttgatccagagtaagtaaatatcattttgatcaatataattatagattgtttcaaaatgtttaatatttatataaaaatgcttataatattttttttttattactttcaatatagatattatacatcaaattggttgaacgagaaaagcgatgtttatagtttcggaattgttttattggagataattacagctcgacctgtggtagcaacaacaaaacaaaataaacatattattgagtgggttagttcaatgattgctaaaggagatattaaaagtattattgatccaaggttgaaacaaggtactgttgatattaatactgtgtggaaattgattgaaatatcaatggcttgtgtctcaaaaacttccaacaatagaccaactatgagccgtgtagtgactgatttgaaggagtgtttgaccacaaatataactcgaaacaacagcagcaatgttcagactactcctgaatatttaactgattcacatgaaaagtatatggcttcagtagaattttctccaacagctaggtaataaacgatgaagaagatgatatagtaatttagcctgcgtcaagataaaaggaaaaacttgtgtgtgtgtgtgtatatatgtatgttttctttctgaggttttctgtttcttgtacttgttttctgaatacattttgtactcttaatcgtacaatttttcaactaaaattgtgctgttttttaatttctacatatgccatatgggagggagatttgaatttgggatctacttttgtaaagagaagtgtcaaagtactactaagatattagtataactagatctagatattataagggtgttaggattgaagttttatgggaataggaatttgaaaacaagcctattaacacaaagaaggatagatgaaaactatattgggaattccctccccttaaaaagttgattagaaaatcttgcttgccagtctattacttcaatcgactgcctatacttgcgtactaaaaaatctgtaacacttggcctggaggcctttagaaggtgaagagaaaacaccctctcatggatctccttaacaaaagggatttccattaaatgatcatcatcctcaatcccaatttttttagagaataaatcatcaaaatctaagggaatctaaggctggcatatgttttttatcttctcatttaaacccttaccatctttcaaaacccaaatttggttccttcttctgtaaataatagtagatggatggaaaaaactcgagctcttgtcacccaaatgcagccagagctaattcttcttctttcatcgcgaacgatgcttctgcgtcccattctttattgtttgtcttttctgtatttgatgtggctgcattaccttttgtagttttttttttttgaatcgaaaacttttatccatgtgaccatacttcccacaattataacattttctattaaatttattattattctttgactgacctctttttttgtctttcttttgagctccatctgtttggtagcttccatatatgatgactatttttgtcatcatgttttttagaatttttactagcaatttggtcggggttgacctttcttatcattgcttaagagtgtttcttcatcactttttttgagactttagatgtttgcttagctaatgcttcttggttagctagcaagttttccaattcaacaagagaaggttggcttggcaagccttctattgcagcaataaaaattttaaatttttggcttcaatccatgaataataattcttctaattctagcatctgacatgccagaatcagaatctaatgcagaaatttcatgacaaaaagatcttaccttattggtgaagtacgtattgattttcgtccctttgcctggttgagagaagcttaatctcctatcactcttcttggtgaacagtgatgtgaaagtaccccacacttccttcggtgtcttgccggcttgatgtgctccaacatttcattttcaattgtggtccaaatcgtaaatatgattttgttcgctttaatcttccatttcttcaaagcagttgcatcctctggttgtgtgattttattgccaccaacgatatcccacaattcttggccttagagataagcctccatgtgcatcgactacgtgttgtaattttggtgttaattttttaatttcgttgacgatttgaaagtcacccatcgtgcaaactttgtagtattaaactatacacaatcactttgattagaaactcaacaaaggaatctttcggaatgaaccggatccagcttcgatactacttgttaaacaccgcaatatgtgaaaatgtaattatttttattattgcaacgtaattacaccaaaacttaatacaatacttgaccacaatatacattatgtactcactattattttactaacacttaatgttcacactcaaatatttatacacacactctttggagtacttagactatacacactttactatacaagacacttagttttggaacactcacttatgcacacactatttggaatctaacactattaaaaatcttatttctagtcacaacaaaactattgactaaaagtaaaaaagttgtaactaattataaatttttatttctatgttgtgactaaaaagtccgaggttaaaagtactagtcacaaaaattataatttattgtgactaaatgtgtgtttagtcacaataagttattgtgactaaaactaaattagtgacaacttgtagctaaatactatattttagtcacaagtagctttttgttgtgattaaaaatcacatttagtcacaaaaaaattttgtcatgattaaaaaattatttttaaaagtaactgtttttttagtgtaaagtgctatatatagaacaccaacgttgttttaatcaaccaacttttactttgctagaaaactctagctattacttcttatatatgggcttggcccaaaaacgcgaaaactaaatatatctactgagtactgactattgtttgtaaaaaattttaaaaaactatttcttagtcatttcttgaggtttactacatttatctagattttttttactaacttttattagtaattataatgggctttatctcaaatgtagaattaattaacaaatatgtaactagaaatttttaaaagtaagtgatgatttctaacatttaggtggcttttagttagtaggaataaaaatataggaataggaataagaatatgaatgtaatggaacaattaaaatttaaaatgtatcaaaaaaattaataaaaaaaatgattaaattttttgtcttgctacgttggaatggtttttccttccaatactttaaaatacaaccaaataaaagaatggaataaaaatggtttcttttccattctattccatttcattacctctaaccacgtcactttagagttttctcctataataatgatcgattgacataataataagtaaattaatgatagctatttaaattgaaaataaagagaatcacctcatgtaatattttttaatcttttttttttattatgcttagggattagatgtgttgcaatgttgatttggattgtgattttcgtataaataaaaaaaaaaaaattgctttgaaatgtaaaaattaaaaaaaaaaaatccaaaaaaataattacatgcggtataagtaaaataaaatatgtgatcgatcaagagctagaggcagcaggagaatatacattgtgtgcatgtctttctaaaatacttatcgtattagtttcctagattatatttaattaggtcaaactaataaatacatcttaaaatacacaatgacttgacatatatggttgttaaaccctgatgggccacatgttggatatacataaaacaatttaataataatcaaataggccactaatttcattaactaataaatatttcatttgacttataaaaaaaaaagagaaagaaaggaaattagtaatagtacttcatctctcatcccatcaaatataacattcataatatatgtttgctataataaattaaatggaagtgagtaatgagcatatcaattatacacatata

SEQ ID NO: 20973 - DNA, 2654 bp, Cannabis sativa
taaaaagaattggataaggcgccaagtatgcacgcgtttcaagacgcatcgaattcatataaaacactccaccgcagaggatcacaacccaccaaaatcaatttccggttttctgatgggtcagtcttcgccggaaaagcttatagtcgtcagtaatgagcccaacggaattggattcgtgacgatcaaccgtcccagatctctaaactcactcaccaagcctatgatgacggacctagctcaatccatcaaggccttggctcaagacgattcggtccgtgtcatcgttctttccgggtcgggtcgagccttttgctccggcgtcgacttgacttcggccgaggatgttttcaaaggagacgttaaggatgtggagtccgatccggtggcgcagatggagcggtgcaagaagccgattattggagccataaatggattcgcggtcactgctggttttgagatcgcgctagcttgcgatttattggtggctagtaaaggagctaagttcatggatactcatgctaggtttgtcatattttcttgctgttattaaagtttgatccgaatttttatataaatttgtatttgaaaaaaaaaggtcaacttttgtgaaggagggttagaaattcttatgcaagaatccattttgaatagttgattagcctaagtttgagatttgaatttgtactctatttgggataagtcaaatctacttagaatctcccaaaaatttgaatttgggtatgaatttgtgctattggagctatttagtaatttgggttcagattttgtttatggaaaacgaaattatactgcacaaacttgatgtaacaaaactatgttttgagtacttgatgagtctattaaaagctataatggcagctttatgcatctatctgtatctttagattctttaccatttgtttgcattagaatgaaaatatatgttggctttggagaaaaaaatacttcattacagtgaaattcttccatccgttttgaaaattttagtgatatgaaaaactactattcttgcagatttgggatatttccttcatggggactttctcagaagctttcccggattataggagccaacaaagctagagaagtatcacttgcagccacacccctaactgcagaggtagctgagaaattaggctttgtgaatcatgttgttgaagagaatgaattattgaacaaagcccgagaaattgccttggctattataaaaaataatcaagatttagtgttgaggtataaggcagtgataaatgatggcctcaagctggaccttggtcatgctctttcattagaaaaggttcttattttttttgcttctatcttcaacattagatagttttgatgtttcatagtaaaaattgtttcttttttctttattgaaatttcaggtcaattctctgtacttatgtctttgttattgttacaggaaagagctcatgactattacaatggaatgaccaaagatcaattcaagaagatgcaggaatttattgcaggtcgcagctcaaaaaagccttcttctaagttgtagactactcattctattgtttttgttttcctttctgttctgttctgctaagtttcagtaccaatccatatgtttaattggatctcttatatacagttcttttatgaaaagtttgtacttaaagagttcatcaagtcgattagaaataaatgaatggggaaataaaatgtatattgaatgtaagaaaatggaatagaactggagatggtcaaatttatcaaattgttcatatgtgtatttttagatttcaattataaaaatagtgttctgaaataacatttgttctagaatgtttatatatttttcttccaaaagaaaaaagtacacaattattgaaaatttataatttcttattaaattatttaattaatcttatcattgtaattttttgtgggtgtatggagaaatcacacctcttgccatatatatttttgtttttcattaatgtgtgaaaaacttatttgcattcaattatatttatttaactatttacatgttatcatgctgggtgtggacatttttcggattcaaaatttataatttcgttatgaaattattttagcaatctcagcaaaaattattattatttttcattattttaattggggacagagaaatcaaccctcttgccatagaattctttgttgatgataaatgtgtaaaaatgttattttaacttattgacatgtaatttattaattcaagcttaaaatgaaggagcacatagaggcagctagctgtggatatttattgggatgcaaaaggaaaatgagttgtgcaaaagatttgtttgctaagttaattacatacgtataattttatgttctttggtcactattgaaagactagctattttgcagagcacctaatctagtgaagatagtgttttaggcaagaaagatagtgctatgtttggtttttgttacattgcttatgttttcagtcttattgtcccacattggctatgtaaataaaataggatatcatagctgctttaaaatacaaacttgtttaactttagaagcatacctttctcggccttttggctaagatcaagtgtagtatctgttcttatcagtttaatatctgatatgtgggccaa

SEQ ID NO: 20974 - DNA, 7647 bp, Cannabis sativa
  modified_base (489)..(490): a, c, t, g, unknown or other
gttaaaaagtaaaaacgtaccctgacactcatttactgtaccctaagacccatctagtgtaccacggaatacattccgtaaaagtacatcacaggacaaaatcatatccatatcatatataaaatgtatggaccattcatcttattatcaattaattctaaaatagaagtacatgtatgtaccttaatcacacacttgtgtattatttaacaccatattagctttgtgttgtttagagctttaagttgttacctgatgacacttcacatataagtattaactaacaacaattattttcggaagatgtttcttcctgtatgaaattttcatattatttttagctttaatttttttattggtgtattttgtagtactttcagcgggatggataaaacaagatgagtacattttttcaagtagaagtgttttttcttttggtattttttttcaaacattaagttttattttctattttttttttttgaaaannaaaaaaagaaaaagaaaaaaagacgatggcctttttctagattaaaaaaattcatcatattttggtgcccattaataattctgagtaaatacaaatatgctatatatgctgttttggattttaatccattgagagtggcaaatgagtcaggtgagcgtggcaatgagttaggtaaaggaatcccagacgaaaccttttctcctacattacattttattttattcttcacgtgcaagagatcagatataaaatatagtatattcagtcctcgaaaaagttcaaaatataattatgattttgtacttgtactaccaaataccaataaaataaattaataaaaggcttgtccaatcactgtttttatatgcaaaacggtgagaaatttcaactgttcattatgttgggttggatgaatagctcagtccaattatagtgcagcaatattcatccatacgtgtattattaggtaaataccattttggaactcgtgttttggaaaagttacagattggaccttctgttttgttaataacaaaatagaccctgtattttttaaaatggtaaaaataggaccctaagcttaatttttgataactttttttttaatacaaccaacttgaagacaattcctaataagaacagatacaaaaaatgtaagcatttttagatcggattataattaaactttaaaaataaattcaaaggtcctatttgtactattttaaaaaatacaaggttcattttactatttaacaaaacacaagatccaattggtaatttttacaaaacacagaattcaaaatgatatttacccgtattattataatgtattttgttaaaatacatacatcaagtaaaagaaaattgattaggagatatgaataattcccaacctatttctattcattatctaactcgtagtaagctttcctaaattactgtattagttcttccaattacataaagacaaattacattataaaggaatgtaatgatgaaaacttgttcctaataaaacaatctgattgaactgtcatgagctagattgatcatagaaaatgcactacagaattttttttagaactcctcttagatttaaacttgcagttattaacactttaagaaatcaactgcctaagtttcaaccaatattatcagatactacaataacaaattaagcatagcagctaacgatgcccatctaacatgggtactatggaaatacttagtcgtacaaaaaaaaaaacatggtgttacatttgcaaatagattgccaatgacaataacaataaataaatatatagtaattttctctagtaaataatgatttataagaacattgagcaagttaacagcaaaaaaataaaaagtgacgaaataagagttgggtatgtttgtcccatggttcaaattgaatgaagcatcttctcatagacgatgtgttattactccacgttgttcatccaaaacaaaattagctcgagaaaagtgtgtgctagtaaagaatggttttagatcatagatctcatgttcttgtgcctgtaacaagaaaagggtttacatttagtcatatggtacttaatacttataggctaagatataaaggttcaattgttttgacattgggattaaatttaccttgatttgcaaatcctctactttcacatcaatttgggtcagtcctgaagtagttccagacacgatttcttcaaaatgcagcgcattcttcacaagctcgcggagaagatacaggaggaactcattgaaatccttcttgaaagtcatatactttctgaagctctgcaatagataagtatgtggtcctcccattagaataaaaaaaactcataaagaacaggtgattcttggcagaggaggccttatctaagagtaaagaattctaataaacagcattcagttctcttctaaaaataaaataaaattggaaactcatttggaatcatataggcgcgcgcgttcagttttctataaggtaagtgtggacaatttccaaacctttcgtagagctttctgcacaccgaatttttgggttgagataaatgaatcaagcagaacacgaattgacatgtccacatcttcttcagtcacatgctgtctcaggtgcattcttgcgtgtgcttcagacatccgaatcattgactcaatgtgcctcactgctattggcactccttgtccattctagaattaaaaaaaaaaaagtgtgagaaaaacagatacaaataaataatcaaagtactagctaaaccatcaactaaaatttccaagcaaaacagaaaaggcatagaaactcactgaggattctctccgcaattcagcataaacatgagtaagtttctccatatcagcatcatgcaacctcgggaacacattcaacttggcataagttatgtactttttaagcatgtcttgagaaagtatctgtaaagtgtaagatcacaattaaattcagaagcacatgagaaggctttgaagcgaaaagaaaataagtaattagctggacaggtggagcattttataaacctctgggtctgctggttcgcctgacatttggacatcatcttgtgattcactgaaagtcttatcttcgatatgagctcccttggcttgtgatttaaaatgactgtcaactacaaacttagccagcatttcatcagcgattggatcaacaacatcctgcattgcatcaatttccttccatgtcaacatgtgaactgattgagcatgaatgaattaagaagagagattgcacaaataccttgacaacacagaggatatcaaacctagagatgatgggatctgtcaattcaacattttgtgaaaatgtttttgaggaatcatatctggaatatagacaaagaaaatgtcagtcttaaaaaaacgtgtgaaagcactaatgcaaacgaggatagatggcttgtaaaagtagcatagttcaaatggttagtttgagctgaaaatacaactttctgctaacaaataagcatattaactacatcagtaaattcactgttcatgcatggcctatcatgaatagtaaaattagtaagcagttccaatgtatctcccaactgctaaattattttcttttgcataccttcctccaacaggattggcagcagcaatgacagagcagcgtgcttggagtgaagtgacaatcccagccttggaaatactaatgctctgctgctccatagcttcgtgaatactcaccctgaaagaaagaaaaaattgttcaaacctctttcctggttggcccatgggggtgaattatcaagacagacaaatttcaaaatcagtaaatttccttacctgtcctgatcattcatcttgtcaaactcatcaataagacataatcctctgtcagcaagaacaagggcccctccctcaagagtccactcccttgtgactgggtccttgtgcactgctgctgtaagccccactgcagaagctcccttaccagtagtatacacagccctctgtccagtcttttccacataccttaagaaaaaaaggaaaagaagatatccttggttattacttatcttcatcatacaataaaaaactgttcggccccagttcttacttgagaaattgtgatttggctgttccaggatcacctaggagaagtacattaatatctcctcgtagtctgtgcttcccttctacattcttctcttgacccccaaacatagccagggctaatgcagtttttatgtcctcatgtccatagattgatggggcaatcgacttaacaatcttcatttttattaaatgatctttagttaataaaaaaattcataatggataatattgaacaataatgtgaagggaaatagtaagactaaaatttttcaaaaacataccctttctcctattctggggtctttagccagcttctcgatctctttcttgtcttcttgggtaagtttataggcagaaaagaggtcttgtttctttgtcacatagttggcttccaccacggtagcaaatactgggaatccattctttgtgttcaaagacaaatcgaaattatttgtataaatgcccgtaacttcctgaagtacaccaaacagaacagaagtatcagaaatactgacgtggaccataaaaacattaaaataagcaagttcatggcaagaattatacaatctcttctccagggcgagcacaatcaattaaatcgttcagcagtataacttctttgtatctaggaagacggcctgctggtacgattcctgggctttcttgaagagtaagcttttggtaatttctatatatagtctgcatcaaggtatgcaggcatacattaaaaaaaacaataaacaatctgcaggttttgctaatgtataatattcatagctgataattgaaatgttggttttttccctctaatttattcattacaggctttacacccatatatgaaatgttcacaacaatcatatgtaaaggaaaaactaatgtactcacctgctcaatattgatggtgaatggcccttttgattggcattcaggacaagaaccaaccttcacctcagaatatgaattctgaaagaatggccccaaaatagtaccacacttgttgcaatcatacttgacctgttgcaattggggaaagaccccagatcgacgggtcacaactcccccaatacggatcattgtattcaaatgaatctgtctgcacaactcaaaagaaaaaagaatgaaatgttaataacaaatagaaaactaagataaactgagtgggataaaatatgaattattatgcagcaccttatgttccgaatctgatcatacactggtaggttggtgatccgtacgtaaatcttttgatggatatttttatagttaggatgtaaactaaagacaacattttttgcaacatcctccatgacttccaggacagattgaggggcatcagccagccagatggcaatattgggatggatatagataaattgcttgtaatcaatctctagactgcacttattagctgcaattgtaattaagcaatttaccaaaacaatgttaagaaaacaaaacaaaaagattgaactttggttaatacaagtacgcaacaagtataatcaatcaacttcacttgtctcatatagacatgtaaatagtggcagtacctgagaccatctcattaatcaaccggacgtattcataatcagtactttcatttttcggattcacataagtgagcagaaactccttgaactttttggctataaaacggcgaacttcatccctagttacccactctctgagagttccttgcacacgatacatctcaaactcgccatcttcatcatcatcatcctaagtattaataataaatgtgagcaaatatgaggaaacaaacccaaaatgataaaatggaaatttgatatgcctgtggaatggagcttaagaccacacctcaaaggggtcatcatcagtttgatcagtagttggcaaatcttccctggaatgagctctttgcgatcttcctggtgaactctgtaacccgtcagcatcagatggaggcctgaagtcagccctagccctcttggaaggtctatagctatcatcatcggtgtctgcacaaaattcaaataaattaaaggaacgacaagaaaataaagagtagaaatttacaggattttcaaagtagaagacttgactaccttgatcatgaagaaggtgaggaagcttgcgagaggtcaaacgaacatcacgagcatcaagctctgattcggcagccttacggtcagccatgatctgatcaagatccctctcatcctcaagggaatcatccagaccgacagactcataattatcgttttcgtccattcggcggtagtccctgcagaaacacaaagagcaaacaaatcaagcttccctccctgaatacggaagataaagaggaataaatttattcatccagagacttactccatgaaattgtcgtgaaagagatcctcgccttcctcctcttcctcctcattagggagctcttcggggtcatcgcggatgatttcgggatcgactgcagcctcttcgtcgtcggagaaattctcggaggtccgactggtgtgaggaagttgatcggtgttgaagccgacggaggtgggagaatcgggcgtggaggggggattaccagacattttgagtgaaatggaaaaacccttgtgttgagtgtgtttgcccaactaacctatcctcgctcactgtgtaaaccctataaccccacttacacaacatctccattttggcgggaaatttttttgggcgggaaaactttattatattatttattgtaagcgcgggaaaactgtcttacttccacgtgtaatttaccccgggaggtctttatttttttctgtgaacacaatcacatggtatattttatgtattaaaaaaaattgtaatttttttttttgagattaaaataaaattgtaatttacttgcgtgtgtttgtaaccactttttaatttgtttgttgttttttaatgagaaaaaaaaccatttgtgtaagaatatattttgtaaaaaattgcttttattttttatttttttataaataagtattaaaattttaagaataatgaaaaattacgtttaaaatttatttatatattttcttaaagttaattaagatttttgctcacatatacaaaatcatactccctaaactattgaaattgttagatttaaaattttttgtctaattttagtaaaaaaaaaataccatgaataaaagtttaagggcataattggttagatatcaaagtccgaggaacatttagttcataaacaatcactgagttagttaaattgaatgaaattggacaaaattctttaaaaccaacaatctcaatagttcagaaaaaaaaaaatttaattgcatgattttatacatgttaaaattctaaattcctaattaaccttttcttaattatagtttatttgaattctttttaattaatatttggaccctgaactcaaatcttggctcccaatctagacctcgaataacagctcccagtcacaactcaaaccctaacccctaaccacgatctttggccctgacctagactagattcaaatgcaaatccaaaccctagaccctggcctagactcaaactcg

SEQ ID NO: 20975 - DNA, 1551 bp, Cannabis sativa
tattgtgttagaacctcctttgatgtgatatgcatgattggttgcttttgcttctaagcaagcaaatctcacagctgttgtcacttgtaagcaaagctggtcttaataacacttttattaaaaaacaaaatccttaactaattacagaattagaagctggtttggtgtcatttgtttgatatggtcaatcaatttcagttgaggtaccattttgtggttgttatcaaattagggttttcaaataatgccaaccaagggaaaagaggggaccctcttcatatcattttcattttattttatttttgttctcatctcatcatgcaatgcaatccaatacacttgtttttttttttgttttaataattttatgatgaaaatatttaagaatagtattataggaaggtggtatctagttccttgtcacaatcattgtcccaccttgtgattttgaatgttcccttttcttatggtggaaaatttgataaaattaagtaccatacaaaaccaattggaaattatgatgatttgggatattacaaccagagatgggagttattagcttaacatgagagtcatatgattttgttaagttgtttttagcttttagaattaaaaaaaaaatcatgtttgtgagtaaaaaatgaaaaaggtttactttttttttcctttgtaaagttaggatttttaacttttttataacatcttttagaaggtataggacagctctaatggaggtactttactttcaaatttattagactagtaattaatttttacttaagttagccaataaaagaaaatatatatctatatctatataaaaaattagtttggcattgtgctaacaaagggcatttttttttgtcttctctataaattattattagaattattttataaatatacaaaaatgaaaaaaaaatataattttatggatctgttgtttttttacacttttacggattttatttatttatttttttacaaaaatagtgttattttttgcattgcttttaagaattttttttttcacgctgttacgagaaagcaacataatttgtttttacaactatatagtgttattttttttattattttaatgtcgctgtcacgggaaaataacatgaaaataacattttacgttaaaaaaaaaaacaagtgaaagcatgtaaaaaaaaatccgtaaaaatgtaaataatattaataaaagaaaagtcctttaaaatatatataaaaaaatctgtaaacatgtaaaaagtctattatgtgttaaaatacagaagtgtacggtttagaaagtagaattagatgagtgtatatggttctatctcaaaattaattggaaatgagaataataactcatgtattttaatattttatgtatagtatttaattttcatatattatcaatgtgagactttctaatactatcctacgtccatagtaagttgatcttttggtatatatatagcacaattagtatatgccaccaatgaaacaatcatgcatgcacttgctttttgtcctattgcaacacaatgttgggaaaag

SEQ ID NO: 20976 - DNA, 2194 bp, Cannabis sativa
attgggagttgggttgcagagtttgccacaggagaagatggagcaagttgttcagatcattaagaagagaaatgggcatttgaaacaagatggtgatgagattgagctcgacattgaagctgtcgacacagagactctctgggaattggatcgtcttgttactaattggaagaagatggtcagcaaaattaaacggcaagctctcatgaacaatacaattgggagcaacaacaacaacaaccatagcatgaatgcccataaaggcaatgtggtgagtagaagaatctttcaatgtcgtaaatttagttctttatttcaattctgatttagcaatgtctaaccggtaaaacatttgatttgtttctataataggaatcgagggcaagtgaaaaggtggaagccagtccacctgagccgaagaaggctaagaaaggaggtggaggaggaggagtagaagctagggatgaagatgttgacattggtgatgatatgccaatgagtagctttcctcctgttgagattgagaaagatgttggagaacaccatcctaatgtcggtggcggcggtggtggtgcgagtagtagctctagcagctcaagcagttcaagtagtgattcctcatcatccagtggtataacccaattatgattgttttgggatttgtgcagaggaaaaacactcattattagttctttacttattgtggtttgtggtggtttgtttgttgttgttctctctttgtacagattcagattctggtagtagttcagggagtgattccgatgatgataatgcccactcgtagttttccaaaagtgggactttgaattggaattttagtcaagaacgaaagacaaactgccaagaatgaatccataaacaaacacacctgatttgggtggggtttgtgagtgagagaagaatgaatgaactttcttcagaaagtttatgccattgggcattgatcggcattggcagtggtaatggcaatggcaatggcggatcctttccagcaaagagaagttggccagagatatattgatgaggtaaatgagtccaatgcctatttgtttataataattaatttaccaaaatgagctttgtgtattgaatatgcttaaatcttctcttacagggacaacagggacaacaagtatggttggatgggattggcaggtgttgtttagttagtttagtattactattaaatacgaaatttgtaaagagatgacctttttttcttaggataaatttgattagacaaccttgtgtaaatttttcattatataacattgtgtaaacatcacatcacttcctcttcaatctttgaatccaataaaattttcaccacaattggttcctattaagaataatctttaaacaacaaagcaaattatgacttggtattgaagagaggtatctaaacaagaattattattaggctatatgagtcaagattagcatgttcacgattcttggattctatgtcttggcctagggacaagccatgtgcttttgcaatgtggcaataactttatcactcattgaaacctcattatataactttacaacgaagacagtattacccaattaataatattgtgttgtctgtgtgtccctactactacccctaagaaaaagggaaaaagatcaaaaatgtaagaaataaaaaaaaataaaaaacaaaagttgggaggatggtccaactaattgaactaatggaaaataaaaaaggtgatgagtttgttgtggattgaaaaagaaaaaataatgatcctattggggggagatggttatgtgtgtatttttgatggtgatggaatttgagttattgagtttctattggatgagagaaatcaatgtaaatttgaataagattatgtggaatcttcttcttcttctattgaagacaatatttttctctctatttaggctttttgtgtttttctccaaacattagtggccccaaatttcatgtagaaggaacttggaaataatgtttgtagttgttgacccatcaaagttgacattgaaactaaatgaaaaataaaataacaaaatcccatttatattgtctattaggaaaaacaatggcacaaatcaataggctgagtatattgttctaaatggtttcagcaacaataaacttttttcctaatacaaaacaaaaatctctctcaaaactggtacaata

SEQ ID NO: 20977 - DNA, 2320 bp, Cannabis sativa
acaaatacaacaaagcttaagcaacacttatcaaaaataccgtaaggcttgaaaataaatatgaaaaaaagtttaaagtttcaacaatacaataattagtggactttaggctggacattcacatattaaaacctaaaaaaatataaaatatgtatttttataatacgaagtgcaatgcagtttgaaccatatattaacaatttaaaattataaatcgcatggtttagaaaaaaattcaaactacggtaccacaaaaaatttcaaaccaccttttttttgcagtgcgaatgatttgagtagtttaatgaatcctaaattctaatcttagcatagcaaccttaaatttgtagtagtattgatgcccataattaaaattatcttatagtgttgttgggcaatatggcaagaataattgcatttgtttttggtatttattcgcaggggtgagcatcggtcggtttaatcggttttttttctatataaaaatccagaattcgattttcgatctagattagtgtaatttaaaaatcgaccgaccaatccaaaacctatcttaaatccgatcgttttgaacctcaatttgatcaatttaaactgcccaaaccgaacttcttttaaaaaaaatatgattcaatttattctataaacacattacattttacgactacaaatatataaatcaattattcaaaaactaattattttattcttttaactttaataataatataataatatattattaataacggaaaaaaatttaataaattaatatatatgtataacaatcagtttcgtttttctcgatcgattcattactaaacaaacgaccgttcaatgtcgattttaaccagccgttttttcggttctgtcagttttgattccaaaagtgttcaataggtcggtttgaacgatttttttaattttttaaattttatgctcagccctatttgttcgtgttaaaaattagtttctgattatattataaaaaattggaaaaattgagctcctaatttattttatattttgaaaactcaaattctaaattatcacttaacaaaatataatttataatttttgcaaaataaaaaatctaaaataatatttacctaattttaatatatattttttgtgtggacaaattattatcattagttatattagataatagacaactaaatctactcatattgtatagatctaataatatcaatggtaaactaacaacatacctctttggccttgtaaagtttgccttctcaagctcgtcatggtttggagatcatttgaaagaggaaagcatgaggagtattatatcacatatttccacgttggtactataattttcacttttgttttctaccactaatattaggtgaaaaggctataagaaaaaatttggtgagatcaacacaaaactataattttatatatatatatatatataaaaaaaaaaaaacacccaactttaccaagattgttgttgaacaatttgaatatggttcaaataatttgattcacatgtgtggatcaaaattattttcaacaaatttttaaattttattgtgactaaaaatcttagaaaagtttactaaactctcacacaattgagaagattgactcctcatcctcacttgaaaaaaaaaaataaagaaatcatattaatcttgcctgaatttcaagttcttcagatcccaccagaattggatttggaatgatggattccctactttgaaaaacgggaggcaggcttctctactctagggcatgaaaagacaatttatagtgaaagatgatcaactctagggtttctttatacatttgaaatgaccaaattgcctcacaacctcacatgtttattgcccaacgaagggttagaaactgtcaaatcaagtttgttagggaataatcatgatttaaaaaaatcaagtaaatatcttgcgaagatttagttacccaaatccaaaatattcatttttactttctattataaattataaaatatgaaaagatttaaacttttgaaataataaataataattatatctttttataaaaaaaataaataaaatatcaatttcattaaaataaactacattctcattatataaaattttgtaattctactaaaatagaaaaacctaaagtgctacaactagattttaaattgagagtgtctaacaaataatgtgctactcatttgttcatagtctaataaaataaaaatgaacatagaagacgatagttctgaacaatcaagccaaagacagaaaacattgagtgattaatttggatgtcttgcaaagagaccatactatct

SEQ ID NO: 20978 - DNA, 1301 bp, Cannabis sativa
agagagagagagagaattttttcttggtcccatttatatatgtagaaaaaaaaaggaaaaaaaaaatatcaattgctttgctagctagcttaattaaataaacctagttagtcattaaataaattaacatatagtgatgtgagaataagcttgatcgtgttaaatatgttatatatttatatgtacccatgcttgtgggtcgtagcataatttgtcttgtttctctatcgatattatagtttgttgaataagtttactataaagttttttggatattatatataaagtgatttgttaaataagttaaattttttgatagttcgaatagggaaatattatgcattgatttccttatgagttttggccttagttgaattaaagttgtgggcatttctaaccatgcatgtgagctccataggaagacgtgtggatttcgacttcgtggggtattgacttaggaactgtccaaattaatgtcctttagaattgtccattttattgacctttcattctttctttccctatattttttttttcttttcttcgaatcaatttaatttcttagtcacatatactcgagcatataaaatatttatattagttactacaagtatcgtttggtttgaggtaacgaaataaaatagaataaaaataaaataattttattttatttctttgtttagtttaattttaaagtattagaacgttattctaattctaactatatttttatttctttctttcaactaaacatgacttaatagagtgtttgttacgtgaatttgagttgaagaaagtagagttggaggaagcatacttggagagaatataagacccaagggtccgagagtattaacattactatcattttaatttaagagtattgttattaggcattagtgtccagctccttccatggatgacactctatgattggttaacaatattccttaaaagttattttttaaagttatatgagatctgctacttaattgcaccaatagcggtatgatactaaagaaaatgctaggcactaataatgtcggttagcaattctctcaatttaaaaaataagagacacttaaaaatacaaatcccttaatcattacaatttaatttaagtttgacattattattccctccaagtttaaatctcaaaccaaatgaaacaataatcatcaaatggttacacagtattaaactatactctatacataagagtgtgtgcgtctctacaatctagattcaaactacaataatttttagcgctaatttggtataattttttgaaaagttgaaag

SEQ ID NO: 20979 - DNA, 4225 bp, Cannabis sativa
taagaaatccaaatattttacacgacctatagttatgtaaacaaaataatatgattctaattttttttccggacagtttagtaaacagcataataaaatattgttttcgattattttctatcttaaaccgatacatttctcctattaattattctgattccaattacagtttagtaaatgcgccataaacaaacaaatgtaagggaatgattccctttccgttgattctcattgcttatcagtaaacatatggactatttggaatgggttaatgctaacaagaaaatggtaatgtaaaacattatcttgtttgatttgaagatttaaccttacaaagttattcctttagtaatataactactcttaaatagagtaatgttgatacttaaaaaaaatgagattgaattattcctttctattatattaatttgaatagcatttttgaataaataaataaatttaaatactattaatattttgatttattataaaaaaaaaaataatattattatatatatttagtctgtaagattaattttttattgttaattgagttatttctatattattaacaataacatatatatgcattgtacataaattttatgcggatggtgtacataaatgacataacgaacaaaaataaataacatagtgataaaatatattgaaatattcatttaaattataataattacaataaaatttaatatttactaattaataaatatatttttttagtaaataattattttatttttatgtataatgaacattaaaccgatataataaaaaaatatttttattttaattttttaaaacaatatataagaattttgtactcaaaccaaacaatgtaattcaattaacgagaatatgattacatattaccttagacaacaaaacacaatttatacatttttctacaattatattctctttcataatattccttataatcaaattattttgaacacttcattagctaaatcaaattattttgaacacttcattagctattaagccataacctctagggttatgtttagtgttatttttcaaaaattaaagaaaaaaaaaatgaaacttgggtgtgtgcgtgtgggtacatttgcactatcacatagtgcaagtaaaaattgccattcaagtaaataacatagaaaagcacaatacaagtttttggtaagatagaatccatcgccccaccaaaaaatcaaaatttatgcatttgcttggatttacttacagaaatgagggtgtggatttatcaggaaaaaattacaactactttttaaggcaaatatatatgtggcagtgcgaggaaggtatattatttatttatgtaagaaaattttcaattattattttttccataaagaaaaaatttaccaggattttggtcagatcccagatgcattacattcttctagcaggtttaagagattatgttcaggtgcactgagagatggtagaatcattcggttgccttgtgcttgtacagacttgggtttcctcccaacatcctcagcttcaagagaatttccttccttcatcacaggcaaatcgcctcttctcctaaccgttgcagatacccggtctttccatatgcttccatcctgcatatttggaatgaatggtaaaccttcatatgtcaaaacaaaccttaattatgatgacagtagctaccttaaaaaaatacataagtaacacaagtctagggtatctaatctgccaaaatgcttttgagcagaatatacaaagttgcattattggttactctatagctctagataggcaaggaatataagttcaacaaacaagtacattctttttctttcttatcacaacagcaagaggagtcatttcaccatataatcctactcttgataggtccttccgcaagaggctcacaatgaaagcaatgacaaaaaaatatctcattattttggcacacattctcgttttgtgtgaaacaacaactagctttgtattatcataaataagctggatccacaaatttaaagtgatataatgtgctagcgattagtgtgttaaaagcacagcagaaaagggaaggaaaaaaaaatggtggttaagattaagaaattggatgtctgaatgataatttatttaacagaaaatttatttctgaactttagctttgaatttcttgtaaatcttaatgccacatagattggtagcagcaagtacaacaatcattattgtcacatgaatggttaagccaaaccagatacttcatcataatatataaactagaaaatataaatgttaaaacaaaacagtaaaagggaaccaagaaatgagcttacattaagaatggaaggttctggtagcgggcattgaattggcctatcgttatcaagaggctcattcggatgttcaactggtttaaattcaacagcaacttcaatcccatgagaagatgtagcagcatttacagcaccagtagtatctgaagtaggaggctctgcttctctctcaacctgaaccataatatgcaatgaagcaaagtcaagttttagaaagatagtcaatatgccctaattccactcacaatgccaagtaaagaaatctccataaaaagaaagaacataagacagaagaaactaatataactcaacccagtaagaatcaaaacgaccctaattgaaaaaaaaagaaaaaaaaaaaacagtttccaaatggtcaaaattaagtctttaagtttaaacatgaggcagtgatcgaattaacaatatagcaaatgaaaccatattcttctttctttctatttttgattgtaatgcaattgcagctaaagattcaaagattaggttaaactcaatacccaaacagaatagtcatcgtgtagtttgatctacaataccatagcaaaaagtcaaacccattcacaagaaagtcgcaatacttaaattacatatcagcccaaccagcaatttcctgagatcaatggttgttggatattgagttcacaatttaagaacagatcaaacccatgtcaccaattataagacccaatggaaaagtcaacccaagtccaaagccaacaatcaaaaaaccatcataacacaaagcattaaatttaattcatagagctcacccaaagataaaacagcagttatacgatcgcaaatgataagagcacatctcatgaaattgtaaatcacaaaaataataattattgtaataacaagaatcaaataaagaaaagtgaagggagagtcttacaagggcactctggcttcgcctgtgaccagctctgccgacagaaaaccttgagaaaatacccaccatttttttttcttcaaatcaaaaactaaaactaaaaaaaagttttgtttgttctgatctatgaataaattcctaagtgtatatatatatagatattcttttgaaatgctcgtacgtatagatattaaagttgaaaagtgctttcctaagtattacattcacaagaagggagtctgcttttgggttgtttaaccaaacaattacaaatctatacctctctctctacaagtttctctctctaggaaggagagagatcaagagagtttgaaagaatttgataaggataaggaagctgtattgttaatagaaaataataaagtgatgggttttgtctacttgggattccacttgtaatgtttaagctgcaaaattacatcttgatgaagtcagtgaaagtggaaaataataaagaataaaaaaggaagctgtgtgtttttgcaaaaaagaaaaaaaaaataataataataaaagctgtgattcagaattaaaggacggtggcaagacaaagctttttacataaggggtaaagttcaaaaatacaatttttattaattaattaatcaaatttacttctaattttatatttaattgaaaaatacttctttttatatgtattgtacccaaaatactataacataagagagtcacatgaagagtatcttaaaataacataagcaaaatgggtacaatatttaaaaaaaaagtacaaataatagacttttaaaaagagagtaaaaataaaaaaggacaatataaaaatattatcgagtcctctttacataatccctttggtattaaattacataattccttttgttaatagaaaaaaaaatgggaaatttgattttctatgcttagaaaatcaaaaaatttgatttttaaaccaaaaatttaaaacctaaaaaaacta

SEQ ID NO: 20980 - DNA, 1693 bp, Cannabis sativa
taagatcctgataaaataattccaacactaaagccccaagagaacagaatggataagttgaattcagccagcatatgactcagcctcagtttgatcttcttaagaattgcatcccaatcttctcgcctccacttggttggcctaagcgggaccccaagatatctgagagggaaagatccctcaacaaattgtaacatatccaaaatcttagctttaacattggggttaacaccaccaaaataaacttgggatttagcctcattaggatataaacctgtaacctccgagaagctttgcaaagtaacttgaagatgatgaactgcagtaggagtctctttgcaaaaaataattaaatcatccacaaagaaaagactaaccaacttgagattcttgcacttaaaatgaaatctaaacgatttttcagtagtctccaacatcaaccttcttgtaagatactccataatgagcacaaacaataaaggcgacatcggatccccttcttcataatcgtataagaggtacccttcaagcagatcatgttattgtatattatttttattaggggtgttcgcggtgcgggtagtgcggttttgaccattttttcaaaccaacccggacatgtaatttttttaatttctcaaaccgcacacgcaccacgaaaataaaaaactgtagaaatcgcaccgcaaaaaatgatgtggtgcagtgcggtttttgcgatttctgcagtttggactaccactaataattaaactatcacaaatacaacaaagttgagcaacacttgtcaaaaatactataagacttgtaaataaatatgaaaaaaaaaaaatagttttaataatacaataattagtgggctttgggttagacattcatagattgaacctaaataaatataaaaaattggtatttttataatatgcggtgcggtatggtttgaaccgcatattatcaatttaaaaccgcaaaccgtactgcgcgatttaggaaaaattcaaaccacgaccgcactgcaaaaaattttaaactgtattttttttttttttttgtggtacgggtagtttgagcagtttgataaatacccttaatttttatgttgttttgacattatttgaatattattttcttattattttttggtaatttccttattatttctgtgttgtttttatagaataaaaatttaaaagaaaaatatttgaatgtaaaagtgtaaaaaatttactaaaaataatatattgtgtaaatttccttaaaaacattaggattaggttgatgaagttataaggttggaattattattattattattattatttatttggcaaaatgaaaaatttgaattgtaaacaaaaaaagaaaggatattaaattataaataacaaaataatttggataattgcaattcgaagtaatatcgaaactttaagtaatggagtaagaacagatcttttggccattataaacgctgtctgatcacgtaatcaaagacctcaccacaacacattttgattctcaaataaacgacaaaagggcacccagtcttttataaaatataattaacttaaacgacaatttagcaaaacaataaaagcttaaacgacaaataagatgttttcaaacaatgacaatatcaaagcaccaacagaatagagccaactcatcgttcaaatttaataataataataat

SEQ ID NO: 20981 - DNA, 2645 bp, Cannabis sativa
ctggtgagtattaagctacattacaaggataattaatattaattttacattatgaggaaaataaagaagaataaaaagatgaagaaaaaactcatttgggcctacttttgcttggtattattgtgtctctgaaaggaggaacaatgctaagagtggttagttttcatttctaatccatgttcaagtaaaaggatgtgacccaagttatttttctttttccttttttcattatagcaatcattcttttgtctacataattaaaagtcaaagttaggcattttagcaattctaaagaaccgttagaaaatgtccagaaggcatggctcaatcaacacgaaatagaaagtaattttatcgtgctgattttattttgttctgttcttgcagggttatcttgatcctgagtactacatgactcaacaattgacagagaaaagcgatgtgtacagttttggagttgttatgctcgagctcattactgcgaagcaaccaatcgagaaaggaaagtatattgtacgcgaagtacgaacgtcaatgaatagaaacgacctggagagttacggcttgaaggagatgatggatccaacgattagaaacactccaattctaattggctttggcaagttcttggatttggccatgcaatgcgttgaagaggtagctgctgatcgtccaacaatgagtgaagttgtaaaggctattgaaaccattttacagaatgatggaatcaataccaattcaacatcagcatcctcttcagccaccgattttgttggaaacgcaaaaggccctcttaaacatccttatagtaatgatgctttgcctcaaaaggatgttagtgatagtgaggcctttgattatagtggtggatacacactttcaacaaagattgaacccaagtagcacactattctgcttgtgtttctttttcttttttacttttttggcctggaaaaagattattgtattgtactgtacggtattataatgtttgatatatagttgattttagtggaagggaaaagttgtcctacgagctttataatcaaagtcgttagtttctcgcattattatattacttttttaaatggtgcttgaataatcaaattggaaggttagttggcacgatgggagtcattggtcaacgcagtgtagttagtcttatttggacaattgaggcggcggacgaaggaaacagtgaaagacatggtccataaaaagttccttgacatttttgataatgatgactgagacaacattaattgtattttatatgttgtagttgagaattgattgatctaataaagacgaggaaaaatcattcataaggaaacacataaaggacctagccaaacctctttctctctctttctcttgctaccttgctagatagattaatttttatttttcttcttctggacagaaaactcgactatactttggcatgggcaaatgttgaagcttcgaagctatttgtgttttcttgtcgtttgattgaaaaattgctaggctcctgttgtcgtttgtctcttttaaacatatatattaattctttgttcatacagttaagagttgagttgaggacttggactgcaagtttgcagctatgggagctagctcgttgcagctctttttggctttcttttgtgtactaattcacttgatttcttcatttaccgatcccaacgatggtaaggacttaagaaccattctccaaagttgaattttcttgtttttgatgggaagttttgagcagagaatgaacagaaaatttggtcaacgtactttcgattgtaatcttgtatttttatattgcatgttttcggtggatttggagtttaaaacatatttttgatcagcttcttgtcaaaaaaaaaaaaaaaaagagagttttttaatttcctttattgcatatgtaaaatagaatatttgaaaaataaatgatgaaagtaatgagtgacgcaaatgaagcaatacagatatttcagtttttataaacaccaaaaatcactagcaatgtgggacaaaggttgatttctagttttgagcataataaaaaggtccccctatgttaataactctctataaaatactatgtattggatacagggttttgttaaatcttcagtggtcactatagttgttactagttttattactaatgaaaatttggtgacgtagagggggctttgctaaattgctatcatttgcatgaagttgatctttattgttgcttcattttaagttttgttaaaattatatggaatttgtgtatacatttgagaaaaaagatgaacttaaattccaacattgaagggtccttcctttctgtacagacatttgctagatagtttagactaaccttttcgctaattcgaattgtgtcattttagttgcggttctccaatcactgaaggtagcttggaaaaatttacctcgtagctggtcagaatctcaagatccctgtggagtaaaatgggatggggtgagctgtgaagattcaagagtgactggattgtgagtttgtttttagtaccctttttttctgtgatttttttagtactcttttgaaataatatatgttaacaagatcactgttctgatcgattaatcacttgattaaagtcttctttataatgatctgc

SEQ ID NO: 20982 - DNA, 3364 bp, Cannabis sativa
aacatcctccaccagcactgaaaccttgactccccaccaccacctcaatccatttttcagatcaaaatcatatataaaaaaaaagtcaaatcaaatttaaacaaaaaacccagatataaattttaacaccactgcaaccaccacaaaatactaacacaaaaattaatcacaatagcagattaaaggtactagattttttttagagaaatattttgttatcataaattaaaaagtgtgaggcatttacaacaataggtatataggtggttgaacagaatccatccatattggcactacgtttgacatgggtagcaacaatttcaaagaaagcggataagagacttgaaatatttacaagtatatcattaaaagaagaaagagcactaagaggttttctcaaagcatttgaaaccatcaatgcgtttatctctatttggttaatcgacaattgcaattgaaggatccaaattaagctatgaaagatggcctttgcctccatttcatgagatacgaagtttccaagaataggctttgagagagctgcaataacacaacttgttttatcctgaataattgcactaacgccaattatatttttgtcagcatccaatgcaacatcaacgtttaatttaattgttctaggagctggaggttgccatggagtttttcctggtgctggtggcaaccgtggatctaagctgatgtcgagaagctttgagttgcactaacagtaagacataatttttccctagcctttgtgaaattctctaagtaattagctacaaagctagccaccttgtttgctagtttgctggttttgcgatacctccatgaattactcggtttcgctctgtctaaatagaccacagtgtgcaaaagagttactccatctctgactgtgtatatgtagttgaaaggtggataagatagtcacctttgctcatagaacaagaccgattccaatcgaaaacctgaccagcaacaccccaaactattcgagcatacttacaaccaaacatggtgtgcccaattgattaccaagcttgataacaaattaggttgcatctgtgataactttctttctaaccaaattttttgctataaatagagcatcatgcataagacaccaagcaaatattttgattttttgggggagattcaaagaccaaaaataggaccatcatgaagaaaaagaattagaggaggagatttcaacatcctctattgaaacagccaagtggtaacttgatttgacagtatagtgccctgaattgtgatggttccatataagtacattaggagttggaaaaaagctcaagggcaaagtcatgatcatttcaacatcaagaggtgaaaaatattgctgcaacaaaaaaaaagtttcattgctgctcttctataattagattagccaccataccatgtgtaggcccaaagtaacgaagatgtgtaaaagagttgtgtcccggaatccatggatctatcccacttttaactgatctcctttcacctattttctagcgtaatcccatttttagcaactcacgatcccatataataccttgccaagttagagaaagtgattttccatgaggtgcttcaaaaaaataattatttgggtaggatctactcttcaacaatttactgagaataaaatgtgggttttgaagtattctccaagcttgctttgctaaaaaaagcttggttaaaatgctcaaaagaacgaaaccccataccacctgaaagtttagatttacagagcaaattttaattgtgccaattaattttagttccattttcattgctcccctaccaaaactttgacatcatagattcatgttgattacaaaaagtaactgtcaagcggaagtaactcatgacataggtgggaattgattgaactacgacttttaaaagtacttcttttcccctgctgaaaaaagtttctcattctaagtatgcatgagacgccaaatcttttcttttattccactgaaaagctatttttttttatctctgcctgtgtatgatacttttcaagatactcttgaaatggcatagcaagttgtctgtggaaaaaaagctaggcagccaaggttgtgtttggggagaaagacatgacaaagttatcaggattgagaagatgactagaagcacggtgatatatatctagcactcttttaattgccaaacatgagctttcattcgctttgcagaaaaggaggatgtcatcagcaataaaaaaaatgtgaaatcagatcagcccttctagtgagtgagaatccattatggttaccaatcaatttctcatgttgaagaatttgggagaaaccttcagaggtaatcaagaacaagtagggagatagtgggcatccttaacaaagacccctcgttggaagtaaaaaccagtgacgtctccattcaaaagaaagagaaactatttgttgttaaacaactcatgatgagagagatccaacgttcagcaaatcacatttttctcataattgctgtctaaaaattccattccacacgatcaaaagtttgctcatatctaactttaaagtcactacaccatttcgacccttatccctatgtttaatggcatgaacaagtttaaaagtcactaagatattatcttgtataagtcgattgggtagaaaagcactttgagtttcaaatataacaaacagaagcacatgcttgaatcttgtaactaaaacttttaaaaccaacttggaaatgacattgcataggcttataggtcaataatctctcatttgttgtggttttttaatttttggaataagggtaatcaggatgttgttcagaacagttggattggctccctcattaagtacactcaaaactactttagtaaccaattgaccaacaatgtgccaattttcttagtagaacatagccgacattccatctatcacgggagcacttatctggtcccattgaatgcaaagccatctccacttcagctcctacaaaaaggctttagaagctcaccattcatttcaagtgcaaccataagaggaatcgaattgagtgtggcttagagagcaatgccaccagtgtgatagatgcttgaaaaattcctacaaaatcttcaataacatttgccaaatcaaacttggaagtaattttatcaaaggtggcagatttgaaatcaaatatatggtacaaacgagatcaataataaaaaacgatagatttgaaaatgggtaaataaagaagatgagggacgagagatcgagttcttcagttagatttgtgcccataaatcccagatttaaaaaactaacaccgtcacaacatctgtctcaccgtgatagagagaaaaacaaagaataaaaga

SEQ ID NO: 20983 - DNA, 4692 bp, Cannabis sativa
  modified_base (4111)..(4114): a, c, t, g, unknown or other
tttgtctatcatattcctgggtgtaatcaagttgccgatatctttactaaggctttaggttgttccaggtttactttacttagatccaaactcagtgttctcaattctacaacactgagtttgaggggggctgttagtgaacagaatagttagttagtctgttatagtagttagtttgttatttgtacagctgtaacttctaacttactcttgtatatatattcttctctgcctttgtgcaataataagacaattcatttttcctcaaatctctactttaacagggcctatattcgtaatgattttgtagatcacattatatagatggatacattgtttcgtatatcttggtacatataataaacggatacattgtttcatatatcttggtacatttaataaactgatacattgtttcgtatatctttgtaatcattgttcggtaatcgaccaccttacataattatgcctatttgatacatttttttcgtatatcttggtatctatggtattaatttgatacaatttatagtataattaactacattttattcttgtatatatatatatatatatatatgcagggtattaacaacttaaaatatgttattctttcttactcaaggaagcttacttgtctcccgaatctctctcaagcaaatctttacacgcttcgtctaaatggttgtacaagtttagttaaccttcccccgttaaaatttcacaacactttctacaatccaaatgaagaaatcaatgattttgtattaagcaatttcctagggaatttacatggaacgttaaactacggcgttgcttgctcgcttgatctcgaatggtgctccaatctcacaactctttcagagatgtctggtaatataaaattcatacgtttaagttatacggcaattaaagagctgcacccttcgattggttctctcaaaaatcttcgtgcacttaatctttatatgtgtaaacatctaagggaacttcctaataatatctgtgatttagaatcattagaactcttagatatatatggatgtgtatccattgacaagtttccgaggcttccaaaaagtataaaaatattatatttgagtggaacatcaatacaacaagttgattcgtcatccttcgactgtctaccttctctcagcatcttatgcatgaatgattgcaaaaatcttgaatttctcccaactagcatttgtaagttgaagtctcttatgagacttgatcttggaaattgctcacgattgaaaagctttcctcaactattggagcctatggagaaactagagataattattttaaatggaactgggattgaagagatgtcatcatcatcaatagagaatcttattgtgcttgaaacgctaagcttaaacgagtgcaaaaatctcatgtgtattccaactaccatttgtaaattgaagtctcttggagaacttgatcttggaggttgctcagaattgaaaagcattccagaaatcttagagcctatggcgaagctaaagaaactttatttaaaaggatcagggattgaagagatgtcatcatcaatagagaatcttgttgttctagaagagctaaacttgagtgagtgcaaaaatctcaagtctattccaactaccatttgtaagttgaagtctcttatgagtctaaatcttgataattgctcaaaattgaaaagctttccagaaatcttagagcctatgaaggaactatggtatcttcctttaaatggaagtgggattgaagagataccatcatcaatagagaatcttgttatgcttaataatctaaacttgagagagtgtaaaaatctcaagtctattccaaccagcatcttcaatatgggcagcatttctgaaatcgagattgataaatatccacaactccaaattctgccatataattttttaccagtagaagattcaagtgaaaccagtactagtcaactacttgtaacacatgatcaaccgtatatttgcagtagttgtacttctacagcaatcctaaatttgcattatgatggtgttgatttcacctgttgtcagtgctttctattctacaccatacataacattttggctacccaatatttcataaataactgtattttcgtgggcaaatgtatgaatggaaaagaaaaggtatatctctcttacttatattccttaatagaataaattcaatagtatagttttttcaccattaatattaacataattgacttttgtttttcatatattgcaggattttaggacaagtttttgttattcaggaggtacaattactccatggtttggttatcaatctatgggatcatcacttgaactaaacttaccttttcgagaaaattgttacgacttcttaggctttggtttatgcattgttgttgagtttgatcccaccattttgaaagatgatgatgtgctagacttaaaatgtgaatacaatctgaaaaccaagaaaggtcagaattttcaagtctcttcaactctacaaagccagaaagctgctcattttgatgattctaatttagactcctcctcaaatcatcaagtattcgtatggtgtatataccgccaagacatttgtaagaaaaggttttcatatgatgatgaggaagataatgccttatttgttgatgaatacgaggatgatgatgatgaatttttagaaggggtagagagtgtcgtatttgagttttacattggcacaggaagaattaaaaaatgtggacttcgcttcgaacatctcgccactaatattcagattaatcatatatccatgtgattgctattcctaattcctattcatcaaggtaatttattactatataaacttctccattttgtttctaccataattaactgttattttatattgatcacaatgttattataaaatagttagaatacatgttataattttatttagtaattgaactgcattttcattatttatgggggatatgtaatagatatgtgtattgcaaggattaaaaaaacttataattttcaaactaaatcatccttctttaacaagaactaaactgttattatctatctattgttatttaatttcagattaatttcacatattcccagggaaaaaatgaatcgggctgataatatagttgcgtctacggcttttgaagattgtatatagtggatctcatgttgtacttttcttaaagcgttgtactctttttcctcttttgaggttttacccactcatgtggttttactctttaggggttttgacgaggcttcgctatacatcataattaatttaataattttgtttttggacaaccaattatatgtaagtactctagctttttgagtttttagaagttttattcatataaatttgtaatccaataaactgtattctgtattagttctcaatatatataataattggatagtttggcagagaatggctttaataagattgggtgccgacctagtcgggatgcttttttattagcctgatcagtatgcatctttattttcatttcctctaaaaatattatttgtaatttttaaaaattagtaatatatttctcctatgagaacttagaagaagtttttcatgtggtaagtacatcattgctttggcattcatcacaattataaattatatatactactaaaaactcaaaaagtgttacatatgctattttggaattatacatgtcttatatactgattcccaacacagcccaagatccattctaataaaagagagaccaatttccatacaatattttgaccccaataactattaaatataaaaacagaccctacaaattaaaatcaaagtaattattgttcgtagtgttgtactaccacatcaaattgtgaaaaagaaacaaatcatcaattgggtcatccatccaattgacccaacaattgctcatcagtgtcccaaacaacaagctgattcctcaacacattatctatatcttaccaaaattttaacataaaatccaatttcacagaataacagttatatctcttatatatatagagcacaacataagtttataagagaatgaaattaataattagtgttgtggacattgtcccacatnnnntaaatggtagagaattgagtcatatataagaatatgggctactccactcattggcaattagttttgagatggaactccatgattctcaacatggcatcagagccatataactagttagaactgtctatatatatatatatatatatatatcaattgaattgaatggatatcctgcccacaaatgatgatgatgaaaatacgtttcacatcctaaagatggatgatgataatcagctccccaccatctcttattcaaagaaaaaatatgatgtttttatctcttttaaaggagaagatactctcgctaattttactagtcatctccacgaaaaaacttaagaaggaaggcattgaaacatacatcggtgacaaactggagcgaggagaagagatttcgaaagctctcttggaagccatcgatgactctaaaatttcgatagttattttctcaaaagactatgcatcttcgtcgtggtgctttttgagagcatccgatttgttcttaaggagatatatccaagtgaacctagtgtaggcatctaaaaaatggatgtagtatttatagccattagttgagg

SEQ ID NO: 20984 - DNA, 6339 bp, Cannabis sativa
gagagagagagagagaaatgataaaatgtgtttgttttttctttaaaatggatagaaaaataaatctcgtaatgtgatttttttttagagactcgtaatgtgaattaaatgtgaagaatgaattgttttttgaaataacagtaacaaaactaaaattattattacaagttacaactggaccatgccaccctaatcacttttagaatatttccttgactgtgtatgatacagatacggaatatataatatacataatacattcataattaagaaaattatgtacacccgtgataatttagttgttaacatacccacaacaaaatatagccagctaaatataacttagaaaaagaagaaaaaaaaaaacaaactgaaaccataaatgacaagacaatacagttttcttttagagactaatcgtgttcaaaacatacataattttagaaataatagcgagttttttttttttttttttttttttctcaaagtgaaaaaaatattgagtttacttggtaaagattcgagacttaatacatcattataatattgatcaactccactattactcaaaaccttaaaacagaaaccataaaagaggaaacaatgaaaaaacaaagaaggaatgggaaactaaaatatttacagaagttggaaaaccaacccattaattgattttttataaataataataaaatagtaaatagcattttttttttttgaaatagatggtagataatattgtagacattgagtattacaaaatttacacattcaacaactaattttgttaaataataaaatacataataaatattttctaaaattctaaaatagaattcttaacacgaataaatatataatataatcaattttatcataacacttataaattatattattattaagttttatattaataaaaagttaatctaatattttaattatactattttaaaaatacaaattctattttatcatttaacaaaataaaaaatttaattaattatttttacaaaactcataaaccaattacccataataaaaacctagaactctaaatttgataatatataaatttttacttaaaaacgaggaaggatccaacattttagggaggcgagtgccaacattatcattacactcaaaaatatgagcaaatacacggtaacaacaagtcacaccccactaacatattattattataataataaaaaaattgttagaattttcaaaagagagagaaataaaataaaataaaagaaaaaacagagaagacgagcttacggttgattcagaggtgtaagtgctgggatttcaatttttttgagacgaagccgaagaaagagacaagcgagttgtggtgtactctactagattatatgatttgtcgagaagagaaagcaactgggttcatgtctttctgagctaatttcctctttatctcttactttaatggaggatttcataagaggctaaagtataataactaatgattacacaggatatgggtcatcatcaccaacacaataccagcgatggcgtttctcagcgagttaatagcccgagattctcaggtccaatgactcgccgtgcccattcgtttaagcgcaatactagtaacaactcacagaacagtaatatcatcaacaacggcggtagtagtattggcaacaatggaggtagcggtcatgttaataacggaagtgggttaagtccacatcatgagattgagctgcaactcacctcacccagatctgaaatcggcagtaacacggtttctgtagatgggtttgactcggttttggaaaggaggttgcctcactatgtgaaccagagatttcatgttgggggtgttaagggactattgaagaagcccattggatcggtggttgcggatttggggttgaaggaaaggaagaagcttgggcattggatgttcttggtgttctgtggtatgtgcttgtttcttggcgttttcaagatttgtgctactgggtggtttggatctaccattgatagagctggtttcgatcaggttggttcagtatatttacattagcacatgtcattaaacaagaactcctttctaaaaatggttaccttttggattctaattgtctaaagttttggaccgattaacgttaataatagaattttgaaagacactagataaagcgaattacgataattgactttgtaataaatattaaaattctttagttcatgttttcttatttcaagtttcaaccattaaagaatatattctcttcagttgttgaggaattttcttgggaaagggatcttatataacaactctggactaagttttacttcctcagttacttgattccagaatatttctattcccatatttaattgggtagagaatacacagcattgtttatattttctctcagtgagtgtagagtgtagttgtttattggttatggtagcatctacaagtgactcttaagttgttattttgaatagattatcgtcttatcagtgtttttttttttaattatttatataagttttcatacttttgtataatttagtctatccacttccttaggattcatctgagtcaactcatgtatctatgatggaccaaaactctaaagattacgtatatagagaaaaaggagctgatgttgagcgaactctaatgatggtatcaactggtgttgtggaaagccagaaagacaaagatgaagtaagttctaaactacattattgtcccagtgctacctattctcttttttggctttacggaggattgggttggttatcacatatttcgttcttcttttgaaaaattaactcctgcttcagtactcaggtatctggtctaaacccaacagtgagaatttcactcagtgcattgaccagtcaaagaatcataaaagtatgcaatacattacatctctttttgtctctgcacacacacacacacatattaagtgtgtgatttgagtctgtgtttgattcaagtttaaatgtgttttggcaggattagatgtaaagaccaatggttatcttctcataaatgctaacggtggcttgaatcagatgagatttggggtctggatattgtgtttttgttattttgttttttagttgattataatagttaattctatgtcagttttacttttgtctgattcatgaattattctagagtgcagatttgcgatatggttgctgttgctaagatcatgaaggcaactcttgtccttccttctcttgatcacagctcatattgggctgatgagaggttggtttagtgtttctttggtggataagttatttgggttattatgcatcgatacattgatcttagaaacacaacttcttcacagctgattttagcctttttagtggtattacacaagctaactatttcttattaaattttgcagtgactttaaagatctgtttgattggcggcacttcatcgagacattgaaggatgaagtccacataattgagtcactaccgcctgcctatgctggagttgagccctacttaaaaacaccaatatcttggtcaaaggtaatgcactagtgcttaggcagttactcaagtcctagctggcatgatgttatgtaacctcagtctcagacattgtttcttaccttcccctaattcccttggtgctatgatggttagctgattcgtgctcttatgttcaggttgattattataagaaagaggttcttcccttgttgaagcagcacaaagtagtttattttactcatactgattctaggcttgccaataatgacattcgagattccatacaaaaactgaggtgccgtgtcaattacaaggcactaaaatattcagctcaaattgaagaactagggacaaccttggtttctagaatgagacagagtggaagcccttaccttgctctgcatttgaggcaagtatactatttatagtgatgtcaataatatatttggttcattcaagttattaagatttgtattttcttctttatattttaggtacgagaaggatatgcttgcatttacaggttgcagtcataatttgacagtagaagaagatgatgaactgcgtagaatgcgttatgaagttagccattggaaagagaaggagattaatgggacagagagaaggttgcttggtggttgcccgttgaccccaagggagacttcacttttactcagagggcttggttttccttccaatattaggatttacttggttgccggtgaatcttatggaaatggtagtatgcaatatcttaaggacgacttccccaacatcttctctcattcgaccctagcaacagaagatgagctaagacctttcgaaaaacatcagaatatgttggctggtatagactatgtggttgctcttcagagtgatgtgtttgtatatacatacgacggcaatatggccaaggcagttcaaggacacagacgctttgagaacttcaagaagactatcaatcctgacaagtaattccaaactctatacccttttcaaagttttctagttttggtggaatgtttatgttctagttatatgtttacttcggtactctattttcatgtgctgattaaaagtttgttgccgctgcaggatgaattttgtgaaacttgttgatcagttggatgaaggaaaaatatcttggaagaaattcagttcgaaagtgaagaagcttcatatagaaagagatggatctccatattggagagaagctggagagtttccaaagctggaggaaagtttttatgcaaatccattgccgggatgtatttgtgaaacagggtaagataaattaagagtttctttctcattcatggtacgcgtttaagctgcaagcaatgtctgcattcggtttagacataaggacatgccaatttcccaaactgaggccactgcacggttgtggtataagaaaaaagagccttgaagcctgtggaaattaatacaagaaagtttgaagacattccaaccaaaattgtaagccatcacatcttattctcagtagatacgactacaaacaaagtaaacagttataccaaccaagaatagaatcacttctctatactaaaccacatttttattatgacaatattctttttgcctactttttttttctttctattttatatttttgtggagaggaattgtagaatgtagtgaatttattggatctggaaatactgaggggagtaccaggtgtgatactgatgtaatgtacaactacacaacaatcctggggaatgctttttatggcaatgaaatatcaaaattttactgtcaaagttgtgaaggtatctctttagtgtttagaagtattttacttctcactgaatgaatttgtattaatatgtttttaagagataaatattgagccgattaagaagaaagaaattgaattgttctactttagagggaaatgtctgttggtacttggtagtcctctaaagatacctcctagtcttggagttggatgaacattgtaatttgtaaaggtaaaataatggggactacataataaaaagtgatagtgatctctattcaaaattatgtataactaaatttaagtccatattcttatgtgtaaaaggtgtcaggtgtccatattctccgaatattttttattttttgaattttgacatatactaaattatgcatttgaattttttagatcgttaaaaaattcttccaaactattgagagtgttatgttcaataacttttgtcaaattatgtttaattttactaacgtggtgattttatgtattaaatcgtgtccctcaaattttgataattaccaattgtctcctaaactttcatccaaatgaggcttcagtcagtaaagttggacagaagttattgaatctaataatatcaatagtttgtgaggaatttttaacgatataaaaaatttataagatatgatttgttatatattaaagtttgggtgacaaaaattctaattaacctataacacaagtttgtttatatatataacatttataaaaaattattatgtctgcctagtgccattagaattgaatgaaaatttaagtttgaatgtttattaattatggtctatattaaaatggcattttagatatataattagcaagaaaaaaaagaaaagaaaaactttaccattacatcgaaagctgtggtgtaactcattcaaatcacaacagaaagtgagttttctgtaattaattatcttgagtcaactaacctaataactattcggttatgttagttcttactattgttatatattcagaagttgctcagattcacaaaggggtttttctttttaaagaactaaggc

SEQ ID NO: 20985 - DNA, 7139 bp, Cannabis sativa
  modified_base (6935)..(6940): a, c, t, g, unknown or other
  modified_base (7101)..(7101): a, c, t, g, unknown or other
gacatcttaaagaggcaattcactttcaagtgcagcctcctctcctcttccttctatggccgcctttaaaacaccctcatacaggtccagcatatagcattagcaggctacttacttgtctcctatcctctcaactaccatcccggccaccttgtcatcctgcaaattcaacaccatgtttcacaaaaacaatgccaaaccaattgagagaattatgcagcaaatccattcattttcagagctcaagttcatctttttggttgttttatgttccatgacaatatcacctgcaggtaaagtctaataaaatacatatataaaggttcttactgtattaggaggtgtttttatttcattaccggtacatatatagttgtaggaacacaatataaatttttatgaaattctaaataatttaaaaaaaaaaaaaaaagaaatattcgtttcatataaaagtatgatttaaacagtaacgtgcgttaaaatcttgatttcgacatccttagattgtttaaaaattttgaaaaatatgtataaaatctcaaaaaactatattgtacactgttacttggaaagcgagcctctaaaaacaatcactgtcgaataatatttctatataatattgtacgcttaattgtttgattttcatgttcttattatttgatttctaattttgtttttactacataatttcagccgcatatgatccgctagatccaaatggaaatgtttcaatcagatgggatgtcatgtcttggacaacagatggttatgtggtaagatattaacgttttagcttattactacttaactcaagagtcaatttttcttgatatggcgaagcatcaaataattattataaaatcttctcttttctttttttttaactaaatgacacaaggcttccgtaactataaacaatcttcaactgtttcggcacttcatgagccccggatggactctgggttggacatgggcaaagaaggaaataatttggtctatgttgggagctcaagccacagagcagggagactgttccaaattcaaaatagccattccacacagctgcaagagaaacccctcagtagttgatttgctccctgatgctcctttcaaccaacaattcaccaactgctgcaagggtggtgtgttggcctcctgggggcaggacccaacggctgcagtggcagcatttcaaatctcagttgggctctctggcaggtccaataagacagtgaagctgccgaaaaatttcactttgcttggtcctggaccaggttacacttgtggccctgctaagtttgtgccgtcctcacacttcctctcggctgatggaaggcggaaagctcaagctcttagtaagaatctaactctttctccttgtgtcattcagctaataaatgcgtactgtttatctcgaatagatcccttgttactctcacaatgtaacatgttattgatgtgaacttaatagtagtgctcatttccatgtttgcttttgtttgcagtgacttggaatgtgacttgcacctactcaaagtttcttgcttcaaagaacccaagctgttgtgtttctttctcatctttctacagcacaaaaattgttccttgccccgcttgtgcctgtggttgccagagcaacaacacttgcatcatgtaaccccctacttattttattcaggcacctatttatacaacaaatttgagtaatcatgaatgacatgacattattctagcaagtgaacacaaattgagggatccaacagaaacattacatgtgatcataattgacattcctacatttttttccatagataattggttggcccgtatatcatatgatacttgtggtcctaatgttaatacgtgaacctagatttgatgcaattcggttcgtagactaactagcttgtttgaacaggagcaactcaacactattacagaagccaggaatcaacacaccaaggaaagacaataccccattgttacaatgcacaaaacatatgtgccctgttagggtgcattggcatctgaagctgaactacgagtcatattggagggtgaagattgcaataactaatttcaacttcagaaggaactacagtcagtggacactagttgttcagcatccaaatctcaacaatgtcacccaagtgtttagctttaattacaagtctcttcttccttatcaagctatcagtgagtgcctaacataagagacagaatatgcatcctaataaagataattaatactgataataatgaagaaaaaaagcagcccatgtacatgaattaagggaaagtcaccatttagactactaacagtaacattttaatggtatgtgcagacgacactgggatgttttacgggatgaagttctttaatgactacttaatggaagctggaccttatggaaatgttcaatctgagatgctcctgcagaaagacaagtctgaattcacactcaagcagggatggggatttccccggcgagtttacttcaacggggaggaatgcatgctacccccacctgatcaatacccatttctaccaaactctgcatgtttatattcttttggaattttgaaagttgcggcttctgcacttttgatacttcggtggatatggtgatcaatttttcccagaaacagaacaacgtttttatctaccagtgacaagatatgagaggttattatgcatcgtattatactagcagtagaagcacaatctactttgggatgcttcaattaattagctgtagaaaatacaataactagtactacaatttatctgaattcatattgatctgtcaacattcaacaatgtcatcatcggtatgaaactctgttaccttcaaatttttctcaagttcggccattttctataccttatttaagtattgaaagagaagagaagaaacagagaaaacaagtgctagtataaaagtcttaacacaatagttcaacaactgacttcgtgaaatctcttacaatactaagaataaattcactgtggatattctacagattcaaaaattgtataaatttaaaaaaaaaaaaaataagaaaaacaaaaaagaagcaagaactaaatctagaaagaaaaaaaaatgcggtaaaagttaaatcttcatacacaacaaattacaaagctgaattttgtagtgacaaaccatagtgcacctgattgattacttgtttaatatgaagctgcagcactagtaaatttgttcagaacatctggaatgacaagctttgttaaccagatggagttcacagattagaacgtccagaaaatgcttctttcttttgatgcttctgcaagttttaactcatttaagaataagtaactaagaatacaaaagatgctatcacagtcatggctagatgaaacagagatggcattggcttgtgactgctatttggcaaccatgggtaggaatctggaggtggcatgacacaattatcaccattgaaatagattcttcgtgggaaagcccatcctttttcaaaagtaaatgttgatgaatcttttctgaagagaagctctgattgaacattaccaaggggaccagcttgactaagaaaatcattgtaaaacttgactccatataacatggcagtatcatctgcaaaataattgcaaatgaaatcagaattcttctcaaaatatggtagacctacgactcaaaacaagataataaagagttatgttaaacacattagcaaaatatgattattgtcggcacaaattgaacttacttaatcctgcatatggagtcaaagatttgtaattaaagctgaaacttgtggtcaaattgtcgaagttagggtgttggacaacaagattccaaagcgagtagttcattctgtaattgaaatttgttattgagactttcaccctccaatactccttgtaattgatcttaacatgccaatggactcgaattggacacatatggctagtacactggacaagaggtgtattgaggttgttgcctttgcctggatttgatacagctgaagccaagtaaggagagtttgggctgcaattcaatatcacaaacataaaagtataaacataatgatattttttaaatgagtgtaactattgtaaaacagtagaataaaagatatccaaaagatagattagaaaacttactctacacagctgccaggatcggtcctattgttctgacagccacaggtgcaagttggacagtttactatagtgtcattgtagaaggaagagagggaaacacaacatgtaggtgtcttttgagccagaaattgtgagtacgtgcaagtaacattccaagtcactgccacaaaagattcatagcttaagaaacaataaaaaagtttcacacacattttttaaaaaaatacacaattgtgctatttctgttcaaattttggcctatttgatgtagagttaaagaagaattaaacataaaggttataatgattaaataacaaaacagctttcctctaagcaaagattttttacatattagtatatggagttaatgtatgccacatatgataaatgtgcatatgatgtacccccacgaatagctttaatcagaatgataaataggtcatgtacttttagctagattgctgtttagagtttataaaacaattttggggaatgatttggaacttactcagagcttgggtgactctccttttatctgaagtgacaaacttagttggtcttacaatcttagcaggcccacaagtatatcccggccctggtgctctcaatgtgaagttcttcggcaatttgacagttttgttagttgtccctgcagcaccaacactgacctggaatgaactagctgcacccggatcttgggcccaagagttaagtactccacctttgcagcaatttgcaatctgttggttgtaaggagttcctggcaacaaatccacaactaatgggtcctttctacagcaatgtggaacatttcctttgaatcttgaacagtctccttgatcagttgtctgcgctcccatcatgctccagattacttcctttttcgcccatgtccaacctaatgaccaacctggagcttgtatatggcgatattgctggaagttaaacattgtaacaacggcctgcccaattcaattattttatgtcacattagaaactcacacgaaaggtattatcaaattatgctagaaaaaaatatgaatttaatggaacagttcaaagattattttgaaactaggacccccgcctaaccctacaaaatttgggaaccagaaacttatagcaattgctatgtaagtacccaggagggactcgaacctcagaccttgtgggagcaaaccacaggtctaaccatttgagctacccctcttggttgaatagttcacacattatgtaggattgaattcttcaataactagtttactgcaacagaaatcttggaacacccactaatttgttaatccacaaggaaaagtatatatgtacattcaaattgattcttccattttataaattttcagtgcatagggaggccaaaacgtctaatacaatgtaatagcactaatccattgccagataccaaaatctttcatgtttagctttatctttcaaaagcttttgtttactataacttacaacatagccatctggagtccaactcataatatcccatttgagtgtgatgttcccatttggatcaagagcatcatacgcatctgcaaaataaataaattaatccaaaatccaacaaggaaatattgagtcagaaacgtcgatctcaagactcaacacaaatcaacaatatgtaaaacagtacaaaatcataataattatttagcaaaagtagtaaaaccaatcaacacgcaacagattatactctgcttttactagatctgtatatgtcgtactacaacttggcataagaaccaaagtaggcttctactatattctgaaaccaataactctattccaataatagacgaaggtaaatcaatccattttgattcaacttaactctctagtaatcattgatttcaaacgtttcccgaaaaagataaaaataaataaataacaaacaaaattcaattccatgaaccatgggaaataaccgaatccaaagtttcacaactcaattattcaatgaactctacctatactcggaaattaaaccaccggtttccaaagactcgaaaagtcttgtacaccaggcaatgattataagaaaataacgactttttacttgaatcccagaaggaatctggagaacttaagcaatacccagaagtgggaaaggaaaaaaccagtcaagaaaaccaagtatatgaggagcgtaaagagaagaaggatctggatattggggggcactgacctgtagaagtgaaagtgaagcaagaaagcaataacacaatcagaatggctaagctgctgagcttggcgatggatccagtgggtgatgaagagcactggaactccattgcttgatgcagatttgagtctacaagcttgggtctttagatctatctatttatatatttgtacgaaagaggtgaaagtgaggaaatgttgtgctgtgtgagtgagtcgcctctggacacggcaagtagagtatttctccaacttttaagtgcaatgaaaatgagagcacgatttataaaaaaaagcctctctctcaagtcattgttctagatttttttttagacaatgaaaggcaagattaaccgttaatgatgattttaatggtcaattattgacaaagctataatattgaaattaccattgtacccttctctgttttttaagtaaaaaataaaattatgattttaccttctaaaatatttgcaaaaatttgtaaacacaattttctatagggtaaatactattttggatcctttattttacaaaagttatagattagaccctctattttgttaannnnnnaaatagactctgtattttccaaaatggtaaaaatatgaccatgatcttatcgacaactttttttcaatataactaacttgaagacaatttctaacacgaacatatcaagaaaatacaaatagttttgtcataacacatttagatcgaattattattaaatnttattttgacaaaaaaatcagttcaggatcctatttgt

SEQ ID NO: 20986 - DNA, 3590 bp, Cannabis sativa
taatattaaataccttgaagtattaaataacaatgttcatgtagaattatgttgagcaacaaaatcaatataatgttattcttgaattatgtaagcatattacaataaatcactctataataaaacgacaccaatactacttcatgttggcatttaccaacatacatagtaacccgactaatattttgagcgggtaatttggtggcttttttcattttacctctaaaatttaatatgttatttttattaattactcacattattttttgttattaatgtttagcgtatataaaggatcaaatcaccgagggatacaacatagtaaacgatgaatcaatgaaagtttctgatcccttcgatgttggtgctggccatgtagaccccgtgaaagccatggatccgggcttagtctatgacatgaaaactattgactacgttttatacctttgcaaccttggctacaaccaacaacaaatcaatgccttgattcatccctcttgcgatgatgatacaactacattaacttgctcacaagtcataaaatccaaagctaacataaattatccttcgatcacagtctcaaatctccactcgagagtcacaatctcaaggacagtccgcaatgttggtctgagcaagtttgttatgtattttagtagtgttgtcgagccacatggagtagaggtggtggtgtggcctagggttttggttttctcgtggtttagggaagaaatcacttactatgtcactcttgtaccgacaaaaaagtctcgaggaatgtatgattttggagaaatagtttggtcggatggtgttcatagggttagaagtcctttggttgtttgtgtaaacacaattacaagtcttgatgatggtattgctcataatgattatcaactaagtggctttattactagctagggtttttattttttgcttgtctttgaatttaatgtttgtaatattagatataagggacatgattattgttaaccttttatataataatgtcattatatttaataacacttgagtatattttcttatgtcccttattattattctgttggtcattaaaaaattatatgtattttacttaataataaagaaaattcacatgtgtaatatattaaaatttatcaaaattttaggaatctaacatactctatatccactttataattaaagtaaataaaagaaaaagtgactaaattagaggcacatttttgactttacttaactacatccaataatatatatattattttaagaaaaaataattttaaaaaaaattgttgcaattaatactaatttggtttggcacatattttgtgggggaaaaaaaatacttgaactggttttcatgatgaattaagagtcatataatatatagaaattattagaaatttttgtagtcaacccttaaaggttgttttggtagttttttttgttttgttatcttgatgaattttttagtttgattttttttttcatgattacatatgttttatttatttaagattattagtaaatttgtaaaaacttctaaatatttacagtaccgaaaataaaatttaaacaattatttatcatgcttatatgaaaaacaacaagagtgcaataaaatatgaaaattttatatttgatattataaattattcgaaaatttttaaaaatttacaagtggtcctaaataactataacgtacataattataaaaaaaaattagactaaaaaattctcctgtatgctgaaacagatagggggtctatcaagatactcatttaaggggtgcaatataaaattatccaaaattatagagaattgctaaaagatactactggtgcccaacaccctcctcggtgtcatactgcactatttgcgtaattaaatatcagattcggtataacttaagaaaataacttttaaagaatatcgcttatcaattataggacgccacttttagaaaataatgagcaccattaatactgaataagaatgaacaaaattatgtataatatatatgtaatttgtaaaagagagattggattgcagctttataaagatgaaaagtgaaagtgaaagggtaataaaaggtatgaagttgtgtttttccacgttgatgatgattcatttctcttacctttccaatcttatatgatgcatttcataccactaattagtgctttccacataactaattaactatctcaattaaacaaaaaaataaatttcaattttattattcttaaataaataaataaataaaatagcattaattaccacgtatatgtttaacttgattgataaaaaataaaataaataaaatttggtgtggcattttgtaatttacttgtaggtatgtataagcccatacaccaatagtttgggcttttgtgcttgggcttgggcttagagaactgtattattttaggaaaatatactattcatctcaggaactattttattattatttttttaatagaaatttcatcaatattgaaaatattaaaaccccatattcgctactaaatacggtagcaactcagttggaacagactctaaactaaaagtacgattaggatatattctagcaggtttaaataaattgaaaatagtagtgtactatatagcattgtcataataagtcaataaacaatatttaaaaatagtatcttaaacttaatgaaaatttataagcaattttattattagttcatatagatttaggtatgatattaagctatctatgataaccatggcattattcattatattatataaaaaaaaaaattggtgtttatgaggaataaacatttggactaagtaaaggttatcataacacctaattacactaaagaactacactcaaaaaaaaaaaaaaaaaaattacggtgtggcgttggttggatgtaatgaaatagaatggaaatgaaacaatatccattcaattcctttatttggtagcatattaaagtgtgttagaatggccttcccaccattttggtagaatgacaattccattttgaaatggaaggaaataccatttcaatgcatgatgagaaaaaatttaataatttttttatacatttaaaattttattctattctaattctcattctcattcatatgttttcattcttcccaaccaaacgtcacataaaagcatatttaatggtatgttatacaattagtataatgctattttaattattattatttttttagcacttttcgataatattaaactctaacaatatgcgaaatatgtgtcaaatttaacacatacttaaagttatgtcaaatttaacacaaatattgcataagccaaaattatacgaattaaaattatatttttcttatttactattttgtcaataaataatcacgtttacactaatttaaactttattaatttatttaaaatttcttatctacttttaataataataataattaaaaaaaagtagattattttgttcacttttttaaaatgatttgtactaaatagtatagcacaataaataaatttagcacaaaatttatatcgtccattgaagatagcctaaaactaatgttatattatacat

SEQ ID NO: 20987 - DNA, 2531 bp, Cannabis sativa
  modified_base (100)..(104): a, c, t, g, unknown or other
taattataattaattaattaaaatgaaatttttacctattcgtaacctgttattacaggtaaaaaaaatgaaaccatataattacaataaaaatgtaacnnnnnaatagtcacccatatatatatatgaataattagtatttttctcttgaattttttatactatttgatcttgctccctaaactatacggcttgttaaaaatttttctttaaatataatagttatataattatgccacttttgttagatttcgtttctttaccgttaaatgttagcatttttatacctgaacattgaccaatacaaaattttgcccaattttattaaaaaaattaattttcaaaattataatattctattaattttgagaaaatcaataaaattattaaaaaacttgataaatataaaattaattaaaaaaatattaactttacttaaaacaattattcttaaaaaaatttcaaacttattttaattataaacacgtatcttaaaaaattaaactacaattattgaaaatctacactacatttacccattttacccattaatctgttcttcactcttacaatctgtttccagtaccagctacttaaggacgttgcctcataggtcctccaatcttcttctcctatatacactgcgtttacccactttacccataatgtatcgtcctttgtctcaatttcccaaacatatttgcctataggcgcctcatttcattctttggttcttttaaatccaattcgcgttctttctttgtcttgcataaatcatcccaagctaccgtacccggtccactcatgtagaaccttttgaggaagaatcattagttgagaccaataagaatgaatagctatgaaaacagagtttactaaagtcgcctgtcccgtgtaagacaagtttcttgaactccaaacattgattctttgtaccattttctctattaaactatctcattcaactataggcaattttttagcacttatcgatatgccaagataacagaatgtcagcttttaaaacccaaagcctctaccaccctttgaatttcattttcttccatgttacagataaaaatttcaaatttggattcactttgttgtaaccaaaagtttgagaaaaagagtttaagtccttgaagcatccgatagattgatttgaaatcaccatgaaagaatggtaaagcatccgatagattcattttcacatctgtcatggaatttaaaatcttccttctccccaactttcatcatcaatcttgataaatattccatacccaagataaaaagaagaggagacataggatctccttgccgtagacccctcttaggttcgaaaaatccatgcaaacttccattaaacatgaggctaaatcgaggagtacgaacacaaaccatgactaaatctacaaacttccttagaaatttaaaagcattcaacatctcttcaataaaatctcattcagtggtatcaatgtatcatatgctttccgaagatctaatttaatcgcatttgggtttcttccctttcctcctatagtgttttacaagatcttgacaaatcatagcgttgtatgcaatgaataattttccttggatgaacccactttgattttgagcaatgatatctggaagtatcattctcaatctagagcatataagcttagtggcaattttgtaaattacattacaacaagctatgagtctaaagtccaagactgagttcgggcatttaccttttggaattaaggtcattgttgttgaatttatttctttgagcaacattcctgaatgcaacaaggataggatcgagtcacacgcatccaacccgaatgttttctaattatcttgaaagaagaagctaccaaagctatatgaaccgggggatttatttcctggtatttaaaatactgttctcttcacatcctcatatgagaattcaaccattaaaattttggaatgatcattacttatagtcggccctagagccactatttgtttgctaactattttcctcccaataagagaacttcccaacagattcttgtaacaattgacaaaagcctcagtcactatagttcaggttgatgtatcctattgcctctgtgatcctcaagagaataaattctattttgtatccttctgtgaaaaaaaaactatcatgaaacaaggtggtattaatgtattatcatgcccttccttaagccaaacaagtttagctttctattgtagtaaggaaatgtaattgtgaagagcctctttatgtaatgcctgaattgattgttcttctttaatcaggtccttgtcgagaacatcacttgttaacttttcttgacaagccaccattctttgtttaagttgaatctctgtagtatgtacatccccaaattctattttattgaatctcctcagttcatctttaagagatttgagtttttgtatcagacaaaacatgggcgcacacacaaaaaacacatttttgatatagtgtaaaaaaaaatattttttgatatatttattttaattaa

SEQ ID NO: 20988 - DNA, 6625 bp, Cannabis sativa
  modified_base (5432)..(5447): a, c, t, g, unknown or other
gaatccaacaaaacatctccattattacctagtacgtacttttttctctctctttcagtgtctttcgcagaaaacttttgtctgtctcttgcccttttttagttaagtaactactactccgataggtgaagtggtgatgatgtatcttaagagactgagaaacgattatatatattctctgaaagagttgttataatcatcaaacaataatttgctgcgacatcgtttttagccgggttggtgcactgatcgcatacttgagaaccaagctgatttagctcgaacgtccaacgtcgtttgtgcaaaacaagctgtcgttttggccagaaactcgttattttttgcttacttttcttgcgtattacacaaagtagtagttatccgtcaaagcattacactttttcaaagttaagctacatataaatatatatatatacacatataaatatatattattaaaattataaggtctctatctatgtagatagatgatactaaccgattttgtcaattgggctaagaggtgagtgaccagctcttggggtttggtgcaaccgtattgggtaaagtacacccgatcccagctaacggaaccagaaataaaatagtggcttacacttggtcatccaatctggcaatttccaccccaacttgaaagctcagtgaaaaatttaattggtcaatgaattgaattgacattgacaaggtaactaaacgctaaccccactcctttagcattaatatatttaattatattgatttcaatggtaatgattatatcgtatgaatactgagaattaatgttcatttacctacttactatgttaagctttaatctattaattatgtaattatgctaggaacgcatgagataataaatttttaaccattttcgaatagtactatccattccataatatatgtttctatgtaatgaacgccactatttcttaatatgttcataacacattaacttaatacgtactttctacgttatgaatttaaaaagattaaaattatttgtaattacgcaatgttaatatatggtgggaacaccatgaattttacggccggtggaatacgacatataatggaatgtattgattaattaaccggcaacaatattatattcgatatctagttgagatatatagttttctgtaagcaaaagattttagatgtggatagcatgattatgatgcatgtaagagggtatagtttatttaaccttttctctccttacaagaaaaaaaaaaatatacattcttcctataattttgagcattgctattaagtatgttaaggtttccaatactatagtgaaatgaggagtaaaatatattaggaggccaattattaaatatttataattactacaaacttacttttattcacaacaaaattgtgactaaaagtgaaaaaattatgactaattataaatcatcatatgttatgattaaaaggtttgtagctaaaatttaactaaaaaaaaaaaggtttgtagctaaagatatgagtcacaaaaattataatttattgtgactaaatgtatttttaatcacaatacttattatgacttaaactaaattgaagttttttctattttaggctaaaattacccaaaataaacatttatatcgtcccaagaaaaaatatacatttatactatttattaattgcaaaaataatttttgtaaagattttttattacaaaaatacatggagagatgaatttcgggtgcaaaaagagagagtgaaatacaataagataggcgagtgagattcacacgcgagaggggagggtaaagtcatttactgacgcgcgcagaactgcagcgtcagaatgcagcagggactctgcggctaccacgtggcaatgtggacgaagagagcttgggcatggggctgttttttctcaatgcaatagttatgcaaaaataaccaattagcaacacaaaaataacttaacaaccaatcaaacttcagaacaaatttattaaatattaacatattgcattaacacaaataaaattaataaataacacaacaacaccgtacaaaaccactaatgaacatataaaaatacttacaaattctttgcaattaataaaaaaatttaaaacacataaagtaaaaaaaaatatataaaaattacaccaaaacaatattttaaaaaaaaaataaagtgattaataaaaatatgctcaattagaaatcaagtaggcaacaatatcaaacatttgtatatataatttagacataattaacttaaagtatatctatgaaaaattacacttaaaataataatcagttaaaatatatatataaataaaaattaacttgatatttgcttactataacatcattcaaaaattataaagcacttgaaaataacccacaaacagtattaaaatatgtacctataaaaattagacatataagtacatatgcattcatttttttctcttagttaaacatttaataacaataaacaattaactaacattaaacatataactaatgttttaaaaggcatttgaggtgttcaactcgaggcgcgcctcgaaacgaggcgttcaaaaaatgcctctgaggcttagcctcagtcactgtccatgaggcttacgcctcgaccttgtgaggtgtacaccttgaggcttaagtttctgaggtgtacgccttgagacttaagtctatgaggcgtgtgaggtttatgcctcagttaattgagtagctttgggccttttttaaaaagtttcattgggctttttttaaagagttccagtgggcctttattaaaaagtttaagtgagcttttttcaaacttttcttgggcaattttaattttttttaaaattttaaaagcccaaaactaaataaaaaaaaccctaaacattcaccactttccctcatcctccacaaacttgccttgcacgatactcttttcctctctcctttctcttcatgcacacagcagcaacacaacaccaggctctgttctctccttctcttcacgcacacagcagcaacacagcaccaacataaggctctcctctctccccttctcttcatgcacacaacaacaacacaacaccaacataaggctctcctctcttcacacaacagcagcaagcaacacaaaaatctctcattttcatcttctctcttctcctcaaggcagtccgttttggaggtaaatattttgttcgtttacttatgatatatattttcttatcatattttttgttgtgcgtactttgtataatgtaatgctttttttattattttttatttttatttttgtttagttgttgtggctgcctacttggtgtttgctgaaatttttagcatccaaattgaatatataagatgactggcagaagtgataaaagtggctcacgaagggatccagcttggaaatatagtgtagaagttgaattagaaaccactgcgaaaaaaagaatacaaatactttaagtgtaacttttgtaataaagtgattacatgaggtgtggggagggtaaaagatcaagatggagggacacacaaaaatagtttactttgtcctaaagtacctcaagaagtgaaggatgagataattgcatatttgaatgattatgatgagtctaaattaagtgcacagaggagatttgaggagatggtagattgtggatcttactttggtagtggtagaagtactatcaatcacattccgttagaggagggcaagaattcttaccttggtgataattctaaaggacttaggggacctatagatcgatttatggtgaatgtaggagtgggagatgataatgaaggagatggtaaagtgaccaaccaaaaaatgattgatgttagtgctaaagaactttgagatcaagtttgtatggacattgggagattcttttttgagaatgggatcccatttaattgtgcacgaagcccatcatattttaacttgttgcgatcagttggaaattatcgtcggggattgaaagctccttcaatgcatgagatgagaacttggattcttaaagaggaagagaagacaacaaaacaaattgtgaatgacataaaagcaacatggaaacaaacagggattttattattatcagctggttggtctgatatgagaaaaagaatcctcatcaattttcttgttaataatccccatgggactattttttaaaaaaacagttgatgcatcaaattgtgttaaagatgccaaaaatttgtttgaattacttgatagtgttattgaagaaattggagaatatattagtgtttagatggtcattgataatgcaagtgcatacaaggcagctggaaatttgttaacggagaagagaaaaagtttgtattggatatgtgctgctcattgtatcgatttgatgcttgagaacattggagaattgccccaacataaaaatgctttgatcaaagtaaagaaagttaacaattttatccacaaccatcaattggtgctaaatttagcaagaaaatatacaaagaaagatcttcttcggcctgctgccacacaattcgctaccgctttcctgactttagaaagtatgtatcaattgaagcaaccactccaaattggtttgtataagtgcatggatagactcattaaggatgaaaaaaattatatgaaggtcgatgcccaacttgatgagtataaatacagcaaggattatttggccttagatcatctttggcatcatacacaacacgaccacctggtgagtactatctttaccttatttttccttagattaattttttatataaaatgaattattaagtttaactaatttttattattattattttatttctaatgatagtcgattggtgggagagttttggagataaagttccagaactaagattatttgcaatgaaagttcttggtcttacttgttagcttgtaaatgtaattggagcatgttcaatcaagtgcacacaaagaaaagaaatcgcctaagcacatcttagatgaatagtttggtgtacattatgtactacaaaaaattgagacccaaattttttaagaaataatcgcgaagagagaaagatgatcctttgatcattgaaaatgtgccttcaaatgatgagtggatagccaaccccaacccaaatgatgaagaagataattataacatagtaactgagattgagggtgaggatgaggggtgaagttctatagcaccaaggaagaggaaaagaaatcaagcaccgccaccaccaaagaaaggttacttttagaactcattgcatatttgcatctacattccatatttacattataaatagacttggcattttataaatttatcatttacatattacttgtggtgtagggaaaggaaaaaatagccaagtggatgtgagttttgaggagaatgattttgaagaagaagaagaagaannnnnnnnnnnnnnnnaagaagaagaagaagaaaatgagagtgatgatggagatgatggtcgagctatgcaattttactcttcaaatgaaaatgatgccaatgaccatgatcatgataacttcttcgagagatatgagtttcaatatggaattcggaacttggaatatgtcttttaatctttagtttgaaactttagactttaaatttatcatttctctattaattagaatattttagttttgcacctttcatgcctttagttatattttatgacttatagttagtaattttaggactttattatgaaattatgtatttttggttataaattttatgatatatatcgtttttatgaatattgttattcttattgtcgaggcttacgcctcgcggtactttagcaaaacgcctcagaacccgtttccacctttcaaaacattacaaataactatacaaaaaaaactcaaatatatatacaaaaattgacttttaactttgtttggtaacaaaaatataactatacaatatcactaattaaatatgcaaaataattggacatcaacaaaatacagtcgacaactttaaaaaaacatcacacaacacacacaactaattaacaaccaacaaataattgtataacaacacaaaaataatttcgatatatgtacccatgaaaataaaatcaagactttacttttgtaaaaatgccatattttttataaaatataaaatataatattatattcgatttaatttatttagttaattatatggaaattatttttatagtgtattattattattattaatttgataatttattttgttgaatggttatgtataaataatttttttaatgaattatgtataaataacttcaatttaaaatataaagaaaaaatattaattattatatgattatatatacaatttatactatttgttaaataaaaatataaaaatcatctatacttcaactaaaagttaatcaaaaatataatgggatattaataatttatgaaaaattaataaataaaataacaatcccactctaatttaaaaattaactaaccttcaacatattgtgtgaactcaaaaaaaaaaaataacacataaagagctcgtttggtacgtcgtattgtgttggattgtattgtattgtgttggattatgttgtattgtattgtattagt

SEQ ID NO: 20989 - DNA, 1813 bp, Cannabis sativa
ttactatccattttctatcatagagagttaatttttgtttggtccaagctcatgtttttaagtctcactctattttagctaaaagtgtataatttaaagagtatggttgaaaatgtttggagatttttagttataaaaaattaattagtaataaaattgaaaaagtgggagaccatatataatataaactcactcgcttgacatagaaacaaggcatgagagaacgcaaaacagtcaaattctcattcatttgttttcttcggtttctctcaactgcaatgtgagatatcttattcccttgcccatctgaacggttaaccgtatcgtcctcggctgatgccgccgccgccaccgttgaaaccttcaaccttttgctcttaggcaaagtgtcagcctcagtttctgatatagcgctggacgacgtcgtttgagcttgaatgaaaccggccgcggtttcatccaacggaggaaaatgcaccacatcagcctctaagctgtcgaggatactgaataggtcgtccccagaagctaagttgaaaagatcatcatgattattatgatgatgattctgatcaaaaatgtctaaggcacataaactactagtactgctcattttggaagaggtagttatgttgtttggatagtaggaaaatgggttagttgggtaaagaaaatacagaaaattaatgaaagaaaacaaaaaaaaaaaagtgtgtgtggagagatgaagagaaaaacaatgcatgcaactaaatattgagagtgaaataggtaaagatgaagatgaagatgacaagggaaagcagagtgaaagggactaaagcatcaacatcaaatatttgtttagatttgttttcttttacttaaagatatatgtttgggaagagtaatgtatttattgtctaaaaatatacaaaaatacaaagaaagaaaagagaagagagccgtttaaaactgagaaaaagacaagagatttagaggagagggggccatgaaagagtctctatatttatttatataaataaaacaagtatttaatagctttgttaataaatttgccccttcctcctgtcttctcttttactattattttatttagagctataccaatattttattcagtaaagaaagcagtgaaagaatcaatatgtacatattcatttatagatatgtggtagtggcatatgtctacaacttttcatttttaattctttcatccattaattattattccaattaaacgatgattttaataaccaatgtatatgaatgtttattttgaaagttgctataagaaagtatttgggtcatatgtttacaactttttattttaattttttcatccattaattattattcctatgttgtgactaagagattcgtggcaaaaattattagtcacaaaaattacaatttgttgtggctaaatgtatttttaagtattgtgactaaaactaaattagtgacaacttgtatctaaagactatgttttagtcacaaacattttgttgtgactaaaagtcagatttagtccaaaaaaattatgttgtgagtaaaaagttatcactaaaagtagcagttttttgtagtgacaagcaccacttcatcatctgtcttctagtaaacaatttatggactcaaagtccactccaagtggaaaatgggttaaaaaaaacaaggtcgtccaacaaaattggatcctaataaatattatacagaatgagcaagatacactactataaaaagtagtttttttttacggttttaaatagtcgggtaatcttttgctatctgttcttatgacccacacctt

SEQ ID NO: 20990 - DNA, 6138 bp, Cannabis sativa
cacttgaccaaacatgaatcattaattgaactacgcaaggcttgaataaacactaagcagtcggtttcttggtggcatttagttaggctctgatgtattctttctttcctataatagacaaaagaaacaaaacctggacttccaatttaatttcacattagtttcttgcattaatgttgttattatgttatcaaatttttagttcaatgaaaaacttagaagataatatttttgggattgataattttttaacttaaaaatatttatgcaattttagtgataataagctgtgaaagagtttgtgaatttgttttcctgctgtggatgatgatcatggcaattacggttatttaagtatcttacttactgtgaggccattcctgagaaatgtcttagcttttttaaaccagatatggtggtcatattcgtatgacaagtttaatgacaggtttatagagacagagacagttatatcttgttagatcgacaggtaatggcgctaagattcttgttgatctttgctcgttgtgctgaaaaaaaaatgcagcagcaaaagtaattactgtagtagtgaaagttaatattgataagctaatttaaacagaaacagcaattagtatattacaatttacaaacacagatctttgaacaaaagaatcttacatttcttatgaaggtatagacaaatttacaaagttgtaatctagtttgtagccactgtttttctttagatcatcaaaacaaacacaggtattggacaattaaaagtaatattcttcattatattacttctaatacatgttatattcttattatcctcaaactgggcggagtctccaggctgagatcattagaattattccaagtatattatatgggcaaacatgattttgacatctgaattaacataggaccaatatatcttattttgtactaagattgctattttgtctttaaatagtgactcaatcaagtcttatgatcatatctagtgtgcatacagggtcagttctctctcatataatctcaactactttttcgaaggagttacataacatatacacacacatattttacactgatccatttcttctgtaagtataaatcgccaccctgaaattgaagtttaaagtgtgttgacttttattttttatgactcaagctgcatgctactcttatcatcataataactacatttaatagataatctacaaagatggctatctgttcatactactaatattttataatttgaaattgtaagataagatttagtaaattctaaaaacaaaggtggatggttttgttattatttcatttagtacattaattttttaaaagggtgcatggatagtctataatatgttatttgttgtgtagtagtatatgtattttaagagattaccctatactttttaaagttataacataaccatgatagaacaaaaatcaaagaaaatacatgtatgagtttgaatcaagcttacctaccaaagcaacagaacttctaatcaagtagctaattcaatcacttctgtttatttagcagagccaaaggtacaaagtagcattaccacagctacacaactctcatcataacataaaaaaacaccaataaatggcaactcagttatcacaaaggtgtgcattcttcattcttcttagttcttaccatttttatcttaataataataataataataataatgagataagaaatggtcctgaatatgtatatgtatataggtatgcagtggttacaggagcaaacaaggggataggatatgagatagtgaagcagctgagctcagaaggagtgtgtgtggttttaactgctagagatgagaaaagaggaagagaggctacctcaaagctgcatcagttaggtctcagctcaggctctcttctttttcatcaacttgatgtttcagatccacttagtgtccaggccttggctcaattcattacccaaaaatttggcagacttgatatcttggtaaataaccttaattaaagttcatacatatccatttactatctgagtctctgactatatatataatatgtttgatttgtgtatattattaattatttttatttttatgtaatggtgaggtagatttaaagaatcatctacttttagtggatttaatatttgttgatcacaggttaataatgctggagtctctggaagtgtagttgatgatgaagccttgagggcaatgaacatagatcctgtagattgggtaaattataatttgcatgatcaaactcattacatctatatataattatatatgttagggtctttttcagctttttatttattaatggtgtgcttgtttatgacattaggtagtcagtatcattacttttatttactccccacaactattattcctatttatttttaattatatattgtcaattttattatcatcaatttaatataaaaattagatcaaattggagtcaacaaatgaatttatttatttattcctagactaaattattgtcaactcagaaaatattttattgattccaatctaaatattacatacaaaataatggtggtgcagctatcagggaaggtggccaacttggttcaaagtgtgattaaacaaccatatgagaaggcagaagaatgtttgaatatcaattactatggtgtgaagagagtcacagaagctctactccctctcttgaagctttctccttcaggagcaaggatagtcaacgtgtcctctttaagaagtgagctaaaggtaactttactacttgttaattatcactaaacttagaaaactaataacaaatgatccaatattacttcagtattttgtatattaaactagtttaatgaaaccattacagagagtgccaagtgagaacataaggaaagaacttggggatttggagaatttaactgaagagaaagtggatgagattttgaaaaagtttctgcatgatgcaaaagaaaatgggcttgaagcaaatggttggccagtgatgttgccagcttatagtatttctaaggttacagtaaatgcttacacaagagtattggccagaaagtaccctgacatgtatatcaactgtgtgcaccctggctttgttaatacagatattaattggcacacaggaacattaactgttgaagaagggagcaaaggtccagtcatgttggcccttttaccagatggaggtcctactggttgctattttgaccaaacccaagtggcaatgttctgattgttatttctattttggccaaaatgggtaagaacatttagattggatttgttaaaactgagatttctcttttggtaataatggcttttggtttttgtggccgatttatggagtgttttgtgaagttggactttatgaaaagatttattaggaaactaaaatctttcaaaacaatttatttacagttagactgtggaaccttaatacgacattcaaggtagttatgtgactctaaatttacaccgtgtgaccatgattatcagtgtaaatttaacttggttaaatcataatacttccacttagaactaattttaatcctataataattattatactctcaaattacactttcttcacatgtatataatatatatgttgtattccaattttgcagtacaataactaagatatttttgcagtacaaatggtagcattccaattttgttggacttaaaagtacatgaataagtaaccgatcaaaaaataagtacacgagtaagtgaattggagaaaaaaaatcttcattgtcatgatgtgaaagaatatttggccaaactagacaatacccaactagcagaggtttgaaagtcgtctccctttttcgctctcttcctattaagagataaaatttaattagtattttaagataatatattagtgaagtgaatgaccacaattatcttttaatattataatacgattcccacatggttagtgacttagtgtttatgacatatcttatgcactatatttattatggtttctgaatttgtataaattttaataattttacatcttactttaaaaataatcgcatattacactaatttaattaatgacaagttatgcattttgagggtattaatgttaataaccctatttttttttaacaaatgttgaataacctattttttttcaaaaaaaaaaaagcaaatgtcaataaccctatttgataaactagatgtaaaacgtattttcaataaagatagtttatccaagttgataaatatgggtttttactcaatcaaataactcaaaagtgagtcattttcctaataagccccttgagaatgcaatttatcaaataccttaacagcaatgagaatgtattgtacaggcaccactcattgaaaacttggcacattctggagggaaaatgcgcctgtcgaaaatggcacctggttttcgggaaaatgagcgagaagcctttcatggaaataaatcctgaagatcaaggatatcagcaaggacaccagttgcagtagtgtcattcccagctccagcgccttgaataaccaatggttgttcgggatagcagcggctgtatacctccaactgttttatagttacataacagaatcaatcaagctctatatgcaatcaatgaaagagttgcaattttataggcaggtagaataagaacaatgctatttaggtcctaaaccctttcatagaaattctcagatgattttagggacagtacaagaagttaccaccaaacatctcatttcacaacagcattcaaatgaatccatttgctgggaaaactctacatagtggcgtttttagttatttactgtcaagtcctcccattaaaccctacaatcattagggtagggaggaaagaaatataataaattcctaggtaggacttcatgatgaatctaaactccagtcctcgtgaataataggaagatattactgaccctacgcaattgcgttcttgacattaagccaaagtcactcactgatgccagtctacacagaccgaaattataagcaatgtagcctagccaagttgtgcacatcgttatggggtaattattttgacttgaaagatcagtaaggaaagatttggcaattgaaaaaatggattacattacaataacagaaatgacaatgtcattcattctagtcttaagaagtattccgtatatttaatggaaatataaggtctcttaccagcctaagttcaactttattgggaattttctaaggaatgctgtggaaacatctcttcctagtcaggtcatttggactttcattctcaagtaactttagaatttatcttttaataaaataaaaataactcagtcattttgttactgaaattgttccctccatatctcacacattaataaactaccaagccataaatccagcatagaagtgaatcacttagtagggtgccccactttaaaattcatactaaaatgaaaggatataaagaaaagatataacagcataccacattgtcacttcctttaagtcttcccaaagcagaatcccttggaagctcttgaatgccaacttcacatctaaaaggacaaagaaagggaaaaagtaaaatgaaagaacgaagagacgaagattagttggtacttttaataagaatcataatatattatagataagatgggttggtatatgttgaggatatcagtttcacttttaattgaggctaagagccttaataccaagagatcccagattcaaaccttggtctaaccccatttcaaaaccccacctcatcacttttaatatttaagtcgactgtacctgtttttctcctttttagacacaacaaagaaaaaaacatcgtgatgttgactcgacatgcatgaatatacaagcttgaatcgaaacatacaaaaaaaattaccttgagccctcaatcacacagacataacgcagcacatttccttttgatgaagccttgtgtactctttcttgaaaatctttatctagcaatgaaaccccactgcccagaaattcttcaacggacatcacaccaggccccatttcctctgggtacaagctctcaatctagaagatcaaaatcagtatttgtttaaatagcttatagttatactgggtatgctacaa

SEQ ID NO: 20991 - DNA, 3440 bp, Cannabis sativa
  modified_base (2521)..(2521): a, c, t, g, unknown or other
agcaaaaattataccaccaaactgttattttttttgctgttaaagataccatcaaacttggcatcattgtcctcatcgaaattccaaataatgcataatggtagagattaatttcagtaattacagagtcttaagatcaagcagagaccactgcaatggtgaccataacaagacatgcactttcccaataaaaaaccatcctttcctcccaatattttcaacaacaaaaagcgacctattccaagacaatacatagagatccaaacaaaacaatgtcatggaaaacatcaaaatcaattaatgggtctgcaatgtccatcccattaatggaataaacatctgaaattcaatcagactgaaccataaccccaaaactctataacagatctcaataaaaacacaattacatcttaggaagaaaatgtagccaatcttaaaaattaataaataaataaaatagcaaccccatactacaccaaatacaagcaacaaacatcatcatcatcatccactcgtacaaccaaagttcaaaaacaacaattaattcaaagccattaacatcaataacttaacaagttataaacaagaacaagaaaactaattaagacaacaaaactaagaaaacggccatgagagaaaaattaaaaagacacccacttccaaaaccgtcggtaattcccacttgacacacagctgctactgatgctgtctgtaccactttctctccccctttccaccctttctctttttaaaataaaaggaatcatacataaaaggaggagtgcagaaaacaaaaatgtgaaagtaagaagctttcatacattctagagagagagagagagagagaaagggggactctaatgcttacctgaatgagagcagagaacagaggttaaagctgatgaacagagatgaaagtagaggaataatgtggcgccaaagcgtgggaacgataacgatagagaaatatactgaaatgaaaggacttttggagtaggaatatgggtattttacctcaccgccattagaggtaagctcagagctactctacactaaaccgcttcagcaaatgacgcccttttcaatgtttcccggcgtattgcttacacaaatttattttttttattttattataatattaataaaaaaaaaagacacataactttgcgggcttttagccgttaaacactttcttattattattaataatatttttattttattttgtaaattgtaatttttttgaccggaacttcattattcagacacggctcattttgtggtctctttttattatgtgataattttttttttcattaacatgctattgattttgccacgtggattgactagtacgtagaatgtgacacgtggattaataggtcaaattttgtgtaggaagcacataaattttatctgaattatccgatagtttttggtcattatttatggatagatataacgtattgaaaagttgcatttttgtttttgtttattaatttatttcatatcattgttataagtctattttttttacaataatatggtagactcttctcttatagctaattaatcacataaagtaagactgtttgagtcattttattggaaaaaaatatgaaaggttttttactcggaaatacttaatgttataatgataatgcgaattattataaacaaaagcaaaacgcactcttaagacacgaagcataaaacttttatttacctttttcactgacataaataacaaattagaagtaattggcaattattttatggtatataaaaaaagtagagacattattggaatctatgatgccgtaattgctgatgccttaagcatataccaacctttttaaatcaaattaaatatataaaaatgtattttgttaaaaaaaatatatatacataaaaatacaatatgtataataatacattgcttcgtaatgatgacaaagtaataataagtaagaattggagtagtcccaatatatcaaaacgtaccgtcacgcaaagggatttggattttggaattgcaaatgatgattacgttacattcttcctctacaaatcaactacttccttttctgatttttatacctttttctcttcttttctctttcaaagaaaaaagatttataattatggatatccagatcattctggtaaaatatacaattgcttgtatttgaagctttatgggtgattataagcttgaatatcgatgattatattaatatgtattatgtatattgtgggttgattgattcaaatataagctcatcacctggtggtgggtagcttagctccttttccatcatacctcaactaaagatcatttttactttttaattttgccaaataattaaagattaagttaattaggatttttgactcattaactttaacatgtaccaaatcatacctcctgaaattaaaattttttcttgaattattgagattgttatatttaaagacttttgtctaatttcgtttaattttactattttagtgattgttnatgtactaaatcatgctcctcagactttgttatatacaaatcatgtcactcgaacttttacatgtactatagcatgttccctgaactttcattcatgttagacgttttttactaaaattagacaaaagtctttaaatccaacaatctcaatagttcatggagaatatttttaacgaccttaaaagtttaaggggcatgatttggtacatgtcaaagttcagggggtaaaaatactaattagcctaaagattactatagttatgggtattataaattgaaattggtccgtggagatattgatattgaagtaagattataatcttacttaagctaattatgtgataattagtgtaaatctaataaataattaaataaagtgtaatttataaattacgaagattttatcgaattatgtggatatagtagataccacttttgaaataaaatatttttgggattggcctcgacccaagtctacaattgaggttagaagcttcataggattagcatgatactacagaagatttgttgaagggtttgctaagatttccacgctcttaacagaattgactcaaaagaactgtacgtttatttggactgacaagtgcgaggataacttctaggaattgaaacagatgttgattaccgcaccattgttaaccttgccagttaatgatgagaagtttgtgatctattgtgacacttccaaacaagggttaggttgtgctctaatgcagtttggaaaagttattccctatgcgtctagacaattgaaggaatatgagcagcggtatcatacccacgacattgagctggcagcagtcgtttttgcattgaaagtttggcgccattacctgtatggcaaaaagtgcaaaatctacacagaccacaagaacctcaaatactttttcactcagaa

SEQ ID NO: 20992 - DNA, 3056 bp, Cannabis sativa
tttggagacaagctcttagtcaccctcagcagcctgtcccggtgatttggagtctgactgcccacactttcatctggcatgtggtgaagcatcaaggcaaaattcactgcaattgcctcgccaggtcgaaccccaaggtcctcaagttgaacctcagctacagaagtgtcaacagcattgaactcaaaaggtaccttacatgactctgcaatctttgacaatctcaatcccacaatttcaagaccgcctcctcttgcataagcagatgtagagtcatctatggcagtgatcctcatctttggtggtcccccaggccgagttgaaagagcatggattagaatcatccactgagcaccctgaacaatctgaaagtcaatgatgtgaactacactttcatccttaacggcttcagctatcgccccattagctgacatgtagccaaatttgaagtaggggcagatttcatacagtatatgcatgtaggagaagagttcagcactagcaggctctttgcatcttaatgctttgtaaatagaacttcctgaagaagccatctttgcaacaagaccttctaacatgtaagcactcaaacgttggaggggatcaccagaaactgacactaattgacgtaattcagagatcaaccactctgttgtcgacttgtcattttcagctactgcttgagcacaaataaaaagtagacctttcaagtctgatgcagaaagcatgtccatcaatcgtccccaattgtctccttctaatgagacctcattctgttcaacctggtttgaaatattatacatttcagggaaatctgaatcagttccttgcataacactttccaattcccttattttgtgcctcaggtcatcagtatcatctgttaagcaagaatggctcactggagagccacaaaaattgtcgggagaaagatgctggtatgtaaggtatgactgagtttcaggctgtgatgatgggcttccattgggtgagaaactaacagaagatgaagaattttgaacagggttactgcttgtcccggaagacgattcaagggtgcaatactgtgtaaaagttttcactgcaagatgggagccttggctatcattagcagctttaagattgtctatattgtggattggagcccaacagtaagactctgggtcttcatctgactgcgccaaaaacctgtgagagccatttgaaattctataactctgggattctttcatatcaaaaatagcctacacttgcttgattaataacaatcaatgatgagtcagtagcccaaaggaatacttggatatcgatgtagcacaaatgttgtcgaaacgtaattgacaactctcttgttgtaaatgacaaaccttagttgcttccaatttatgttcgtaccaaaaccattcggcagatatccaaaaatttcagcttggtatgtgctgttcttggaggaaataacatgatctgtaagaaagagaaacaagaaaatttagagggtttccctcgaaaacaaacaacgtcctttatagacaatagtggcctgaaagcccagaactaggaaagtaatcaatcagaattagagacatgcatattagcaagatgtgacagctacagaaatttcaatccaaggtcgagaagtaatagagtactgaaagtgttccattttcaaagcattcgatatacgactacatctcagagtcaaacatagaagaaatctagaagaatgctaaaataacaccttaaacaattgggtcaatagtcagatcagattacaacagcttaccaaccaagtctgaaaatatattaataacaaatatattacaatagaaaaaaggttaagtgcaagaaaatgaatttatctatcttattcaaccagaaagtgtttaagaataatcccatggcggaggctttactcaacaccaaactaatggcacttcataataaataacgttataaaaccagaaattctacagaataagaatttggacctggccatgattggaaattcgagaaaaagccacagctactttttagtgttaatgactactcaacgaagttaatgatataatctttagccaaaaacccaaacgaaaacaagagtaaaatgaagaagatggaagaagaaaaagagcatataatataaggaaaacatttaaactgaataatccaaaagccactacagaataatagtatatatccagaaattactactcattaaaagcgtttgaagctggaaaaggcagaaagggggaggggaagagagaggattcaactaactggatccaaaacgaacatgataactttattataaagaaaaataaagcaaagaaagtggatatgaaacccaatacagttctttatttttattctgacatgccactagtaaccacttaaacataccctctaagctcaatccattttcataacccatcatgtatgtataattagctcgaaaataggaactatgcaggaaaagaaaactaccaccaaattataaaacacaacagtaacacttcagtttaacaaaactaacctttatcacatcaaagaataaatctgaacttttacactagaacagcatcaaaacatcacttcaataataataataataataaaagcttgaaaatcataaagggaaaattttactaacaaggaatttggtaaaaacccatttgagactcataacctaattgctgggttttgacatatacctttacttaagcatttttattccgtgttcttctttgcttcagagtccaaatgataattcagagctggctgaaacaattactctcctaatagaacccttcacttttataatttttatagtaattatgaagtataacccagaaactattaaaaaaacttatacatcttaggcctcatatatctttatataaccattattaaccaaagaaaggatcaagaaaccgctgcaaccgacattaggatgagtgagacagtagtcttcttcttcttatttttcgtcatatttatccctcaactagaaaaacaaaaatatttgactactggaaagaccaaaataccctccttct

SEQ ID NO: 20993 - DNA, 5465 bp, Cannabis sativa
aacaactcgaatctaacactttttacctttttggattttccaatttcatgttattttttttttattgaaaataatggtgctacgtacccgtcaaacctcaatctttaagcctcatatattagtgccttaggtcacattgaattccactatatatagggacggatcttttgaggataattgagcactccacaaccatgtattatttgccgttaattaatcaaactgatgtttctagtgatcgaatttgattattatatgttaatactcattattagggtcattttaaaactttgatatggattgaatagaaagtgaagggataaactccatctaatgggtataattgcataatcgaactcctcattatgtgccctctagcgcttctctaataaactttggaggttcactttggtaaaaagatttttttcgaatctatggttgtgtaatcaaatcttaggacgtgtggtacactagatatatataaaagaaagaaaaactctgaagagagaaaaaaaaataatttaaaaaagaaaaatagaagcatgctctctacttctacatttaaatatctttcaccgtaattccacaacttcatcttcattgcaaactccaacatcaattatcatactgcctgtcttctttgatggcaatattctgcaacaattccgccttggagcctaaataaaaacacatattgaggttaaacaaataaatattttgggataaactaaaaaaaagactacatttataaaaataaaataaaataaaaagaaaattaccttattccacatatctgggtcgggtcttttgcgaacctcgatggtgtggatccgagaaggatcaggcattttccatgggcaggtcatgttggatgcccgattgagaacatagacggtagtggtgcggttcgattccgggtggtaagtagagttggccaagtaatagggaaagggtttttgacaagtgttcctgctgaaagggcgggtgttgaaggcgtagccagtgtagtcagctctttggtaccaattaaggaacgtcctagctggcatttccatgtcacgcaccgaaaaaatccctcgaaatatttgaaccgcgtaaccccaagacactgatacggtccagctccgcctcttgtcgtagcaaatggactgttgcataagcccagctgagtccagttccattgggcctttcagcctttccaaggcttttacccgatttgtgtttggaaatatgggctggactacgtctaggtggtgtagtgagactagaggagcgattggatgggccgtaagaagcccaaataaactgccgtacacatcaaactgcatgcaaagataatagccgagatgagtggagattctaccatcaagttgaattaaagagtaatgaagttcaagtgcttccgtcaatcataaattatttatcgactttctttatctgaataaccgcggttactgttgaattaagtgctttaaagctagaaaaaggctgtgtattaaacaaggattataaggaaatagctgctcaaccacctagattctcaagttgattacgactgaatcaaaatttaataacaataataatttacatagtagtacacattctaatagaagcaacttgttacacgtacacagaagaaagataataacaataataatagtaataataacgaaaaagaatgttcaccatctttgcctattaaaacctgtaaaggtgaatttcacctctttaataaagtaaactacccctacatttttacaaacaatgactaactgcttaatttttcatttattttataatcattgttataattattagcaagaaactgctttattttcctacaagtactaccgatttcagctttctacttcagatgttctatatatatacttattttacaatgtcaagattgacgcagttatgtaacttgtattttaatccattcaaaatggagttggaggcaatcttattctcaagaaagagaaaaaaattgaggttaaaccatttttggtagattaattggattgactagtctatagggttcattattacaattacaaagttgaaaaggtagccaagaataataaagtcatgggtcgaagtaaaatctgaatttaagaggttcggtagataagttgaaattttttaattaagttttttgaagatttactgtgagcgccttgcctttctatttttcaatttttttgataactactgaatctgaaagtgcctttcaatgcgttaaaaacttcccttcagaatgatttatgtactcaatttgtgccacgtggtactcaaaagtacaaaaataaaatcaaaagattgaaataaatggggcaagaagacaggtagaaattgaatattcattaagcacaaaaatatggtcgtttagccaatgcccaatggcatacttaaacgtagcctacacacttcacagtacatagcattgggaaactgaaatgttggtagcaaaaataatataattattagtttaattaaatattaaattatataatttaataaaaaaatattaataactaatataaatttacatggtatactaatttttattatttttttataaaaatactgctagacggtattttttacttttttactatattttttataaatttagtatattgtgttaagtttttactgatattctactagtgttttaagttgttttgttttatattttattggtgttttatataaacacaatattttaaaaaaaaaattcgtgtgacagtatttttataaaaattaactataattttaatatttttgtaaatttttcatagctaatctttacacttatacataaaattagacactactagtactaatgtccactagtaataatcgatttttattttttgcttggaagaagcacccaacatttgatgcaaaaggcaacacaatatagggatcacgtgacacatgggtatgatgcacgtgggagataagcgtgattagcggtcagaagaatagagcaaaacgaaataaaataagggacggatatggaagtggagaaggtagatgtggttcgaaccgtaggtgtccacgtataaggttttggttgcgatattataaagaaattttgttatattgactcatagcctttgtgatttgttcactccaccgccatggaccttggtttttttaatttctaacttcgtatccaacatattggacggtcgtccgtggtcaacaaatatttttttttgtaggtaaaccaataactttagtattttagttacataaattacatcatatttaatctataataaagtcaatatgcaatcatgtaaaacattctgattattattttaattttattccaaaatttgatcactgccaattctaaaaattaataatatatttaattctcaataagataacttttaactaatttaatttttctgaattaataaaaaaaaatgctattaaagtgtcacttttaaatgtaatattatatattatataatgaatttctaaccaaaaccattatttagcaactaataacagagctggcttaaaactctcaccttttgttataactaatataccatctgttatacacaatattaattattataatacactcgaataataaactactctactagtgactactccatttagtttcatataaatgatattctaaattcttaaaatataatctttaatctctgacataatactaagagtgattgattaattgtttcctaattaaacactaatttttaatcatcacagtaattctcttctatgaagagttcttttttgtttattgtttaattcaattttatgttcccctgtttctgacaaaaataaacatgatagcttgaaacttgaaatgaaaatggaaatccataaaaaaaaaaaaaaaaattaaaattaaaatataaaaaaagaaatctaacctggtgaaatcctggttccttggtgagagggacgccgagttcggccatacaagcttgcatccgatcatctgagccgtacaaaccagggtacctctgaatacacctgtcttgcattttcgccagctcctttgctaatggatagctaatggcgaatccaccaccgccgtaagccatgttataagagaagtgaatattctgtaaatggctctctgatgagctcccaatataataaaattgttcgtgatcgtacttctgcaaaaccctaaccaaattatcagccacgaatacagtgtcatcgtcccccatcacgaaccacctcactccttccgtttccccaagccgcaaggtctcggagattattctcgagatccgaatcgcggagcggtggcctttggggttcttgtatttgaacttggtggtgttgctcgagatcttcaaagggggcaaactcagttcgtcttcggacctggtcttgacggccttatctagccaaactactccccgcattcgatctggcttccaccacagcttgatgtaattctttctctggttccagagcttggccgaagccgcaatgccgaaaatgatatgtgaaatattggttttgagtggctcaatgggaggcggtggctcggaattgaaaatggcaatcgattggggatgctgagtgaaaatcagagtttttctttccttacaattactggaatgtgtgacgaatttgatggagtaagagatgtaggtgaggaagattaagagaaagaacaccattagcttcgtcatcgcccaggtggtgtggaaggtttctggattgttctgagagtttttcatggctttttgtaaataaatatgtgtttgtgttgaaaaatatgggtttttatgcttcttcgtcttttcacccggttaggctgctgtttggttggcgagaaagttgagaaggaaaatgtaaaagcactaaaaattaattaacttttaaattaaaaagaatactgaaatgaaatgaaggcgcgtgtttaatgtgagctgtgaagagtataatgaagaatacagttcttatataagggaattcccgagctaatctaagctataaatttggattacatttccaattaatcaaaatattagatgttttagttcaataaattatatttaattttaaacaaaaatcaattagttatattgttgtgtgaaagtttgtgatacttattcctcctaatccacatgctacaaaacttacctaacattttgtttagtttttaatgttgcaacctaataaaatttaacacattttctcttttaacaatttttctgcaaaataacacattaattgatgtggaacaagaaaagaataacatatttattactatagtgtattagtgttgcttaaagttaaaccttataattaattcataactcagacagtaataatctttttcagcttaattttaatacattcattaatggcgaaaaaaaaacacattaatttatatatttaaggttgagcgtgacatgatcatatattattttataagataataa

SEQ ID NO: 20994 - DNA, 1923 bp, Cannabis sativa
atagaaattaattaatcttttatatattttcacttaattattaattatgcagcgcataattatgaattcagggaattagagaatcttacgtgctacacaattccaacaggtgatacttttcttggtctttcttattctttcccctaattatttatcatttctttgaaaaaaaaatcattaaacttttacttttctcttaagataatcataattagcacaaagtgctatataaaataccaatcaattcgcaatgtataattataaaaaagaataaattaagttagatacacattcaaatcacatacattatatatataaaactattataactaatagtattacagagaaaacaatatgtgatcgccatattataacttacattaaatgtattttgcaaaaaatatcataattaattgtagtatattaataacatttatatcatcttatactaatattacttcgtacgtagtactttggagatgaaaaactctatcttaattaagcactaaactagaagattgaaaaatatcagtcgataaattcagattaatattacaaattatgaagaaatataagaaatcattttaccaattttacaaaatcaaagacgtatatattgagaagaatatttaccaataataataataattatgagtggagcagtagtgatatgatggcctgcatagcataaatgtatacaaaatgaaaatatctcaacattcgaaagcgaaaccccaacaattaattataatttgatcacctttttaatcccacttaaattaggtccaatgagatgagacttattggactattttcctatatagaaaagtagcatatatatatatatatcatatcaaattgtatcaatcaaaaaatgatatattttgataggtagatgtagtggaaataaaacatttcaagtgtgtatattgactggttatcactaatcagaaattaaatatattatatcaattaaaattaaataactaataataatggtacataaagaacaaatgtaccgccgtggttcaacttggccccgttatacatataaataatagatgaaaaacaaaactgataattaatgagtacttaggactcttcttctcaattttctcgatcatatacagttttttcttcgaaccttcatttataaaacatagctcttttgtcccacctgagtaataaaactcaactttttttctttcaaataaataaataaaaacatactcaatttgccaacttgtttagtttactcttaagtttcacgaaacgggtcaaagtccaatctctaccactcgttagtcgcttttttttattttttattttttattttttcggtaaagggcttttttattaactttatatattacagcttggtaggaatcattagtcattttttgggtgctgtaaatttttttcaaaataagttaagtttttgtgtaatatagcatttgtatggtatgacgtatatatatacgatatatacataatacataatacataatacattgtattattttatatagtattatattaaattatattttatacaatattaatttttatgtaaaattatatgtattattaatttttatggacataaatatatattattttagtataataaaaatttactataatattatataaatatataatatataatctaatttcatacaatacaatataatcactacaagaaatattacttttgttagcaggttgctactgcgttgataaaagttatttttactagcgtatatttttgtaaattgtactcgcaaaaaagttaaagttttaccagcgcacatttgcaatagcaaaagtttaacttttaccagtgcatttatgtattgagaaaaatcatttttgctagctcttcttattttgcgccggtaaaaattctaatatcaacgttga

SEQ ID NO: 20995 - DNA, 2533 bp, Cannabis sativa
ttatttattttatattttaaattgaaatagttgtaataagaaatttatactttttattttagttatggtaaattgtttcacacgccatatttttcatcaagtttaggaataaaaaccctttatatcaaattaacgaatctaacctatatatagacacactcaaatttaattatgtgaattttggttaagaatatagcatatgttacctaattaagaaaattttaaatatacgtatatatataatcatatctaaatgacacactaatgtaattttttttttgtggaaattattgtggcagttggatgtccccccaaaagtccaccattttctgtggcgtgctgtttcgggttgcctttgcaactaaggcacgattagacactaagcatgttaatgttgacttaatgtgtcatttttgtaacttggtcattgagtacatacaccatgtccttctccaatgcggttttgctaggtcttgttggagagtttctagtgtgaatttggctactagtttggatgttaatttcagcagctggttttttaatgtggccgagactcaaaagtgagatgttggtgcttggagatgccatggttagctagaaaatttgggcagctaggaatgatgtgttgtgaaagaacaaaacgtgctctgctaaggaggtggttcggtcgattagaattgtccttgaccaatggaagaatgctcaatctcgaaaaggtggtgcattgttagtagatgttattaacaatgttagtgaggtttggaggaaaccaatgttgaatacagtcaaggtaaatgttgacagagctatttttgaagcacagaacaagtttggatttggttgtgttggtcgcgattccaatggtcgtctgcttacgaccttctttgcaagccgtgttggcttagtcaaacctgaaattgctgaaacaattgggatcaagaaagttttgagttggataaagaaaaaacagtgggccaatgtcataatcgagactgatgcgttgttggtggttcaagctatcaaaagctctattcttatgcatgccttcccagtttgaattattagttcgagattgtcgtatgttgatctcttctctaatgattgtgtctttagtttttgttaaacgatatgctaataaggttgttcattgtgtcgctagaaggttttgttacttgtcaaattgtgaatttagtgagcttgatgctctttttgctcttaagactattgtatgctaataaggttgttcatgtgtcgctagagggttttgttacttgtcatattgctaatttggtgagcttatgctctttttgctcttaagactattgtatcttctgagtattgaataaaatcgccatctttgattaaaaaaataaaaagattatattagacaaaatcagacaatatatatatatatatatcattgatattactctttttataaatgatctatacatgcaagaagacaatatggacatattatttagttatatatatatttgcatattgatcttacttcaaaatgcttataaaagagaatacaataaataatgctcacaaatcatttgtcaacaaccaaacaaaaaagaaaaaaaagctcacaaatcatgtcagctttccaaataaattgataacaaaaatatatcaaaaaacaaagaaagataagaatatgatcaaagtgataacaagacaaaagtacgcacccatttattagtacatggaatacatatctagaagttataaaagcaaaagctttacaaattagaaaagagagcatatatattaattaatagatatataaatatatcgtatatatttttgtagaccaaacttctttggtgggaaaggtgtatatgtatatatattatggaaaattcttaggtgagagcatcacttttgctctcacctatgaggacattttttaatgtttttaattcgttgaatagtttggttatatggtattatggtgtgttgtagaacatgtgagtatttagttttatattaattttttttttattgtgatttttctttttatcacgttagtgaatgtatttttaatagtttcattctttctttctcgaattagtgatatttttatttatctatgttgttaaatttatagaataagaacaatcataagaacgtacttcatattattttttttctatgtgaaagttcaaaaaaaaaaaatgttgtctcaatttttttctcaattgattaaatatataatttttttctgaacacagaaaatatttccgaaacacatataaatatataatctgaaaatgaagttttgaaagatacaagaaaaaagacacaaattggtggctatttctttttaaatttctgatgtttaatattattatgtctttgctctataaattacgtttttacttatatattctcttcctattctaatttttgaatattatgaaaatttaattcttctaatcaaaatcttgagtcatgggagaggacatatcaatttctgttccaaaatattatacgattactacatataataataataataata

SEQ ID NO: 20996 - DNA, 4610 bp, Cannabis sativa
tttaagtcttctaaactttttatttattttatttctgatttggaatatggtttaggaagaataaattttacttgtagcccaccctttgtatctttttgggtggtacatcttatctaatatgttagggcttataaagtatatagttcataaagatttgcgggtgagctttggttaggagaaaaagtgtgtacattttaccaaattatgtatttgtttgaaatgttggtgcagatgctagtaactgtggtgattttgtgaacttgttggtatatgcatggaagcaagagaaggaataagttcaggagtgacagtgataggagctgaagctccatcaacttatcatgtggccccaaggatggaaaaccccactcaggcatctggatcacctcaggttgctcctttaccagggaatgtggggttgactgaaaccacagggaagaagaaaagaggtagacccaggaagtatggaccagatgggacagtcaccatggcattgtctcccatgcccatttcgtcctccgccccgccttctggtgatttctcatcagggaaaagaggcaaagccaagtccggagagtacaagcaacacaagaaacttggagtggaacattttggtggtgggtggcagtggcattttatatattttattttattcactaaattatatttgatatcagtgctttgagaatgatgtatatgtttgtttataaccgaaatgaatatcttagatatgcttactaggatatttgtgtcaagtgtgatggttttgttctggtttagaaagtttatggtttggttattatcatttttttagtatcggaactactttagaattagattctgatgttgcgtacacacttcaagatttgaagtaggagtctaggagtttggatgatgcgagaacttaaaaaatcatatctacttgtcaaactttatgtgggtcctttttggaagatgcttgtgtttatttttagaaccagaatactttgttttcaagtattggccttttctgggattggttgcgtgtaagaaaatattccttatatggctaaggtgttttgcttcttgtctttttttaggcttctgaagtcaactcaaaactagttgctcttagatgcatggagaaaacttaatgaaactgataatgagttgtataatattgtgcttggtaatgccaattagttatgaagaggaagcaaaaaaagatgtcacctgtttatgtgacatcttttttatccagactttgtttatgtgatactgacattaaatttagaactattttatttcttaaaagctttgtttcaattttgcatagaccctggtaagtaaataatttaataagagttacctctgtctccgtttgtctaaattgaccttatttccaattttattttatttcatagacgtcacggtatcatattattactctcttagtagttagaaatgcttgtaggtttacactgttgtagtaagttatttatatcatgtccaatcttgatttcaatgttataaaagagtgatgttattggaatttatgagacctaggtatatgttagctaattctaatggaactaagcacataatattatcaccatttttcaggtgaatggaatacaagttcgcttggtacaaattttatgcctcatatcataactgtcaatgctggcgaggtatatattcctagaagacaaataacttttctcatttgtcatatttataaacacttcttaaaggcatttatttttgtgtaagttattcacatttagactgatatcagttgcatcattgaagtctttagagtgaggaaatcttatgctatgttgttattatttgatattacatagccccttttcaatttaatggccaaaacgtggctgtttcatgtgctttcaattccctaatgttttgctttgcatttctgatattgataatgatttttattttcttctttattattaggatgtcacaatgaaggttatatcattttctcaacaaggacctcgagctatttgcatcctatcagctaatggagtaatttcaaatgttacattgcgccaactggattcatctgggggtactttaacatacgaggtatggtaatgttccttccaatttagaatgccttgtttttgctttgttttgcacaagcttcattcaactttcaacagcgatattgaatgtaatgtgtcaaatgttttcatgtcatgtaaatgattatatttgtctgtatgacaattgacaaatagataagttgtcataacgccaacacaaagacatgcagacactgggatatcttggcatgtctctgtgtagtattttatggaagttggtggttaacacatgcaagtgtgaattgtaagtaactatgtcgtatttaacaataacttttgttctcttctggggaaacaagttacagttatatttggtttctccaaaggcatcacaagagcgttttgttttaatattattagccataacaacaggttttctttaattccttgatcatataattttgataaaagtttccaattttatagtaattctgttagtttgaatattatttgctggagaacttgataggaattggctattttgacccaataagtcttcaaaaacaagagtgtgtccatccatgaaattggttatctttatccgatgttctattttgttgctaagagcctaagcttatcatttctttcttacagggtcgttttgagatactatctctatctggatcattcatgccgactgagagtcaaggaacaaggagcagatcaggtgggatgagcgtatctttagccagcccggatggtcgtgttgttgggggaagtgttgctggactactagtggctgctagtcctgtgcaggtaaatgattccattcttcatgttctttgggatagtacacttacgcagtaagccaagtactagcaagaacgcaattaagatgaaatcttgaccctcaatttatttctctctatttttgacatgtgagcaataatctgaagaagacttaccctggttttatctctgagcatatcaggttgtggttggcagttttctaccaagcacccaacaccaagatcaaaagctgaaaaagcataaggacttatcgcctgggagtgtagcaccagcagcaaccatagctgctgcaatgcctgtttccaatgccgaaaaagaagatggcatgagtgcgcatggacatcaaaactcgggtgccctgagaccaaatcttggttcttcgtctcctttccagagagaaaactggcctgccatgaattccatgcaggattcaagaaattcggctactgatataaacatctctttgcctggaggttaaacttagacaaatgatctcaagcagccctgaccgacattgattcttgatattgttctgaattgagtctctctgccctcatctctacattgccttaaaaagtacttatggagcaccaccaccacaggttgaagtaaggggtagtagttttccacctctcattagggtttatacacttgatttatctggtaggatatctgatttgtaggctcatttagtagctctttagctgttataatcagaatttatggatgtaaggacaatttatttctttttacgtctgaattatttatttgcccattggtgacaatttttaaacttttaagtttgtccgtgactggagctggcttcattatccctcccaaagtactaattttatgattaaaaaagaaatacttgttaataaaattaacaaaagttaaccaggcaaaacttttgctttgaaaaagagcaattataattagtattttaaaatgttaatccaacaattgaataaatcgagcttatgcagtatgaagcaagtattgtatctttgctactgaagcaaatatccaacaattttagctactaccgtgggtgtttgttactaaaagtctatgcggccaaatactagtggtgccaaatcgctagtgtcatatcgctagatcccaacacttcccaaacaagagttttcctttaagtgcacccacataccaacacttcccccaatgcctccttagtagaggagtggacttcacttcctaaagtgaagaccaggtgggaggctgttggtgtctgctgctaaagtagaagccactcgacaaggactggtgttgtgtttgaggttgaggtagatggattttacattattctcggattgtgctaatgccattcaatctctaaacaatgagatgtttatgcattctcatctgggagtcttgacaattgaaagtaaaagcatcaaacaatgtttgggagaggtttattttgaacaattcactagaaagctgaacgtggaggcgcatatacgcttgcaaagaaagcattatcttttgataataccttgataaatctcagacataaattcgagtaagaagatttgaatatgacacgatgaacaactcttaagaattcagggagtaatttaatactgtcataataatttgtgtttgcaataacagatatattgtgccacataatgtgaaaccttctttcttggtgacactaaccaattagcaacgatagctgatatagatttttatatatatagtaattagattaaatgctgattttca

SEQ ID NO: 20997 - DNA, 4744 bp, Cannabis sativa
  modified_base (1331)..(1331): a, c, t, g, unknown or other
aagctcctttgcataatttaatgttctgattctgttgccagttctctttgctgaacaggtatctaagatggaacatattctacctatctgggcatcttcatggagatcaaaatgttcaaacctactacatatgcaaatacgcttaggggtgagggtctctgcaatgagtcacccagaactgtgagtttttaaagttttttttttttttactccaatatttttaattcctcaaggtattaggaaagtcctctgcatcttaaaatttctctgtggttccctctactattggagcatttcacattctagataagaggaaatatgttgtcttaatttgcagcacaaacacaaatataatttccttgtgctgcaacttaataagttgattctagcctcataatgtgaaactacagcactgtcagtctgactgaaaattcaatttaatatttttactaggactgacctgttgcgtaatgccggttcacactatagaaaaggttagttctacttttttttttaacaaaagggatttcaacctctaatctctggctgattttagctctcattattgctcttttcagcgaagtacgtactagtggaaaggaatggaattatcagtgttattttgcataaggattctacttctgaagatgtcttgcagtcttttgttcatgcttatgtgatggcaactctaattggtaaaaccagttccattcatacagaaagccaatcatggattgatgcagagtatatactctttcttcagaaggtatattgaacttgtttctttttcactgaattttcatatttatcaatcgaacagttgtatgattagcaaacataacataaaaagtcaactaagtacttcacacccttattcatcaacttcaagtttttgaccaagtcattggaagagctcatttcactcttgctttcagcagaccagttgtcctcattgctacaaaacatcaatcatcccttatcttaaaccagattggggtttcctactttttcttctaagaggacttgaagaaacaaactttatacacacacacatatatatatatatataatttcatctgtgacaaaaattatatagttttctatcacaaaagaaagcttcttttttatttttctcattatttcttcttttttgtgctgcagctgaagttaacaggttggaaaacagagcgccttctgtctccctatatcagttggagggcaaattggagctctgggtctttagatgagaagctggattaaccaacatatctagtgcattgaattgagctctgaaccattttatactgattatataaatacatatatatatntatatatatatatattatgtatgaagttacacatagctcaagctgccttgaacttattttataatattgtaacagaataagactattgctcacattcacaacgacactgttagacagtttaacaccatgatgttttcttatctaggagttccttcttattttagaacaagggctttaatcgaaatggcaaaattttggctcttttgagtagcaactagatttaaaggtctttaatatgttgattgatgtgctgcctaatgtaggaaaatctgtactaatgtaaaagctattacatcgacgtccaagtgaagaaaaagaggtatagactaaaataaaattttcaaatccatgtactataactagtttagtttattttcttgtgggtggatattacaccttacgtttcttatttttacttagcatattacacgattctaaaattgagcttcaaaaacagaactcaacaataagagaaacaaagtaagctcgcagaaaccttccttcttgtatacacagttgtttgcttgctaatgttaatgctggcaaaattatacatatttgcagccagtttactcatgtaattaaacatctttcaccaaagaccaatagggaaagcttttgcaggcatcttgatgaaaaagtgaaaacatgtttatatattaatgctttaacacccccaacccacaaaaaacaataatatttaaaagaaaaaaaactatgtaggtaattgcatcttattttcgatgcccagatgatgccataagaacagcaacagctgcaataaacataaacaacatgctgagaagcagtatatacgttcttcttgatgattttctgtactctccaaacagaagaattccccaaaaagtgctcactagtggaagtgcctgcccataaccaccccaaaaaaagtccatattagtaatgtgatgcatcctaattctgttcaaattttgcacaaacaagtttatcccacaaagaaaatatgttaggaatcaagttacaaaggatgtatttgaattttgaaccaacctgaacggcatctgctgcagcataccctgcagcttgccctcccatgaattggagaccattgccaaacccgcagagaagaccggccagtaaggcccagcctctgccattccaatcattcacgtaagccttgaaagatgatctaggtaagtccagcacagggtagtaaaggaaggtgatgtttaggatgattgcaatgacaaaacatgataccgagaagtaaaagaaggcagtgtagacaaccaagtgaggaaccctgtctttcaatgtatgccattgatcgtttgttgccaggttaaatgctggtgaaaagagagaaaagcaaacaccagcaaagaaacatatggccagtccaattgatgtgtttctcccaaacacctgcattgtcgttaagaatctcaaacatttggatttgtatgtaatgaacatctaacatctcaaaagaaagcattttctaacaaaagaactgaaactaccaactttgattgatctttttctctcaagctgcataagaaactctgcagttccaactttagccttctcggaagagacactgccatcttctagatcttctgacccaactgatgtccagtgttgacaaaaaaaaaaagtcaataactactaccagtttataaatataaatcacattagagctccactgtaattcttacccttatcttgcaatgttgacatctgtaaatttctgtcaaaagtattaaatttaggaaagcatcagcctatactctataatagaaaaaacaaaatatacacaattctactattccgcagttattgtttttgcaacacgtataatatttctcttttcagtgagttttattggctttccaaatatttattaatttgcatagcaccatcttttgtagagtcacctatattttctggtttctcaggctcaccataaaaatatttacatataaattggaccacagccaccctataatattgatgctgttcttagagcaacatacccttctttctgatcagatgacaaacttccaagctttgcttcattatcagctgcattggatgagtgaacagcagatgcaagacaaactgcaatcaagaagcatccaacgccggggaaaaggatctcagctctgttaatttggtcgtctaaaaagtagttcatggttgttcctgttgttgccaccaaaatcaaaagcagaaaccatttttcagtatatagctgataaagtgaaagaggtgtcaacaaaaacaaacgtcactatttcaaggctgtctgataaaagagtgagggaacctataacaactgttatgcttgaagtgatcacttctgtaacagacaaaccaacaaaagcccaagcatactgagttgagagatttcccaggctaaggaccactcctcctaacattgcaaataacacagagggccaattttcctacatcaataagcgtatatgaatcagaagcagttacatgattcataactaaatgtcataaatatgtacatgggaaactcacctgagagagctgaattagaaagttgggcatctcaggtgtgctgtttccaatttcaccaaatgtaaatgctataattacagcagccaagagattagtgattgaataatcaagataggtgtgttgaggcaacttgcctcttctctctagaagggtcaagatagcaggccatgtccctaagaagaggagagctagaagcatgcaagctatggcacctcctttgctctccaccacatacatattttagtgcactttgtgaaaattcccagttggtgaagtagtactcaacaaaacaatatcagaaagatcctgtaaagaagactctccactaatttttgaaagtaaaagaaagataaggaaaaatgaaaagagagggatcagtatataagacctgagactaactccaagttcataaaactggtgaatcatcagaagacaaacatgccttaatagaaagagggaaaaaaaatcttttaccaaattagaatatcagtagtcagtagcctttatcaaccacccatgaaaaggttaagtcaaaaacaaaaacagttcgtagacagaatcctttgaaaggaagattataaatgaaatacatgaacatttcttaattagaattttcaactcttcttactaaattaatttaactataaatattaattttaaaatattaaactattaaattttaatctaataacaaatattaaaagagacatttaaatttttataattaatttaattacttaattttaaaatattttttttttacaatatataaaaaaatatgtatataaataaaatatttaagtgaaactcaatttttgttcttaaatttttttttaactcaaatttttttaatactaatatcatttatatatttactcatg

SEQ ID NO: 20998 - DNA, 3515 bp, Cannabis sativa
aaaaattctgtgtaacagtatttttgtaaaagttaactcaaattctagtatttttgtaagtttccctataaaaatcctaggcaagaaaacaagttgtccttacaagagttgggccatataagatccataaattaggtccaagagaaacccataatgttaagaagcccaaaataaggtttcctacaatagtggcacgtgaagaagagagtcaactagacataatttatggaggcgcgtctgcaccacggataagaaacatcacgtgggaagtaacgttcgtgtgtcagtcagataaaaaacattaaacaaatctaagccaaactgccaaagtaagttcgaatcaacagtcttcttcgtatttaacaaatagatatttcatctaataaaaaaacaaaacttaataacaattaacaacaaacattttttttatacaaagaacaataatttttaatactaataacaaacaatcagatttcccctttttctgattaatgacatcaaaaatattatactactaataattatttatttttttattaaagctttcatggaattgtaggactaaaagctttacattccatcaacgatttttgatcatcaccttggcaaaagaagaacaagtcaggacaccggaacaagcagtttccagtgagctccacattagctgaaccgggtttcagtcccattaatgggccgggtatgggcccaaacaagtaattccggcccaataagagtctctcaaatggggaaacccctgtttctggtaaaaccgttttaatggcgtactgagtcggaatcattccgctgaacttgttattctccaacgacagagctgacagtttcggcattattgcaaaaaacgacggtaaaaagccctgaatttgattgtcgtttaagtccagagctatgagatcgccgtaagattcaggggactgtacggacgacaattggttgaacgaaagagttaactgttgaagcgatgggtggttgaagagaatggaaggtactgacccactcaatcggttgtgactcaaatccattacctgtaaaaatcttaactttttaatctctccaggaatcgaaccttctaagctgttgttccttaatgagatttccaccagagatggtggtagattgcccggaactttaccagaaatgttattgttgcttgcgtctaaaaagattagattttcaagtgaacccatatcgggaaattcgccggagaatttgtttgactgaatttccagtctttttaagctcacgagattgtttaagcttgctgggatttttccctgaagttggttgttgtcgagtgagagttcctcgagattagagagtgattcgccgatggaagatgggatttcgccggagaacgagttggtggagagaccgagtcgttggagacgagtcaagttagagagcgagttgggtattgagccggaaaagaagttgtttgaaaggtcgaggatttgtaggtaagggaggttgaatgagattgaagtgagtgaaccggagtaaccagcttggtcgagactgagttcggtgagtcgactcgttcctgactcgtcagtgaaatcgcacctgaaaccacaagtgaatcgttcgctgaaaaggttgtcacatgggtcgaaggtgaaatcccacgagttaacacacgagcctggactcactgagttaggatctaactcattctttagttgtttgagtactgttatgtctccccaatctgtctttgattctcctctaagtgacagtcttgtgattgtaatcacaagaatcagattacaaacaacaaagaaaatgcatgaacccatttgtgttttgttattatttccactattgtttttggattttgatgactttaaaggaaacccagttgatcagagccgttggatttgtttaaaaatgagaaagagaagaataaagatgatgacattggtaggagaagaagatatatattcagattgagtagtagtagctgtgtctttattatgatgcttttaatgtcagagatttttatttatttatttatttgtttatattttatgagtggcttcacgggaaggtgtcagaagaagtagctttttttaagtaaaggtttacaaatccatgatccatatttggttgtattctaatgaaactcgggaatttggagctataaaagatgtgaaggttgctatcttatgtactatttgcttgtcctaaagtttatacttacaaattttttaactaaatactagattaagtagtttactagtgtttttgttaacaaatctgattaaaaaaatttataaataggatttttgtaactaattttgaaatatctcagcttttgtttatgtattaaattgtactctcaaattttattattttaaattatattatttaaaattttgatatgtattaaattattatttttttaaaaatttttatatacttttcattgaattaaacaatttcaatagtttaatgagaattttcaatagcctaaaaattttaaaaaaaatataatttagtatatactaaaatttaaaggtgggaattctaattaaccatattatagtattttagtacgtgttttgtcattactcaataccaaaagagaaaaaaataattgatacaaaaaaaaaaaaaaaagaaaacaacattacttaagaaaaacagaacttgatttggattatgatatatagtgaggtgtgtttgatgtagtaacttgactcccgttgagtgttgttgattcgttatttttaattgtgagccatgttaaaccattaaatgaaatgaaatgaattgattattagtttaatttaattaattgttttgattgtgagaagatctgagtcctttgggattgaagatagtactgattcatccaatgtgagagaaagagaaagaaagtaatgtaattgtgaagcagagcagggtttagttgggaagagagcacactttgtcttttgtccttttgttttttatttgctctctaaactcagattcttttccttttcttattttttattttcatttgtgaatgaagacacctccttttcttttaccactaacttcacaattcaataaacactacttttattgaaataaggttatgagttgaaaactcaaaacataattatttgatgaactgaaaatcataatgagtactgaaaatcataatgagtagtgtagagtggtgatgaagaaaacaattaaaacccacatatattatgcactagttggaaattaaaaaagaaaattttggtggggatttcactgtttctttctttttttctttcactgaaaaaagtgacaattaggtaggagttctagctaaacatttatttatgtataacaaaaaatgtatataatagcttataatataatgcatcaaagtacaaaatattaagactaggagatgttaatgagacaagatgtctagcatccaagtatatttgaatctcaatttttaatttttccacatccctattgaattggttgcaaagaagatgcatgtttctatcatg

SEQ ID NO: 20999 - DNA, 2799 bp, Cannabis sativa
ccagctcaaaaaactcatttttctaggcgggtgtgctcagcatcacccgcctgttcagcagcatccgaagacagagattcaacaaactcagcatcccccgctcgagcacgcttgagcatagacctcatggaacctcccacagcggcttgagaaggcttgaaacaaggtcgtttaacacctgaagcacaagcaaggcccttacctttgacagtggagtcctgtccaggagcttctgcttgaaaaacagaagtagcagctgcagtacgaccaaggaccaatgagggcaaagcatcagcaagagaacgggcagctttaacaagatcaggattaggggaagataggttgtcacgcacaatgatagagttagtagaaacagaattgaaactctgagtatacatctgaggaagagagctaggaccatcctgactcatcaaaccaccactagtcatggagggattagtggtgacaacagcagaaggagtagtaacagtcacagggttaaaagaaccaccaactagaccctggttaggatttactggagtagggatcatagcacttgcaaagctccttagagcacttaagcaagaaacagaagccagatgagaattaagaagaggtgtgaattccatagagtaagtgaaataaggattcacaacttgacccccttgaggaaaatcagagatatcaacatcgacaatagtaatagctggggcatgaggatactggaatggcaacggtttctcagacaacttctctttaccacgaataagaagatcataaggacaaggtggtggcacaagagactcatcacacttttgcaaataagcatgacagtattttttagtatgatcaagcttgccacaatagaaacaaaagtctgacaatctttcatacctaaaatctagccacttagtaaactccctacccatcccaacgaaacgaatatgaatgccacgccgaattggtttgttgacatctaacaaaaacggaccctcaagtaaggaccagtgccatctttgacagtagtactgttagcttgaatgaggtccccaacccctgtggcaataagtttggccaactcatacgacttacacctaaaaggaataccatatatttggacccaaaaagaaacatagtgtaattgatccggggtaataggaaaagaggaatcaggggtagcgaaaattttcagactttgggcaaaatgccatggctggccatctagaatcctacgtttaacaccttcacacccaaaggtgacaagaaaaagaccctctgaatgatcagacaccacgactgggaatcgacactgggaagtccatatctgggatagggttttgatcaaagataaacgactaaagtgtttaacagtacaaagcttaagaaggagagtaatgtcattaggggtctcagatgggaggtcatcaagagtataaaccatattttcatcagatgttaatgtcagaggctgacgacgaggattgaaacttaggtcttccattttcaaacacacactatgaacaagactacttagacaagtaaacaaggagagaacagataagcaaaaatgtaacctaaatcttactttatatagaaaaaataccaggctacggaagataattctcgggaagtttctgatcatagcctctattgaagatatgctagccatcataacgattccaatctcccaagcttcatcataacaaatccatctcttggccgccatgcttagagagagtagaggatttgtgaactggctgttgatttgatagtcggatttgctaaagggaaaaattaaattaaagggtaagcaaaatgactttggggggttttgaaagggtaataagcatttaattgggttgaaaaaaacatctgagctgagatttggagtataatctttgtcaaagcaataaatgccccaattaatgcaagaaagagaaggttgacaaaggaagaagagggatcgatgcccagcgccaccacataacccgtatgggtggactagaaacccatttcgggtaccaatcgaagacgggagaacatacctcctgaagagtctagagagaaccattcaacataaattagtatgttgtaaaaactaagtttacaagattaaaatatgtaattgcctttattatacgtaagagtacaggtcacacaataatataattaaatttcacgttaaactcaaatttgaaaagtttaacgcgattaagtagtgtatattaataaacaaacataaatatatgaacatgaaattatatattactcttaataaatgataaaatgacaaatttaacctgtttaattattttttttatttatgtggccaaatagatattaaagaaatcaaaaatgtgatttgaaaaaaaaaataaaaaatgttaatggatcatgtatactaaaataacattatgacatgtttaaataattatgttgtgtcacaaatttacctatttataactgtttcatgatcgtgtttacattttataaaatgctatttaattgtgtcatgctaaaattatgttgacccaaactacaaatcatcaatatcaatcaatatcaatatcaatatcattatcaaaatatatatatatatatatataaatataaaggaaggtttttaagagttgaggtggcttcatctccttctattttcctactttctctaatttatagtttttctcatttttaaattttgtaaactatttttactaatttaattttatctttaattcaattcaataaaaagaattcaaaagacatactatttaatatttattatttatgttatattaa

SEQ ID NO: 21000 - DNA, 3203 bp, Cannabis sativa
gttcttagcttctcaagaagctatcgctcttcctctttttttttattgaatgaagcgtatttgattaaacaacaagctaaacctcgcggtcattatataaatggtggatagcggaatatcaccaaccaacttgtgggaaaaggcccacttagccacattatggacaacaaaattacaagtcctgcttatattagagaaaatacaactaaaaaaataagaagagtgattgttacaaaatgagccataattactaatgacccaacgggactccttcccattgagtgcatttataactaccctcaaaactagtaaagttgcatcaaaaggtgaaaatcagttttttttcaactcacttaggtttcatttagttggccatattagatggtactacattaaattgagttttatattatatttttatgtaatcttatattaaatttttatttatatcaaaatatagaatatttatatgttcatacaatttaatactaaacatagtaatttcttcaaaaaaaatatactaaacgtagtaatataaagcataatatcaatataatattatacaatacaaaataacatatacatatagcttaggtacgtggacaacatatgctccattcaaaattatgatccgttttcatgtatatataaatatccaattcctgtacctatgaaagaaaatggaagctagctagactgtagaagagaatcctatttttcaattgtaatttaggacgtcctctgccaatggcttaagctttgctagttgctatttgttgttgcgggttgtaatgttgtgttagtcggaaaacaatgtcagataaagatttacacacatgttatatacatactcacaatacaaatacacttcaaaagctatggatgtataaccttgtattgtactacatattagatttcagatatcatcacgaggatgatgcagaggaatacttttgtatagtggtaatgattcggtctgcggtttcaggtccaaacaaacgaggcaaactcgaagccaagtcgatctcaattgttttgctcctcaccaacaaatccctcttttgaaggtactctctctcattctcatcaacttcatctccattctcaacaacagcacatgtatccagccaagtttcaagcacttgcttagcaacaacaccaacatggtcttgtataatctcctccattctttccactgaatcagattcgattctggctgtgatcacagtaggagacacgaatgctctgatgtaaagagatggagaaaagtaaggcttgaattcagggactttctcaagtacttgtctttgagcttccaagttggtgtcttcatagtactttttgaggtaatctggatagagggcaaggtcccttcgaggtggaatatcgaggatgaggactagggatgtagggctgctacgaatgatgtccatgaagaagtttggtgagtctgttgatgattttagataggttgagagacttgttatgttcaatgctcctccagttggtagctgacagtgaatccagcttcctaatatgaaatcaatcttgtaccaaaatacaataccaaatattgtgagttaaaaagtatgtgctgctaatatagaacgtcaaaatgtaaactcaatagcaagaaagaaacgcatcatgaattctaaagaccctttaccaaaaagatcaaaaattgagaatgtccttgtataatctattcaagtgtacacaaaacatagaaatacaatccaatatcatgttctattgacccttttaataaaaacagaacttaaaaaagtacataatctattttccaagtctgcatttcagacccttaaaagttgcacaatcctacaacaatgtccaaatgaaatctaaacagcaagaaacacaatataattaattaaatgcttcttagaattttttttccattaacttttcaggcccttaaaagttacctaaaaactattgaaatttttgaagtcaactatcatccaattctgttgaattttactaaagatgcctaatagtacttgtctctattgtggatattctttcacatcaaatatacagtagagtattgagtcatatataagaacatactacttcacttatcaccaattagttttaagatgaaacgccatcattctcaacatgataacagagctatatcacttgcggacaaataatcttatccgatctgcatctatacagatagtgaccatatccacgttagtgagcaaaaaaatagccaccatctaaaaagagaatattgtggatattgtctcacatcgaacaaatggtagtgtattgaatcataagaacatggcgtactccattgtcaccaattggttttaagatataacttcagaattctcaacagtccctgtaccatttgctcccaaacttttacatataccaaaatcatgcctcctaaattttgccaaccaaatcatggtaaattgaattgaagtttttgaatcaaacaatttcaataggcttaattaaataaaacaaaacagaaattgagaaggtccttaatatatccaagtctaaattttctacaccataaagtgcactatttagttcactgcaactaaacaatttgagaattaaataaaaaaaaaaacccattaaaagaattaaatgcaaatatgattatatgggtaaaactagaaatggattgtcttcaaaaaccagtttagaaaagtatgagaaaaagagagtagtagtaagtaccggagaggatgggtggccagatctgatgtgaagggaggcatgagaagtatcactctggttctgatagtactgcacatcaggtgggagagtacagggaaggagctgggaatcaagacgagtttctaccatggacacaagatccaccatcagcttcttatgtgaggacgacacatacggaaattctataaatttacgtcgtctttcattgttgtcaagctccatccgaaacggtgtcgtgaaggctgagactgaaactgaatttgatggaggtcttgtgagactcgatgactgtaaagaagcagtaagaaacgaagaagaagagaggggagagctcaaaccatgagagaagacgacagccattcattcctttcttcttttttcgccaacccaaaacttcttaaacgccataaaacgcaccgtttcgtttcgctaagcaagtcgtgactaaaaaaaggcctcaaaagagagattat

SEQ ID NO: 21001 - DNA, 4034 bp, Cannabis sativa
cttgtagagagcagatagtcagaaaactcacctacaagatagtcttcaacatctagaccaaactctgaactgttcactgaatacatagcaatgtagcataataagattaccagcaacaagacataagcaatcaagtcacaactgaccataaaagtacttaattatagaaaatataacatacagcccagtttttcctcagcttcagtatgcaatagaagatttcctgtctctaaccaatgcataaaagcaagaagtgaagccacagtctgtgtctcacccctccaatcaccatgatacctgcaaataaccaacaccacatagaaatcatataaatatatatatatatgtatataagtagaacctttatttaaaaatctattcaagaataataaaaaataaatatagtttataaatttatttatgtataaatatcatatttactcaaaaaaaaaaaatagctttattttgatacaatattaagaattatttattgttattgttgctaccttttggtattttgatttttttttcctttagtgtattcttagattctactgtatataaaccgaattgtattgactgcattacctgtaatattgagaggggcattcactaagaatttgagcgagttgattgtatagccccttcaacacagcaatctgagcttttggcctctccaagacctctacctcaacataatacaattagtgattataattaaaaggctatatcaatacacacacataaatgcagaagttgtatgtaccaggagtggagcgagactggtgaacaaggagaagaccggcttgcatgagcctggcggtggactcaatttccattacaacagctcgtatgcgctctctcaagcttcctgactcctcaagctgaacccgaaaaccctcgaactgcttctccagcgaaggagcatgtgattcacctccctccatagttgtggagcagcagagagtgcggcgaaacgttccggcgagtactgtgggagccgaacggatcgcaagaggagggaatgggattttaggagtagggtttaagaagaagcggcaagaagttgagaaggtaaggaaagcgttccgaaacgccagtttcatattcttttattacatgtcgactcggctgggcgcacttctgtttattgtatgttttcttttcatttactaattacatattaaaaaaaaaaattacataaaaccatttaaaatctgacttttttttcatatattttttatagattatattattattttttttacaattttttcactttttttttttagaaaatgaaaaatttggagtatttgtttgattggagaaaaataagtaaacttactcaactcaacaaaaaaaaaaatcaaccactccttatataacatactatttgatgaggtggttaattcctattatcaactaggaaataaatagttttaataattttttaaaattgtatattaaaagtttaatttattaattataaataaaacttcaaatctaatactttaaattaatttagaaataatataaaaattatataatatgtgtatatgatttatatatatatatgattatcacaaatattattcgtgataaaaataaaactgcatctcgtatgaagttatttataattgttgatcgaagttttcggtaattattaattagagtcgtttatagtaataaatagaaattatagaagaaatttttttacatgattagaacattaatgagtcttagtccatgagtcactgttattaataagtattttctcacatagaattctaaaagtctccttctttcatacatcagtggagtatttataggctcatattagtaataaaaatgccactattgtcatgtttgtatgaactcgtgcacaatttcccagattaaaacataggacatgattgcatgttctctatagtgtgtttaggcttattatcggcatttggtgagactagacttgtctcttgctaatgatttgatagctcataatgtagccgtcaaataatgtatggggtattatgaaattaagaaattatgggtttatagccttgatcatgttttttcagagtaaggtgtggggtgttcttccccatgccacattaaatgtgtgtacaatgatttgacctcaagtggcgcgccatgctctgcttgtcctcctatctcttctccgggtcgagttcactcgctgagagggagaaataaaattgttatccttctggtggaccctttcaaacatgactaataattcgtaatttttaccaattatccaactccgaaattgatttaatatggcatgccccgtagtgcgggtcccattgccatatggcttactcctgaactaccacgtatttcaagagaaatttcaggcaacatttatccccaagtcttatattgcaattttgtaaaatggggcttgaaacttacctcctggaatgctgacatcacattctcgtatgaaacacgtgtgatagtctttaatgttattcaatacttttttctcggggaaaaggtgatcgcggaaatcatcagaacaccaaccattagaagtgaagatcaattgtcgatctcttcacgaaaggattggtaaaggccctcatttttcttctcactcgcaaacagggaatgatcgatattcattctccagtttgaagggtaacatgtagaagttcttgtttgattcttcagtataataaaaaaaaaataacaatagaaatcgaatttatcttaagggtattacttttgacaactttgccctagccactggatcgttggagttttttcacaagtttgaagtgagatcgtcgaatgagtgacgacccgagtcacccttgttggtctataaaagtcctttatctccctctttttcaaattttcgccgtcacacttctttatacatcaaaccaaccaaaattctaggcactttagattttcatttgctctttctccgaggtgtcaagcttagttttatcgtgtcgtgcaccagtacttgtaaccacccaggcttcttctctttgtaagtcgcttgccatatgcatttctttattattgtttttatgatatttttgcataaatacaatatttatacagtatggcaatgatttgggtattatccccaaccttcttcagtttacttctttaggttggggcttccatgcctagggtttatagaactcaccatttcgctctcccttcgctccttgtatcatttcttcttgtgcatggtacaattagcacctgatgcttagaatacgaaattcccaatttatgaacatgctagcattcgaagggggcctcgtctcaaatgttaggagacccccattcctttctttgtttaaggttcgatatgggagctaactgctgagtagattcttatattttagatgagcgaagtcttttacacatttgactgacaaatttgggaactccatttcaagaccaagatgtcaaatcctatagttccgtcaaatcttcatctcaggcattggccccacaatatcctgtagtgcccttgttagtcgttatacaaggcccagtcccaattcctaattatgtccatcgggccaccagttgggaggccaatgatcaacaatcatctttgggatgcgctcaccatctacaaaaagttgtcgaggagaatgagattgtttaacacccaaatgtgacttccactagcaatggttgtagtatagatcgggtgatcgatttcacatggaggtgattatggacaaaagcgttagtagaaaaataaacacaaaaggttgataaaaagtaacaaataagtaaccaaatgagtttgaggatttttgttttggtaataaatattaaaagaaagcaaataaaggtgtaatcaatagtaaaagagggaaagacttcaagaatcatccatatgcttgtttagctattttgtacctttgattcacgaagttgacacaaatgatgtaacataaaagtacattataatttgagtatacaagttcttgaaaataaaagaaataatttaatcttatgtagaacctagaaat

SEQ ID NO: 21002 - DNA, 1641 bp, Cannabis sativa
  modified_base (43)..(50): a, c, t, g, unknown or other
  modified_base (937)..(937): a, c, t, g, unknown or other
atacaagtgagaaaatatatagttttctctctctctctctctnnnnnnnnctctctctctctctctcttttctaatattgaaggaataaaatggattttgttttggtttattttaatgcaagccaaatgtgttttttaagtttcttaagattgtcttcttctggctgactggctcacttggttgctctgtttttttccccttcttcgtctgatgcttatgagtgcttttattatattttatttttatgtcaggtaggcagtaaataaatatggatttctttcttcttctcttttatatgaattttcatgtttttcttttcgtcttctctttgatatgaattgtctcttccttcttgtgaacttattatatacaatttcccagttttcctaaccttaaaatgggtttgtgaaaaattagtttcattcctttttttttctttgataacgtgttgtataacatttttttatcagaaatataatttcccctccaacctttaaatttaaatgtttaattttattttatttttcttgagaaatttgttaaaaatcccatatttttccaattatgtgttcattgttagatttaccatatctttgatctcacacttgtagttattcttttcctttcttttgtttaaaacttttatttcttttcccatgttctctcttactactttaaaagatacaggatatcaataataattttttacatattaatatttagttattctttacacttttatgaatgttcattaatatatctattattttttttatattctctgtccaaaataattatatatagtattattatttatatgtgtgtggtaaataacactaaacaagtatcaccttttcttggtttagggaggtggagttataccttattctaaagtttatgcttttattctatcttttcttcttttttttttttttntttatttatttttattttttttgccattttcctttacaagttgttgaattcttgccttgttagcgtttggccaatagagagagaccaatgcaaagtatctacaaaaatttgtatgtgaacaagaagatgttccctctaataacgtctctatttgacttcttttgaaagaaaagcacctccaaaaaaaaattaatacaccattttcttggctaaaaatctagaaaaaatggtgggattgagccatttgttttttaaaaaaattgttaattaaactttagtttcttaagagtctctttattgcttcctttcatattttcttctttgttaactaatttaagacctgtttctttcttctttcttaatccagcttcttcactatatccttatgaatctggacagaaatacaaaagaatacccttgtgaatttggttttgatttgagcctgaaaaattcatagtctgaataaaaaaggagaatttttgggaagaatagagagagataatgggatgttctacatcaaagttggaagatgaagaagcagttcaactctgtaaagatagaaagagattcattaaacaagctgttgagcaaagagcaaagtttgcctcaggacacttggcttatattcaatctttgaaaagagtttcagctgctctacgtgattatattgaaggagaacataatgagcctcatgatttcttatt

SEQ ID NO: 21003 - DNA, 4901 bp, Cannabis sativa
atgatgatgtgatctctgattcagatgacactgtttcttccctgtcatcggaagagtcttttgagtccttcgtttctgcaagtatgggcgaccttgatagtccctcagatcttactgatcctgagagctagtattaaagcaattgaaaagcattataacatataactgagatgtttttctttctacagaaagtgaaatcatttcaggttcttcaagcagatataggaaaatcacttcattttcacatttggtgatcatcaatgccaatttattagagaaagtgtgtttgaaccgttgtttataataataatgattattttaaaaattatgatttcagtgcattccaatttccaactcaattcttttagacagagatgttccactaaaatgcttctattacaagagtcttggaaaccttgctcttgatttggttgttgtgggtcatctaagaaaacacgttacgagagaataatatgtggcgtgggagaattgatgaggtgtgtgtgattaataaaagtaaattatttattcaaatttatatataatttaataattttttaaatataactggactactgaaatatatataaatatatatataatatagtatatgttatttcaatttctgtgcatggtgatgttgctttaggtaagtgacacgtggagatcaatctaagacttggataagttgttggccttcgaatgctccatctagaggagtttacaattgcatctaagtatcttgcaaacatccagactaaaaatgcacatgatatttcgatgaggaagtcttttgaagatatttttcttaaatattttctcatttataactttttttttttgaaataatccttacatttatgagattagatttgaacaactgagaaatttagggatttaatatttgatttcttattatttttagtaacaatattcattgtacatctcatataaatattgaagccattccattactcaagaggaattttcgaacttttgagagtacttacctgctaaaatatttgtaagcttttatcaagatttttaaaaaattcatttgtccatctccttgtgatcttgataatttttgaagttatataaatttaaagaggagtaggctattaccataattacagtgatgaacctctataaaattctcgtgttcttattgcttattattactatcgtgttagtattatgcattatattattgcttaaagatctagtgtcgttagctaaaagtgatgtcaatatattagtgctttcattgagagctattgaacacgatttgtcacgaagtttagatcatctaccgatggttttgacgagaaggtcacaatccaccgaaccagtcgatccaatggtgacagatcctaatgtgcaagttcccactaatcaaagagatccaatgacgatgaatcctaatctgaatgtccgactgcctccacgatctccgccaccagcaaaacttggagtgacaacccctctggctggatttatgcatggcacgtaggaaaatggtaatacaagctaggcatatactggagaaaccagatcgggtaccggccaaccttcagtgggagaaccccaagtggatctaggggagagcattgatttggataccttgagggaatttgagggacaagtccaaactcatactattgtccacaacgatcaggaagaaacacgctttgtgatgaaccatgtgttttatcaacagagatgtcaattccaagagtggatgaacaaacagactaagtccatgcgcatccagtaggaagaaatcaaccgccgattaagggaggctatcgacatgatctaacggttccactagcaaactgggggcagatgctggagaatcctacactcaagagagaccttgctttggaaaaagattcttacatcccctctagaggacaacaatatggcccaaaggagcgctcaaccaactatttgcagacaccccaaactaagagacctgctaattccaaaccatggaatccaattgttggtaacttggaggatgaccaagtcctgcctagtcattaccttggaagaaatgatggtcataaatttcatccccagtttgacagaaggacaaatgataatcctccctgatcgattggaggaccccaaggagggcggatggcagtgtacaatcaaaatggacaagtccaaatttatagatagcctaagtacaccgacctactgccccgacagggacgatcaagttcatgcagtgattattctttcccaaagaataatgaagacagagctaatagtgagtgttgtgacaaccgtctccatgataatcgttgtgcccatgacggaattcaggaaaaccctccaagtgatactaattctcctggatcggcttggtctacgagccaaacatacaaaagaggtcctggaaattttgtctttgacaggatgggatcctgaactaacctccaagatgactttaatcagaggtgggaaaactaggacatacattttgttccccctgcccaataatcaaccaattaatgtggaaagctttattccataacatatggagaactttgtgcctttcgaagctctaaggggtcaataggtggcacaagtcggtcaacatgtaggtcaggttgatctaggggtacaagcccaaatggatcaacttaaaagcctaattgaaagcctgactgacccaatcctcatggacttggagctcgatcaaacaagaggatctcctttctctgctcggatcaatttcctagaccttccaaccaaattcaaaatccccacttcgaagatgcattgggaaaaggatatccattatctcatattaaatactttgtgatacaaatggatctacagacagtcaaaggtggcgtgcaatgtcgagttttcctagctaccttaacgaaggccacccagcagtggtacttcaatctagcactagaaaaattcaactcatgggatgcctttgcatcaaagttctatgcccaattctcctcttcaagaaaacttctcgtccacttagaagacctggtcgaggtaaaataggatcctagagaacccctaaaggactttgaacaatgactcttgaggacgaagagagtgggcaaagtggtattgtcctttggtctgaagtgatgtcagaagatgatggagttggttctggtgatgaggccaaaactgaaccttcaggccacactgaagcttatgtgcccaaggaagttgggggattagtaggttgctgatgcgccatagtcatgattaacttgattttatacttttgtatttttcttacgcactgaccattttttattttgctcagcaaataagatgagtttccttgctactatgcattcttgctccaagaggaaaaaacctggaacgaggattgataatccccccatttgagaggtcgtgcgaggcattcttgcaactccttttgatcctctgaagaagtccatcaattctacctgaaaataagagacaagagtctttggatgcttcctaaatcagctaagggattaaaaactgtgtgaaaggtctatagtgttggccgttgtaactacaaaattcaaagtaacctaacgagacagcccttaaaacagtctagcaagctagcataacatgagtaatgcttaaaggaaacatataaaagcataaagtcattataaacaaccccacggtgagggcctaattaaaattattttcgcaaaataagaacagagaagaggaggaaagacaaagtaaaagaatctacaggtcgtggtcttggagagggtcactaccttaactaattgctcaatctttaatcatctgagtcttaagtctggcatgctatgccaagaaagtacctacaagaacagttaatgcaggtttaaataaatcaactcaaacttaggccgaaacataaaaatcgctaaactgtggaaccacccaacccaattagaatcccacatggaaaccgcccatgaaaaacctgcaaaaattgggttgggttgagttttgacctgctctttggcgggcaagtacgagttcgcctaaaaggggcgggtccaacccatacctgccatttttttttatttaaatatataactaaagtctaaaacgaaaaagaaaaaacaaaaccctaaaacctaaaaccaaacctttgtctgaacctaaagttacaaccgctcaactcgtcctcttcttctcatctcctattgtcgacctatcaccaatcatcgcccaatctccggtcgttaacccaccacctacctcgacttccttctctcttaatctgaccctttccacctcgatgggtcacttccagccagtgtagatagtcgcggaaagctattttgccgaaccttcatctagcctgagcgacgaagccacaactttggtccacttcgccggaccttcatctagccggagcgacaaccttcgaaagccacaccaccggtcgatctcttccactttcagtctggtattatttttatttatatatatatataaatatatatatgttatattgatatgtttttaatacaactacattgaacttttgttttatgtaatataatatatatattataatcattaatatagtattacaattatattgatataaagttcaattcttaaaatttttgtttttattatttttatttttgatcatgtttgttacaatttttgtgtatgaagtttattttatcatagtctaaaattaatttaattatttaggtggagttatggatattaatatagaaatacaagatgtagttttagaagataatgatatgcctaatattgaagtggaagaggaaaggggaaatgataaagaggaaatgagaaatgagaaaaataagaagcctaaggggaagttagatatttgacaattttttactagaattgtgggtggt

SEQ ID NO: 21004 - DNA, 4305 bp, Cannabis sativa
ttgggttcttaatcgtgggtagaacttggacattcgggtccatagacattggatctttggattcagttgacacacttctccttgtcagaaccatggtgattattaggtgcggaaggatgagatcttcattagagtttgaagctttcaatgaaaaaaccaaaatgttgtttggagaattggcaaactgactcgaatttcaataaattctaattaattaccaataaaaacttagaaatactaagtaaaagaacaacaaaaattatagaggttcagccctttaaatatttgtaatgacctactccctttaattgtattgatattgagataatgtcgtgcagattactaaggaagacaaagtgaattctagctacagctctcaagattcttacaaataatattgttcacaaaagtgctcttggagtcgagattatgatttcaagtccttgttccttgtgaatatgctcactatttataagatgtagggaagcacatttaaatatttgaaagataactaatacataaaatccctctttttttaggggagttatattctatttgaaactcctatacttttggactgaagagtttcagtatttgtaggatgatattggagatatttgcagagtttgttgaagaaaaaatcaaggcatgttaagtcctacccaacctttctgggaccctttacccctactggcgtgccgatagctagaccaggctctctttgagacttgactttttgatgagattacctaatgaagcaatcttgtaaggttcgtagatattttccctcctgaccatcagattggtaatccaaccaggtccatctaggaaggtaatatacatttgattgatatcagccttctgtgggaactgcccaacattctcctacccataaatctcacattgttacaagtgtctactaaattaggccatgtgtgattgccacattggattggtgaaagttgggataacacaaggtgactatttataacacgaaaccacgatctggggcattaaacgatcctacggtgttcctcattttggaagatgcacaacttaaatatgatggctgggagaactcgcaaacaagcacattttgaggtgacatttgggtactcgagtatccgcctgtcaccctacatttatggcattataatgattaagggcaagaaaaccaatcgacatcattaaaattgaggtgaaaagtgttcggtaaattttgatacgcaagtatacacaatcaaaacaagtagtataatgatacgtaaggtatcgttcccacgagaattgattattaaataccaattaattaattctttagttctatttgatgaataataatttttggataaaaggtaaagaaaataaacaataacaaaattttagaaaaataacaataataaaaacaatgaaggattattatgatccccaactatcctttattttatttcataatgtaattacctactttctcttcttcctattaaattgataagttgagttaagaagtttataatttggttaagacttataaacccaatctatgtgaaaactttctatatttctatggtaattttaatcatacaaatagcattaaacatagcaactaataaaatcatacaaacaacctaggtatttttgtcctaaatcaatttgcatccatatcaatcagagcatattcaaatctcaccattcagaattttgacttgaatttataaataacaattaaagttgatcagtcaataattataaaaattaaaacagattgaatggaaattgaaaaaagagaagaagtagaagttgaataaatcacatcaattcataaaataaactcaagtggttcacataataatccttaaaagaacttaaccactaaaatacattctaaaataaataaaatttattgacaaacataaatgatagagatggaagtggaagaacattgtttggagtccttcaccggtgctttctactccttactctccttctacactcagaatcctctcaatttttgaatggtgttcaagctttgccatcagccccctttaagtagagccaacaattgaagtttcccattttattctcactaaggccacagccttgcttgcaatttcccattttctgtactaatttttgcagtttcccatttttaatttcctactgcaacgaccaaataaaaacaaaatccaagcataaatatgcacaataaaataatacaaatactaaaacacaccctattagactctaaagaaagcattaaaataaccttaacaaaaagacgttgattagactggctaactcttatataacacctagccaattcgagcggctaagaactcgacgtgcgataagaacgttatacttcatacccttcgagagcaatcgaagagtcaaataattaatacaagtcccacgtcaaaatcctttgacctgaaccttgggggtaaatgtaagacctattttttaccatatatgaaaccccatgtggcagagagagactcattcataggcatattagcatcccttgtcgatttaatccactcctagaatctacaagtgatgagagatccagaagtagccttccctttgctaaggaaaataatagaggaggcttctagttgtccaggaggtgccaagcccccagattacaggtcttccaggacagtgagcctaacatagtaacatagattccaaagcatattactatacatgaccataacaacacaagattagtatcattataaagccatacttgacccattcaccaaggaagagaaaaagttatggctatgcactgtcacatcaattgcatatgggacaaatcttgtctcaccaaacacttaccacggaggcttggcaacacttaaagactagaagttcacgcacctctttacctcctatcacctttcttttttaataccttgaagtacaataggaaagagggctttcggactcacacacaaaaagtgagcttttatattgtaacttgaacattctctaatcaagagaacattccaatcataaataaaaagtgactcgtggactacagttcattaacactggccccacgtaaaaatcctatctttatttttcttaatcatctttatgaacagttatttagtggttgtcaaaaatctcgatcaacaggcctcttttaacggtaatagtctactctcctttttgttgtattactaatgaaagaatattaagatcacaaggtccgaccatgtgagttttcttaatatctctagaaaggttacaaatattttcaaagtattttctctgttgtaagtccttaaaaggagaaagtccccctccatggtcaattgacctactatttatagagaaagtaatgcattaagtcctaaaataataggagaaagattagggtggatttgaatgtgaattctactatttcctcattttgttaaatcaaatttcatgaaaacagggattttatattggtcatatttttgtgggagtgattaaggaaagtatcttaaatatcttcagcgatttttctaattgccaaatcacattatgcaggtgaagtcttaaacttattcggatgttttagcattatcagtcgtgatcagtacaaagtaatgttatatttcgtccagagttaattttccttgccacgtgttaatttgcttagtgccacatcattactataaattttaaaataacaattacttaccatggtataatttaaagttcataaaagtcattcctttccttgtgtagatatgcctaattgatcaccaatcccgaatagacgaaccaacattcaaaatctgatacaaattctcaaaacaagagatcacttaccactaacggaatattgtgtaatagtcaggttcatttccatatataataataataatatttttttaaaaagaaaataatattaattataaatagaaactttaacagcgaattgttcattcaatttaaagacatgactcagtctccaaaacaagtaaacctaataagagaaagaaataacaataactaatataaagctcctcagacatttcattgtcaagataagcaacagttttattagcaaaactttaaccatctcagacaaaagagtgaactttgttgatttataaatcctcggaacacacataggtctaatatatacattggaattaattaacgagagtattgaataatagaactgagcttgatcagtactgtacacgtgtacatgaggaaaagggaagataaagtgatgagatgagcattgttattgggcactagtggtgtttggtaccactaatgccttttagcatttct

SEQ ID NO: 21005 - DNA, 3707 bp, Cannabis sativa
tttttataattactatcatagtagcatttgaagaaatatgccaaaaaaaagaaaatatttttatgcacaagtgattataaactactaaataatccttagcaatactttagagttaatgtatgtatgtagaggaagcatcacaataaactactaaaaaatccttaccaatatatgaaagcttaacatatgtatgtagaggaagcatcacaataaatttgtttctcaaattcagtagaagtaacagcagcaattgattacatgtaaatgctaaaaaatagaagtgcactaaaaaaatgacaaaccaaaataaatatatgaaacacaattaactaaccaacaatttcgttgaatcttatttttaaattagtacctcttttttaaccctcaaaaagatgacaacagccggaatttgccactccaaaatcaattaaataagcccaaaatgtcagcaattcaattgcatataaaatataaaacgggctacaatgtaaagtttttgggaaagaatccttaaatgttataaaactaaaaactaattatatagactcagtttcacgaagagagtactttctgaacttcagttgtgacctccttggggggtttctctgcaggaagattggccacaagtcccttatgggcgtagtagtcaataacctgaaatttcaattgcgaaatatcattacaaaaactaaagggaaaaaaaatgattctagattcagcagtgaaaatgtgaaattaatcggtaacatgttgaaatgaaactaaacaagcttaaattcaacaatatattgatcacaactgccttaacttatctcttgtaaaaaactcgacaaagaaggtgagaccaacagcgaaaaacatagttcttacaaagcccagaaataaaaaaaaaaaactttaaataatattaattgataactctctgccattgtgttgatttacaataaattagagaaaaaaaagtagagtagaaagcataccggttctgtttgcttgtgaaacgcctccaaccttgacttcagtacagctgctgtatcgtctttccgttgaatcaatggttctccagtgaccttgtacaagcaacagaaagagaaacacgtgtataagatagagaggattgatttataagatgacccgtttcttttaggaagtcagattggttagttagtcatctagcatcattctctgttcaatcaccatatatccctaagtaaatgataagacacttttattcacacaaataacaaacataaaacaaactgtaaagaaaaaaggattggcctacatcatcaacaccgaaagccttgggtggtgcaaacttagtgtgataggtccggccgctagaagggtgtatccaccgaccagtaatcctctcctccaaaaccgcatcatcaattgcaaagttaagaaccttatccactttggagccctgcttctccagcatctcatcgagctgaacacaacaagaaaccactacatggtcagaagcacataaactcacaaaattatacagcatttgatacaaaacaaatacaaaaaatccaaatgcttaacaatgtagaaccttctgtgcttggactacagtcctaggaaatccatccaaaatgaaacctttctggcatgaaggcttcttcattgcctcatcgatgatgccaacaaccaaatcatcagaaacaagctcaccctgaagcatagtttagcaacatttctattaggaaattgaagtgcagagaagcaaaaagccaatcaagctataaatataatgaaagtaaaacagcatatgcacgtaccttatccatagcctctttagcctttaccccaagaggagtcttcgcagccactgccgctctcaacatatcaccagtagccaagtgacataaacagtactcgtccttaataattggtgattgagtaccttttcccgagccaggtggacctgcaacacacattttttcaccattaaacatagtgaaccaccatgaaccattatatagtggaaatctgttaccagcattccattttacagttttcatgcatgaactttaaaaagatcaaacacccaactgaaaatcattgttaaaacctttccaactttccccataccttctgtttaaaacccatattttatgaggtaactattaacaaatttgagggattcattttcttttgaagaagaagaaaaaataagtgtagaaaacattagtgtaagcttagaggacttagaattgtcacaagaattttgtaaaactaataatttcttcaacaaaatacatgatccaaaaacatccttttgaattttctatgttctctgctactaaattcttctaggttctcgcaaaatttcatataggcaactaaaaaaaagccaaaaactatcaccctccaaaaaaattaaaaaatctaacttgaaacttctaacatagagaattttcggatctgaatacattttaaacatcaaaaacaaaacttgaagccttaaagtgaagaaacaatataaaagcataaaagggggattttgttaccgataagaatgaggcgcttgtctggcttggtagagcacttcatacgtcgaaggagctcggtcatgagatcaagtgaagggacgtcttccaagcctggggtggccatagctgaggtctggtctgtctctggttaagagttagggtttattatgggtatgggagaagaaaggaaagaaggtaaggttctttactatgttcggactctccaatgcttcaaaccaaaggcagcggtgtttaccagatttcatcaattgacgattatgccctcatttacattcgttactcaagggtatttaagtacgaataattcttttatagatccatcccttatttaatgggattttaaaaaaaaaaaattagcaaaagtttacaattttactatcatacgaaattttttataaaaatattatttttttataaaataattaaaataataatggaataaataaaaatcaatcattgaacaacagtgaaaacttaacacattacacagtatttttgaaaaaaaatttgtcctatagtgaaaaaaaagttaaattttaatatgtgatgtaacaatttcttattttattttaaagagatattgacggcaagaccacttgaactttaaattttttaacacttaatcacaaaatttatgttatactatttatccctccgtctaaaaatctcagttaaataacacggtggacataccacagtgtaccataatatacaaatgacaaatttttaatgatccacgtcattttaattttaaatgatataaaaagttattaaaattataaaattaaataaataatttgttttaccataattaaatttttgcatggagagttataaatgatgctttaccagtggctacttctcttgtcaagaggaaaattatcaccgattcgacatgttcaatatgtcgtcaagcttaggaaaccattgcgatgcacttttcacttgtaagtatgccaagaaggtgtggacttactcaacgctttctttcggttgctcttcaatgaaaaacggtgattacttactgtatctccattcaattcattctaaatctgaaatggaacaaatattttgtacgctgtggtcgatttggagtgaaaggaacaaagttgtgcatggacaaagacagaaaccagcaagagatttagcctcacatgttcacacctactgccagaattttct

SEQ ID NO: 21006 - DNA, 4526 bp, Cannabis sativa
tcaagatggactgtacacatcatgtacagacattttgcttatatgagaagttaaaatcgtggaagcaaggggtttagtaaacacatctgcgagttgcaagttgctgttgactggactgaggcgtattttggagcggttaatctcgtctctaatgaaatggcagtcaagttctatatgtttagttcgttcgtggaaggtcgggttgttggctatgtggatagcagattgattgtcgcagtatatgaaagctggttgctcttgaggaatttgaaaatcttgaagaaggtattgaagccaagtgatttcacttcccgttgctgctagtgcccgatattctgcttcagcagaactgcgtgatatagttggttgtttctttgttcgccaagatattaagcaatcgccaatgaatatgcagaagccggtggtggagcgtctagtaacggggcaggaggcccaatcggaatcagagaaacctcttagttgaatggaagaggaagtagagtaaagaagtccttgaccagggctcccttttaaatatcttagtagatggtgtgcggcttggagatgtggtgttcttggtgaagacatgaattggctaagacaattgacatcaaatgttaaatctggccgtgataacgtcaaatagagaagttttccaacgagctgtcgataaggagagggatccgtgagtggttccccttgttgatcatctagttttacccttggatccataggggtttttgttggtttactaccaagatatccattgtcttcaagaagttggagagtgtattttcgttgagataggattaatccctctgatgcacgagctatttcgaagccgaggaagtatttgagaggaccaagagctttgagagagaatttgttgttgagagtgcattgtaactgttgtaacaaatccaagttggggccagtgatgattatatcatcgacatacacaaggagagcaatgaagttgtcttgagtgcctttagtgaacaaggtataatcagcttgcgattgagtaaagccttcatgaattaaagcatcagaaagtttgcgataccactgtcgtgatgactgtttgagtccataaatggacttgtttaatttgcatacaatgtcagtatccgtagcaaattcaggaggtaaaatcaatccttttgggagctgcatatagacttcttcgtgtagatctccgtttagaaatgcgttattaacatctagttgcaaggtgtgccatttcttgatggtggaaatagccagcaagagtttgagagtaaccattttagccaccggggaaaaagtatcgaaaaaatccaagccttcttgttgagtgtagccttgagcaacgaatctggctttgtgtctttctatagatccatcgctgttgagtttgattttatatacccatcgacacccaatagctttcttattggctggtaattttacataggtccaagttttgtttttgagaaaggccaataattcgttgttcattgcttggttccatattttgtattgagatgcttggttgtaagtggctggttcatatagggctgtaatgacagaaataaaagctttgtgagacttagacaatttgtcataagatagaaatttatgtagattatgtggagtagaagttttgtcttgtaacacagaattgcactcataatcacagaggtatggaggaggtcttgatattctgctggtgcgtctaatagcaggttgtgttgcatctgtggagttgtcatctgtattggcatcttcggtgagagggggatcatcttgcatacttgtctcctggtgtgagtaattatcctggggagtgatattagtgctagaaggagtagaagagacagtaggaaagtcattaataatagtgtcaaaaacatgtttagatggtaaaaccatgttagagaagggatcaactaaatctttagtggtgttaagcttgtgaaaagggtatatattttcatgaaaaattacatttcttgagatgaaaaactccttactgttaacatcataaagcctataccctttgataccttgtggatatcccataaagacacatgtacgggcccttggggtgaatttgtttctatgagcagtaagggtgcttgcaaaggcaaggcaaccaaagttcctcaaattctcatacttgggctgttcattgaacattatttcataaggacacttgtttgcaagttgtggtgtaggtgtgcggttgatgagataagccgctgtcacaacacaatcactccaaaactgtataggaattttggcttgaaaatagagagctcgagctacgtttagaagatgttggtgctttctttctgcaatagcattttgttcaggtgtttctacacaagtaaaatcatgtataataccaaatttagcaaaaagatctttaaagactaattcaggcgcattgtcggatcgaaaacgtttaaaagtgcaattgaattgggtttgaacataagatagaaaatctggtattatttgaagaacatcagatttttgtttcattaaaaaaatccaagtgaatctagtgttgtcatcaactaaggtgagaaaatatttatgatttaagtgggatggaatatggtaaggcccccaagtatcacaatgaataagatcaaatttagatttggcaaaatcattatgtttggaaaagggaagctttttttgtttagccataggacatacaaaacaaggagaaagtttgtgaatattatcaatattacaatgaagtttattgcaaagtaaagctaatcgcttgtgtgaaggatgtcccaatcgggagtgccatatatcagcagtaaccgtggcattgcaggttgcagcaggagagttatccaagacataaagtccattgttttctctacctttgccaatcacaatcttgtgttgattttcctgaatgtaaaaactgttagtagagaatttaacctcaataaattcattactggttaatctactcacagagatgatattgaacttgaaattgggcacatacaatacattctcaagaatcagatttttggatatgggaacagtaccatgttgattaattaacaaggattcattattaggtaaaatgagtcttgtagtggaagtgtgactgatgctttgaaacaacttcatattattacatatgtgcctagtggcaccagagtccaaaatccaagaagtgtcaaagaatttggaagaaatacaagttaggatcataccagaattgtctgttgatgtgcagggttctgcaatagacaagttaccattttgattggcaagaaggttgagcaattgttgatattgggttgcacttagttggggtaggagagtgtgggtatcctcagctttaacacttgtttccccactggtttgaacttggttagccacagcatctttaggcttgttgggtttgttatatcctggtgggtagccatgaatcttgtagcatctctcaatggtgtgtccatggatgttacaatgagtgcagaaaggtcttcctttcttggatccttgagatttctggccttgattatcacctttgctggttttgtcaccttgaaaaacgaaagcatggctggtgttgagatcatttccagcagcaagactacctttttgattttcttcttgggtaacaagatggaagacccgattaacatcaggaagaggatccattaaaaggatgctttcacgaacttgagagaaattgtcagacaaacccatcaaaaaggacatgatatattccatatgataatgttcttgaagtttcttaactcctccacaggtgcaaccattgcaggtgcaattcggtctatagttagacaattcttcccaaattgtcttcaatttggtaaagtacataccaatggtcaatgcatcttgtttaaggttcattaaacccttcctaagattgtaaatatgaggtccattcctttgatggaatcgaactttaagatcattccatatgttggcagccgattcatcatatagaatgcttgaagaaatttcctttgagacagaatttaggatccaagaaatgacaatgttgttatttcttatccatgcattatacatggtgtaataagagggagatggttttgaaatagaaccatcaagaaaaccaattttatttttaacagaaattgaaagttgcatagctctactccaagaaacgtaattatcttgtccagtgaggagttgagagacaagaacgttacctggattgtcgccatggtgaagaaaatacggattcgtgggatcttcgagagggttctttgagttgatgaattgcaagtcttgatttccatgttcaatggaagcagatgggctttgtgttgttctggttgtttgatcttcaccttccattgaaatttcagcttgagtttcgcttgacatggagggaaaaccaagaacagagaggcagaacgcagtaacagggtatcggagaagacggaggaaaacacgatgccgttaccggagaagaagagcaagatcaggatcgttcagggaaagta

SEQ ID NO: 21007 - DNA, 4957 bp, Cannabis sativa
  modified_base (4886)..(4893): a, c, t, g, unknown or other
tatttttataaatatttgtatgtggactgtataaatgtttaatgggccggcccaaagtatttttgtaattttttttccttttttgtatttttttgtttttttccctaattatatagataattgatgttgttaatataattgaatagtttggcttagatgagttttatgttttaaattactagggtgtactactaaatagtaattttttgagaattactaaaagatattactagtgtctagttttttctttagtgttatatcactattagtgtaattaaatatcgggtcccatataatttaagaaaataatttttaaagaatatcgatatccaattataagacgccacttatagaaggtactaggcaccacaccactggtgcccaataacaatattctaatctttattgttgatttgtgattttttttttggttacacaatttgaaacctcttaatatttatagcagctagaatattgtaatcttgtggtgtttattaaaatttttagaaactaagtatttgaaagcttaaaaaattaaataacaattaagtaaatgagatagagaacttttacgtagtatattgatctttcaggcttttaaaatgtattacaaggtaagtttcacaataaaaatcctaactatggctattggctaccaactttctaagtttttccagaggaagaagaaagcttagagagtattctatgcccaactctttctaagttttttctcgttttttttttcttgtgtgtgtgtgtatgaaggggtaaaagggtttatataggttagagtttgggtccgagcatacctttggcccgccctgatcataaatctgagcacgatacaaaattactagacttgcgggccgtgtcgggcgtaccctgtaaaattgttgcacgacacagtacgatccatacttttgtatagtacaacataacacagattgtatttttttatggcataacacgacataatttgtatcttaaaaagtctaaagaatataagtcgaacgagcgcgatagatgcatttacaactatgtttgcatgttaaggctagggctggaaggttaaaattgatctcgagtataagagttgttaaaaatgaaaataataaataataaataataaataacattaatttaactgttaatcttaaagtggctacgcaacagaatttgtgtaaatataatccctaactataaaagcataaaaatacatgacatttttagttatttatattaattaatgggttcatataataaggatatgttatctataaaattagagctgtacaaaatatattaatagtgtaataaagaataggaatatctatatatataacaggtttttttggattttaaaatatgatatataacatatgtcatgagtcgtgatgggggcattttaatataattttgagagtttaactggttatatatcatatatgagtgtcttttggtatcttagctagttaattacattcccattatagttttaacaaatcacaaggcatgaccctagccaaccattaaaaatacattcagatcacatcttaggacaagaaaaagagtcatgcatggaccatggtgactcaactttttcaatctttacgaatctatattgaaaaaactgatgtgtatataaataactaaaatccttaaccaaacatcctcagatatctaatcatcatttcatttgtattgggttacttttggaattcaaattttggtggaaaattttgaatactcagttgaaaaatggcaatgagtaactggttgtgggcaagaggtataggatcttcaaaggcaaaggcaagaatagtactatactactatatgttcttactccccaattcataatttttaagttccctattgatttcatatatagtttctcttttttatgctgaaaggttttatagtttcacttgataaacaaaaacccacaatttgattttagaaaaagtcatattgatcatcatgcattttaattatacttaccagtagatgagagttataagtctcatctctcaaaatccatattcttataaatgagttaacatttttatatttgtttttttgtgagataatgaataatgaacacataaatatataaacatattatgtgtaagtaatttttgataggtgggatctaccttaaataaagatgattgatggcatagatatgtgtcaagtttgtgtgtaaattatgtgtatatgtatcattacttacaaaataatatgtagcaaactattttatatataattagttgaaataactgtatttaaaatttgttgtgattagatgaaaacaaactattccttaattatactactgttcttttacttgaaaattttaaaatattgataattttatcaatttgttctctctttttttttttttttttatagatttaaactatgtttggtagaagcaaagaaaataagagggatggaaaaattttgatagaaaaaaaaaatctatgttatttggtaaacaaggagagacaataatcttgtatgaaaattattattttgtttatataattttaattttcataattatagtgagggtaatttagtaatttatatatctatttgagaagttttatttacactataaaaatttataaatgtacattatttcaataatttttattttacattttaattttttttcttccaaattatattcttaaaaaatatacatgttaaaagaaaataaattatattttaaatgttataataaaaaaatgaaatacaaaattataaaaattttattagaaaaaaataaaataaatatacaattataataaaaaataaaataagtatcaaaattaacacaaaataatataaatttttttaaaatatatattaaaaattattttaaatattaaaatatgttcatcaatttataagatggaaataaaaaataaataaaacactcattatttttatattctctccacttttttcacttgaattttatttccttccattttttcatcccataatacatatgcttaattttaattacattgtcaattcattcattaagatcatacatatattttctaattttctctttaaaataatttcattcatcagcaaataatcgaggatcactcgtcgccgcctgaataccaaagcgtagccctggtggtcggagttactggcatcgtcggcaacagtcttgccgagatccttccactctccgacactcccggcggaccatggaaggtttacggcgttgcccgccgcccccgaccctcctggaacggcgaccacccaatccactacattcagtgcgacatcaccgaccccaaccagacccacgacaagctctccatccttaccgacataacccacatcttctacgtcacctggagcagcagacccaccgagatcgagaattgtgacgttaacggccgaatgctgaagaacgttttggacgcggttatcccacacgcgcccaatcttcaacacgtgtgcttgcagactggccggaagcactacgctgggccgttcaagctctggggaaagatcagtccgatcaacgaatctccgttccacgagggactcccgaggctcaaactgctcaatttctactacaccttggaagatactttaatggcggaagtgaagagaaaagagggtttgacatggtcggttcacagacccggcccgatattcggattctctccgtacagtttgatcaacgttatcaacggtctctgcgtctatgccgttatctgtaagcacgagggaaagccgttaaaattcccgggtaatcgggtcgggtgggagagttattggagcgcctcagatgcggagttaatcgcggagcaagaaatatgggccgcggtggatccgaatgttaagaacgaagcgtttaattgtagcaacggcgacgttttgagatggaaacatttgtggaaggttttgggtgagaaatttgaggttgaatatgaggagtttgaagaaggagacgacgacgttttgataccgagattggaagagagaatgaaagataaaggggaagtttgggatgagatagtgagaaagaatggtttggtggaaactaaattggaagaaattgggtgttggtggcttgtggatattcaagtgaggtttgagtcttgtttggacagtatgaataagagcaaagagtatggatttttggggtttagagattctacaaagacttttgtttcttggattgataagatgaaagcttataactatgttccttgattttggggttataattttaattgaggttttggttgttgtatcaattgtagtggttggtcttttgtgtttacaaacttttcaagtgtaaaattctcacgttggtgtgagacaaagaaataaaacgcctaccttctttctcttattaatattaagaaatctttctgttgctatttagtttttgagttatgtacaatgtactatttagttttttacaatattatatcttatttaatctccatgaagtgatttattgtaaaaaaaaatattggggtttcaagtttgattttttaggtgattaagttttggatagacttggatacgcacgtgaacctattttttttttttttcttaatcttacctaaactttaataataatacaagtttacattatactttattatactttacatatattggacctgaaaaagttacataatacaatatatatattatatgatcatacattatttttatgtattgaaaatttatatgtatatatataatttattgattttaatggtttagttatatatttatatataattaagtgtttagagtttatatataattaagtgagtgttaagaaaaaagttgatcgagtcaactcattaatttaggtggcgtttggtaannnnnnnntaatcagttttctatttttaaaagtagaaaagtgaaaatatttatcaaaacatgttctataaaa

SEQ ID NO: 21008 - DNA, 3165 bp, Cannabis sativa
aactatgaagattatattaccgatagaaggtcaacgccatctgctccaagagaaggaacagcacgtgccaagttttgtggttgccactgtggatacacgtgccagtctcgaaaactagtcaccccccgccattcattctcagtaggagttccaagaagcctacacaaaagatgaaatgtgagaataaaaaaagtagtggaaaataaatctaatatatttcagattaaggcaaaatatcaaacagttaggcaacaataaaccacaacaaaacaaaggttaatgtcgatttcccagatccaattttagtttgtgataccgacagacccatactaaacagacctgaagatgtgaagcagttgctggaattcggaatctccgggaaaaagcgcctgccttcttaccatctcagctgagacatataagtaaaacattcaatcacgaaagaccaagagaagacaaagaaattaaacccaacaacccaagatctagatcaatttaccaaagatgcatccgacggaccacatatcaacagcagtagagtaatgggtggagccaagcaagacctcaggggccctataccacagagtaacaatctcatgagtgtagctcttaagtgggacagtaaatgctcggccgaggccgagatcggcgatctttaggatgccacgttccttgtcaagtaaaagattctgaggtttgagatcacggtgaaggacaccatgcgagtggcaatgggccacccctttacagagctgataaagaaagtttcggatcagagaaggagctaagggcctgggatttgatcccttgcgatgggagtcaatgaatttcttgagatcggtgtcgagatactcgaagacaaggtagagaacaggcttgggcctgccgtccttgcgattgtcaacgtgctcaacagagagcaagcggacgacatagagagactgagaaagcatttgaaggagggagacctcacggagggcagtgggaggaacaccctcttcgtccatttcgagcctagtcttcttgagagcaaccaactgaccggtggctttgtctttggctttgtataccttgccgtacgtgccttctccgaccttctctagcttctcgtacttctccatttttcttcgatccaagattcagtactgtttgttcctttttgatcagaagattcagtgttgtttgattgagaggagcgctataaccctaggattttgaatttgagtactgattgatgattgggggcgtttccccccctttttctttcttttcttgcgaaatctaaccgttgtctttgagtgacgtgtccacctgataaatttaaaatgaaccaaaggaggaacagtttattaaagagatggatttttttgcggctaaaccctccgaactctcaattcacatgctcttaatcatctaaatttaaattttggtgactaaacctactaaactttagttctgttagtaaatttagttttccatccattttcatttaactaatgaaaatggatggaaaactaaatttgctaacagaactaaagtttggtaggtttagccaccaaaatttgaatttggatggttaaatgcaaatgaattgagagtttcgaaggttttgccacaaaaaactgagaaataccaaatggccatttacctttttgttcagaatatttatacactagtttgcagcataaatacttaaatttaattttcagttataaataatttcttaaatttaatttttggctataataatacttaagttatatttttaaaactttagtaggtacccaagtcattatccacatttcattttcttattggtatatttaaacttatttttttagaaaaaataaaaatttaatggctttgagtaatcagggattgtcacgtgacaatttacttgacacttaacggccagatacttacaaaagttttaaaaatataacttaggtattattattgccaaaaattaaatttaggtatttatttgcaaccgaaagttaaacttaagtatttataccgcaaattactctattattttttagaatatttagcaattttaccctctgaactttccacaatactgattttatcccctaaaatatatggtttattaagaatcctctgaacttttacatttataaaaatttagtcattctgttaggttccgtcccattattccatttaaataatgacatatctttataaattagcaactttaccctcctgggcttcgcggtggatgtttaagaaattttaaattatatatataaaataaatcataactttatttaatgagaactaagtaataaattgatcaaattttaatctaatttttcatataattttgtataaaaaaactaggtgtgtacaaatagactgatccaacttttatttacaaaatctcgttattataatggaagcctaacacgacgtgtataacatgatgttaggcttaatccctcgaattgttataaaaattaatagtctatagaaaacttatcatatgattttaaaaccgttctcatcatcgtatctcacttctactcatcattacattcaagagtattgtaattatcatatctcacgtgtatctaattctcacacaaaataaagatctaaatataaaagaaagttgataaatttagaaaatatatgattaaaaatcaataataataattaaaataatcgtaaaatattaatttgaaaatttatgctcttacaaaatattaaaaataagagaactaatacgacttagggttctgtttcacttttccttcagattccaaatcaaaaaccctagctacaaccactacgacaacgccaagttctatcatcgttcctgtttcaaggtttcaacattagattcttacgattctgttgatgatgattataatgctcgcttaatttttgtagtttctatgtttgtatattgatagattagagattttggttggttttgatatgcattttcatgttttctcggtttattgatagagattattgaaattgtggtggttcttatattttggtgattgatttaatgcaagtttgctagttgtggtgtttacgattgaaaggactttgctagattattatgactaggaaagcaacaactttagattggtttcttgctttaactgatagagatttcgacatcgaatgaat

SEQ ID NO: 21009 - DNA, 6619 bp, Cannabis sativa
agtaaattgatagttgagggggttttgccgcaaattactctaaatgtaataataaccgtgtcacaatataaaaataatgaaatgggaaaagttagtaatatatgtaaatttctcaaaatatttaattagattgaatgcccaaccttaaatatgtgtggtgaattattaaggaaaacatatatcatttttataaataataacttttcttattcgttttaccaaattaaaatttgctcaatcgagttgacaaagactaaatcgatttataaaaaaaaacaataataaacacttagattaatataacatttttagatacgaaatgggcatttggtctagtggtatgattctcgcttagggtgcgagaggtcccgagttcaattctcggaatgccccttttgctaactaatttgcttattattttattaaaacataaagctaggtgacttcacctatttttttttaagaaaaaaaaaaacaactaaaagtaagaagtaaagaatattagtaagtttcgtcctagtgcatatgtttaagaatatattattattttttttttttaaaagaaattcaaactcattaagaaaaattcgctcttatagaataactcaagaatcgagaacaagcatctgtctaaccacaatctcctaaattagtaacagaggttgtcagtgtatgggcaacaccatttgctaatcgcaaaatggcactgcaagaaccaccaccaatagcagctaataaataatagatttctaataaaacaaaccgaaaacaaattaatatgaagcttattaatccaaccaattgtcgcagtagaatcactactaataatggggatattgaaaccaaattgatgcgcaagagtcaatcccagacaaattgcaagcagctccgccacattagcagagaaatcacctaacacacctgatgaccacgccaatcaaatcacaccctctgcatctcgtatcactctccccaatccaacaaagcccctccctggaatcaccgaagcatccatttctagaggaaagaattcaggaggaggtggcatccattgagtagctcggtttacaactgggatcgcaaggcccaatcttaaatgaaggcctcaccgatcatactccttaaactttgccatatggttattggctaagcctaaaataatatccaatcttgattgcttgtggccaaacaatattgagttcctatcataacacagccaccaaagggttctcatcatcaattcaaaagcctcacgagatagcatgtcaaagagaaataggagaatttcctgcattggtccctacgcacatcgacggagcatcgaccacactcccaaccgatgccacactgaattaaaccagaatagaaaaatagagtatgctcaggagtttcaccttcttcaccgcaccgagaacatcaaagaggtacctaaactttctaggagataagttgtgtagctactggtaaagccaaatcgaacatatgccaaacaaacactttcacctttggtggcatatggagattacatactccattacaccaacgagttaacctggacgaatctggaactccctcctcaacttggaatgaccatgccaatgagtatccactcttgacagtataaatcccatctatatcgtagtgccagcaccaaccatcttttgcctcacgcttcactaatggaatagacgagattatgtccacatctattggcaaaaaaacccgttgaagctttcccacatcccaagtaccagatggaagaataaatttactcgcccgacaatcatcatcaatcctcctcgtgattggctgaaaagaccttagacgcgggagccatgggtctgtgaaagccctaacttgtgttccatccccaatagatcttcaaagaccgctccattccccacataaaacttgaccaaagatgagacaatccaactttttttgtggcctcaaggatagagcaatttgagaaatatttatgtaactttttccaatgaacttaatattagtgataaatgtggaggttactcatagtaacaagtaactcttccatatgttacaaaataatgatacataatatatattgtcatgtgttacatattattaatttattatacatatttaatctatatattatattatttaaaaataatatcacctacaagtcagcaaatgaattattgatttgattgaagaacaaacatagtttaagagttttctttttctttttttttttttgaataatttgcggcataaatatttaagtttaattttccgttacaaacaaatacctaaatttaatttttggcagtaatattacttaagttatatttctggaactttgtaggtacctaaccgttaatcttaagttattatccacgtgttattttcttattggtatatttaaactattttttaaaaaaatatataaatttaatgacttggaccaatcaagaattaccacatggcaatttacttcacttaacaccgccaaaaattaaacttaggtatttatttgtaactggaaactaaatttaagtatttatgccgcaaattattctttttttttctttatatatataattctcccttaataattttgttttatccgattttttttttaattcttctcaccttctttataattactttttattcgttttcagtaatgtaaattcattcatatcgtgttggtccaactcatattattttcgtgcttttcaaaatatgaattgtgccatagcgtatcttgccgcaaaaaacatgggtcatgtcgtactgtgccgatatttttaaagggtatgctcgacaaagccggtaagctcgatattttcacaccgtgctcagattcctgccatgctttactcgtacggacctatttttcttaaacaggtttgccaatttcgatatttaaagtcaaatttgtgctttgctttaccactgttttttttttacaaattaatgagataattattaaactatatgtatttttttggcttattcgtaccacatgtccctaaactatttaagttttagaaagttagtccccaaactttattttttgataaattagtccccaaactatatatattttggcaagtttatctctgaactttatcttttagtaaattagtacccaaacttttatcttattatcaacattaaattctcactcttagatattgatatttttattatttttatgtatttttttcacgttaattgtttttgctaaattgaaataagtttattttttttaattttaatactttgataaaaaaaaattatattaaaatattttatttatttatttttatttttaagtattcatataatatttaattttttaccaaaatatttaaaatatactttttttcatatatataatttaaattttacatcaacactctagtaaaaatttatgaaaaatttatgagttcgtcgttaagtataagttaacaataaatattataatataatttacttggtagtttatataaaaaaaatatattatttctactataaaataatattttactaaagatataaatagattttatattaagttctttcatatatttgagaaatgatcatcctttaatggtagaacaaataattagagaatttaaaaacttttattgacttatatatagtttttttttgtgcatgcacatcaactatttgatgagaaataatatttgtttgaagtgcaaaaaaattattcggtagcagaaatattttgtaagtattgttcataattagataaattattggttcacatgtatatataaataattttctgatgttcaaaatatgtcttgatttgatttaaaagaaatacatataaataaaattatatatttttcttctcatttcagcatattttaaaaaaaatatgtcttgatttgtttttttttttcttcttattttagcgcatatttaaaaaatacatgtaaataaaaaatatatgtatttttttaatttgataaggtatatcaatataaaaacattaaaaattaatacaaaactaaataaataaataaataaaataccaacatttaagagtgaaggctttatgtatctaaaaaaataaaactttgggaaccgatttgtcaaaaaataaagtttgaggagcagcttgccaaaacttatatagtttgggatcaatttgtcaaaaaaataaaatttagggaccaacttaccaaaaacttatatagtttaaaaacttgcggtacaaatgagtctttttttttttaagaaaaatttcaaaactccaccctaaagagcaaaagctctcaaaaaagaggaagaggcagatatcattaaaaatttatgacatcaaccataaggtagtgatgaatacaatatggataaggctaccaaactttgttagtagccacagacaaagcatacttagcaaggttatgggcaacaacattaattgtcataaaataatgagaacgactcacattatgaaagagagtcatagtacaatgaatgtcacgaaacattaattatatgtatttattaggaaaatttaaatttatatgcatacatttggtgtatattaaattttttaaacacaagcttaccaagacacactttatagtaatacctataatacccttctctcttatcttctcttctaacttcaccatccatacttcccattctcatccataccgatagtggtccgatggtagtctgatagtgctctgatggtggcccgatgctacatatttttttttttatgtttttgtacataaaaaatggtagcatcaggccaccatcaggtcatattctacatttatagatattaagctccattcattaagctcgtcaggaaagtactgggccaccaccaaaccatcattggactactatcggaccatatcctacatttataggtagcatcgggccaccatcagacattcgtcttcaacctttactcattttaacaaaaggaaggtatcaggccaccatcggactaccattgggccctgcaaagaaactagtttttggcccaaaactcatatccgaccattttcgaccttaaatctaatatcagctcacaaataacagatattaatcatacaatttattcctgtgataataatgcagatggagaagtcgtggttaatggagaagtcgtggttgatggggaagttgtagggtctgcggtggtaatttggatccatggatcgttgggtctgtggttgcagtggtcgtggagggaagggaccgaggttgtgggtggtgggtcaagtccttggggtaagttcagagagcgagaaagagaaggaaggaagagagagggtcatgtgtttgaaatgggaggggtaaaattgggttttataaaatattagcctattctaccaatatgggttaacttaggtttagagaaataattttaatccaataaatgcatcaaaagttaaatttttctttttatagtttcaattatatttataatttttcaataatatttacattgcaaagaaaatatatttatataattttttaataatattttacagaaaatcacataaagaaattattagaatttaaatatttatttataaatattcaattttttatgcacactttatacataaattaatatatagttttaatttgatattttttaatagttttattgataaaattataatatttgatgagtgcacatttgtacactcattcttatttcttagtcaattattagatgaattagtatttatttttgtataaatttgatgtgttttctccaagtgtgtaggtttgtgctgaaaaaacattttatgatagactgagatctttgagcccatttttgacaatgatttcatcattttctcgaagatcttatgagacccaaaatgatagaacttgttcccagctttccaaaacatgttaaattatctcatttggagtccggacgtaaaaattatgcatgatttactgagcaatgtcgaagtaaaaaaatttggtatgtactgtgcgctatagcgtagggggtctgcactatggcgcctggctggaaaaaaaatattttttacggaaaaaaagataattttagcacgtgggtatttgaggatttttctcttaggcgctatagtgcagggtataggcgctatagcgcagaacttatcatatttttaaaaaaatcttaattctaagaggattgatcaatctttgttggcctatctaaagaaagatgtaaatcagattgagggacgactagagagatagaaataagtaattttaagattaaaaaacactttgaagagcaagagagaagagacttcaagcaatcgtcatcaactttcatcattaagagttcttttcttcttcttcttcttcttcttctttattctttgtttagttatttaattatgaacatgattattgtggttattatatttgtgattatgaactaaacactcattctagagtattgatggaactattttgtattatgaatttaagtttttagattattcccatatttgtttatgcaattttgttataattatcatcttcttaatgcttgatcaccattaattagtatagagattttaagttttacacttgagagaggtaatctaaaattggacttaga

SEQ ID NO: 21010 - DNA, 4947 bp, Cannabis sativa
agtttatcagtgccatcgtaatatactatgacttaaaaactctgttttcaatcacatactacagttcaaacaatcaaacaataagtttagatcaaagatgaaatattaccaacagaacaacggcagcaatatcatccagaggcaaatcagtctcaccaaacctgagatcaattaagtacgttacaagttacaaaatctaagagaatgttttttttagcttaaatgtgtaacatattacaatgatgaaaaaaaaaaattgttaattaattttacttttggagattcccatccgaaaaggtgcttaaagtttcggtccggacaaacttcaaagttggtagactagactcaagtgcttctaaatggtaggaagtgtagggacactataggagctgaataatggttgtccaaaagcaatataggtattattatttattaatatgttatttgaagttatttggtaggcctgagtgtttaagttagattttattgtggaacctatagagcaattagtgtgatccatgtccccttttagcacatctagttgtatgagtttcttaagaataacatgtcatagccctcactgtttacagttcaaaaagcaaaggaagtacctgaagggaaggatttcatcaacatagtgaaaagttcgtccgagagcaacggatatgactgtcattgccctgcatgttatgtctaaccaaaatttagtagttgagccatgtctatggaactgaacaataatactcatgaataatatgcaatgtctatggataataaaatttagtagtacaaagaactcatgaaataaatggtaacttgatttaaacaaagatgcttgagtagtattgattcctccctaataactaattgtgtaatttgttagttaaaaagtgtttgttaaaagtagttcgtagcagttttggttgttgtaagtcagttccatttctgttaagtttgtttagctgataacaacccctatgtacaattgttcagtatatcaataaaggacttgatcactttgtgtgattaagaaattcacagcatattcattgatgtatttctaagacactttgatagtacacagaattcctttatggtatcagagcttttgactcacgtctatggattttgtttcaaccaatctgtctcaaagtcatggttctaccgtgtctcaatcaactcaagacacgccgacaacgattgcacctccagaaattacgacctcatccaatcaaccttggaatcccttttctaactcgctaactgcttcactaaccatcgatttagattgcatcaacttctttgtgtggtaatcacaagtcgtaccgactttcatcggccacaacctggatgagatcttgttcaacaaagttcatccacctgcaactctagttaatggcaaaactaacccagagttcttgcaatggaaaagacgagatcaactcctcctttcttggctataatcctcaatgtccgagggagttcttaattctatggtggcttactctacttcctatgatatttggcgcgctttggagcaaaaatgaagggagtttgctgtttggtgatgtacagaaatttgattagcaaaataaattacaaaggattgcgacaaaaccttaaagggagtctaatcttgtttaaatcaattgtatttgtaattatttgagatttactaattgatttcatttctctgggcgtggccctatggacgagtagtgtttgaaagaacactaatatcacatacaattctcttgtgtcaagttttcaattttccacaatttatttctgtttatgctactgcatatctgtgttctgctataacaagattctaatctattactacaaagtattaatgtcgtattttaattacagtttccaaacaaataaattgatatattcaaaaaacatgatttttcaatcagatttattaagaaaataagatgctttattttaaaatttaaaatatgttgtcatattttttgttctatttaaagagcaatgccatgaataatatgtattatgttttaaggttaattcaaatatcctttgtaaacttttgttggaggactcattctcaacagtttgggtacactattatttgctgattaataaagattgaagatagtgttccaaattagagtacagacaaagatcacattgatctttgttaattgtttttgaaccggtatgtatctccttgttttgtctccacgttttacagtttgatctttgttttccaattgtgtttgattatctgtcattgattcaatcatcttgaattgtgtttgttttgagtttattaatcagtttgtcttaagttttatgtttaaaatcctacagtttgtcatgtttaaaacctttatccaacaaagaaaagttgtctacccaaatgagtggtcaagtctcataagcatagttctttgaacttgtagcatattataaatgaaggacatctaaataatcatgagcaaacagaataaaacatacgcgagtgcaccaaacgttccagtgaaaacaactgcagcagagttcctagctgctaaaagagcctgcagaagacatcacgaaatcaaatttggagttaaatatgttatatggacaacaagagaaaaagccgaactagacattgcttaaattttgcatattatatatgtttatttttctttcagggagagggcaacatacattcaaactcaagttaaagtacaaagaaaacagattacttctaatgagaattataaatttaacgaatttggtgtgcgtatctacatgtatcataagttgggcaaatggtaaactaattatgtataccaaaaaaatcatttaataaatcatttaacttatacatagatagaactaagtctgtttgccttttttttctttttcatgaatgtttgtaaactacaagattttgttcagttagcttctcaccgcaatgaagaatgtcttgtcccccagttcagagaaaaatatcagcaagaaagcctgcaccagaaaaatataaacatgtttggtttaccatattgtctcaaaacatgaaatcatatagttatcatcatataagtgcagtagctagtttaggggtaactttgtcttatatgtactctaattaatatataaataaactagttaggctctaacttattcagatttttcctaagattttgggagagcagaagctctacttgggagatatccaaagttctccaaagtttggaactttgtcatttctgtttctcataagcaataaaagaagtactttcagaattgattcaagatccatctttgataagaaattcctttcgaagtccaaaaccgaaatgatgtgagacataataaactttcaaagtatgattaagaaaactccagttcctctatgactgctattaaaagaagctagaaaacaacatcatgcttatagaagtttagggagattttcctaactgaagcaaaacctgtgctaatatctccaagatcagaaaaataaggacttgaaagaagcctggttgtgaaatcagaagctgcaactgctggttgagatccttgaagtgttagaactccaaacatcatcaaaatcttcaaaaatgaactaactggtttttccgaaaagacaaactctatggccttctcagacgatcttcccaagttcttggttgcaagttcattttttaagccactataatcatccattatttgaattacatccgtaatcttttcaaagttcttgtgatcaggacactttaagtgctcctgttccaaaaataataatatatcatttccattgaacatacaattgtaaaaacatggttgatattaattaacatgtatcatcagtaaaattaaaagtatgatgcataataaaactcgttttatgattagaatttagatgtatgaaaaaggttcgcttaggagcatagtaacaacaatcatcatcactatcagcacttgcaacaaactatggctcaattagctccaacttcaggggcaggcattcactccaaagtgggtttggtttcaattgtgctcatttttatttttagacatgacatgacatgacattattaaaattcacaccatctctctccacttgtttgtcttctaatatctctaaaatgtcatgtaatgggatgagagaattcgaagctaacaaactcaacaggaaaactcgattttcttcaaagacaacaaaatatatggagtgaggtgagttaggaagtattacattgtaatctgagttttctgatgttggtgaaaagctaccaaatcgttccccactaatacttgctctccactggcttgcgtacctggaaaagaaaaaaaaaatacatcttaacaaatcatttttacttacaaaaattaagtgattatattcaccgaggcgaacatttttttgctaattatactttcttacattgccattctggaaaattgcatttgtaagtcaataccaaataaacgaaaggtaaacactggtacagagtagttagttagatcataaaagaagagcctaatggagatgggtatcgaatgatgaggatcaccttgcagagattgaagatgggttccgaagaaaaagcttggaggaaggttgggtgttggacttggatcgagattgcagagaaagcaaaacgctccctgagagcgttatggttctcattctctctcttaaactaactcactttctctgaatgagggaggtttgcttggaattggcagtggtagtggaagaaggagtagataagctgttgagattgaaggcgccaatatgtcatcttcatctccttcctgtacctgtggctctcagttcgttaatttaatccacgtgtccaattccatttcttctcatgttctccggtcgggtcgggtcctccagcccaaatattattccggcccacagttctcagttgtaacttgtgaggccacagttctgagtcgtcagcccac

SEQ ID NO: 21011 - DNA, 2390 bp, Cannabis sativa
ttttttaaaaaaatgtcatatttagggtaattaagtttttatgccatatatatcaaaacatttattcattttcccgtatttttgtaaatagcccttattttattattttcgtttacttgaattctcaattagaattagaaatgatattaaatttaatattaaaaatattactttgcctgtttttaagttgatatattttatccatattctaactaacaaaatgaggtttgaagatatattttatttgtagttacatgaactagacatgacaattaatgaatactacaagttgacttttcgtaataaatggcaatttcagtcacctaccggcaattatgtccggatgtattatgcaccacagtagaaatatttgcatgagagaggaatataaaaacaatttttattatttattaaaacacaattttaatattaattaaaaccattaaacacttaatcaaaatgacatgtttcaacaacatcaatcccataataatctcttgtttttcaatcatcatgaagaataaactgggatactttgttcattcctgaagaaatttgtaggatccacattagttttcacataaactaatctcttgaaattatccttataatattttgaaccccaaacgcttgcttgttcgtaggtagcagagccattatagttgtttcttccaatgtcaaggtccctataattgagataagcttctctcggattcttagacacatatggagtcatgtaactataagcactttttgtccattccaagtaattctctgtatcagaatcattccccttctccatccacctagttagataagtgagttcataaaggtttccaactcggtgagggaatggagtttccgattccggaatctcgtccattcttcctccataaggaaacaactgaagaactgcagttcctaactctacttgatataatctttttgctaacttttcaaaaacatcttttggaatttcctccttgacataatcagcttttgctttaaatgaaaacattactgattgggtcctattaagtagaacatcaagagaagaattagttgggaatccattgaacaaaagtatggactgaatccaactcatttcagtacaatcttttcttgttaaacccaactcaggaaagcttttcttaactaaaggaagaagcttatcaatttcaccaaggtacaccccaaaaaaggtagcttgtaatgatggtttattgatcatcccaggagttgtagaattattcccagctagtatcctaacaaacagtaagaaatctttactaaatttgtcagcttttgtttgccactgatgaacaatcttcttggttgaatctaactcgtagtccatctgaacagtggctattgtcagtgaagatggcatatcaaccaagttgatcttccaagaaagaacaattccaaagctggctgctccaccacctcttagagcccaaaataggttacctcccatatattttcgatcaactatttttccatttgctaagagtacacgtacatctacaacattatcacctccaagaccatattttctcatcaaaattccatagccacctccactgaagtgtccaccaacacctacagtgtagcaaagcccagcaggaaatcctagtactggactttttttggcaatattgtaataaacttcaccaatggtagctccagcttcaacccatgcagtttttgtatcaacgtttactttcaccttacgaaggtttctcagatcgattacgatgtaaggaacatcggatatgtatgagaggccgtcggaatcgtgtccgccgcttcggcttcggatttgaaagccatatttcttggaacaatttaaggtggctttgatttggcagacactgaatggtgtgacgataattgatggtttttgtaaggaagaataagtgaagcggaagttcatagctgatgaatttaataaagctaaatatgatgggttgtttggagagtaaaggacttcatttttaatggaggaatagtttgacaaatgttgcgagagacagtaatcaaagtcatcaagaatggtagctgaagaaaaattagataatgaaaaaagaacaaggatgaccacccagagaaacattaatggagaaattaatatgaacgacttcataatgttcttcctcttaattaagttagtaatgacataatgtatatatataggtagcttctatatatattagaagattattgagcaactaaccatacaaactagttattaatttaagacttttcacattctaaaatatttgatttttttctttgaactaagctatttgattgttaattataaatactaaaatacttattatcatagtttgcaattagactaataatgcataggataatgcttcagt

SEQ ID NO: 21012 - DNA, 7042 bp, Cannabis sativa
  modified_base (44)..(53): a, c, t, g, unknown or other
tttcattcatgttagacttctttttactaaaattggacaaaagnnnnnnnnnncaacaatctcaataattcaggaaacatttttaacgactttaaaaatttaaagaacatggtacaatcctaattaacctaaaaaaaaatgttcgctcatgaagcaaacaaactcagctacactaaagctcagctacttcaacactaaagggcaatcataaaagaaatttttccacttttgatgttttatccacacataaattaaatatttattttaaattgagaattggaaatagtagaagtcccatataggctaatgagtgcaaattctgcttactctttttctataaatactacaaatttataaaaaaaaattacatatatagaataaattgtatatataataaaatttaattgattattcggttgtaaataatgccgaagacacaatgtaatcggtctttttggcaatatgttgtagtttagtataagaagagagtttgtaatgtattgagtataatataaacaatacaatttaacagataaactgactaaaaattgtttcgctttcaaaaccaaattatataaaaattattgcagccaacagaaaaacatatagtttattttgtcacaagtgcctacattatggcaatttaaaaaatggaagcaaaaacataaaattagagaagaaatatagaaagtgaaaggagcctctatctattctgaaaatttaaaaccttaatagacaaggcaaagatgcctccaaagagcaaaccatagaagacattgaccatggcaacgactccaatgaaatcatgtttgtatccaaaatagcttttcaagtattgtttcacagtttcacctgtttcggcatccatcacatcttcaacatctccatactgtgatactaacagtccgtacaaggtccacgctgttggacaagcccagtagtaccacctccaccatatcggtatcctctgttgtgtgttcgttcatattatcaagataattgaaactcgattcataacaagaactagttattattaaaaagcaaacttacagtcctaggaacgacaaatccagagaaaaggttccatattgagtagaaggcagccgaaataatagaagcaacgtgattatttggagtgattcccacagccatcatgccatagaaagtgaagtaaagcatcgaaaagaaggtgaagaagagataccaaaagaactttacagcagtccattcgaaacccatcattgcatatactatcaaacagtaaactacagcttgacagataatatatggaatttcaactaccacctgcaaagatgaacatatataagtatactaaaaatatgtatattatattggtagaacactattttagacccgtgttttacaaaatttaccgatcagttattttgttttattaaaatacaatttggaatcgaggtcgatcttggtctatattttttatcctaaccctgaaacttcctattccctaactctaataattgtgattcaatttctattctaatctattcctaactaaaaaataattggatcaaattgagctcagaataatgataaaatgagaccagttcttgaaagtaaataaaggttattacctgtccaaatgtatagggaaaagctgaaaacattcctgcagccttttctctgtaaaatactgttctttctacgccaactactggttgtacagatgatgaattttggacaccaataaacagaacagcactgtacatggatcccaatgcgttggtgagatcttgtttattggacctgtaatttcatcggatacaattaaaggatgattatttatatataaataactaaaagatccttattgtagcttattaccttttagatcccaagtcccaaaacattgtgccaaagatcaaggctatgaaagtggtaaacatgaatctaacagcagtgtaaagcgggtttcgccagtatgactgtcgttgtttccataagcaagcaatgcattgagtgtacaaagatcgtgagaactgagttgggaaataaagatccttagaatcaggagctggagtgctcaattctttgatcagttctttgtttctcctgaaggtggagaacatgtattaagtcatttttcttctagctagccaaacaaacagcatactaaaatatgatgcaaataggtactcacttgtataggtctgaattcttgtaaatgttggcgaaatcaacacccaaagccatttcttgtgctgagctcgaaacctctaacatccaagttcctggattgtaaccttctttgattttactcacaccttcaatagccttgataggccagatttgcatccatattagcaatatagggaaagagggaaagttaagcattactgtaagaggctcaaagaaaaattatggttaaacaaaacaagtacttagttctacactacctcaaaatagttgattagatggcaagaatggcggcctaatggtcccacgtatatctcttctcctccaatcttcaatagaaataactgcaagtgcaaaacatgttgaaattagtaagttgtgaaaatgataagaaagttaagattaggatttaggagaatccttgatctcttagtcttacctcatcaaaggcttcaaagatgtcaatacttggttgatgaattgtgcacacaacagttctgccagtgtccactgtgttcctaaccgttctcataacaatagcagcagccctggcatctagtcctgaagttggttcatccatgaatattatagaagggtttgccactaactcaactgcaattgtcaacctttttctctgctcagttgagagaccattcaccccaggcaatccaactaatgcttgtctaagtggaacgagttccacaagctccatcacttcctcaatgaacatctgtccaatacataacaacattatatcatcaaatcctactagcttcttttctctttttcatttagcttgctatttaaaaaagaaattacctttctggtatccatatcaacttcagacggcaaacgaagccacgctgagtataggagggactcataaacagtaacataaggtgagtggatgtcattttgctcgcaatatccagaaattcgtgcaaatgtttcttgcttctttgggtaacccgaaattcgaatatcgccttcaatatatccaccagtttttctaccagcaagcacatccatcaatgtggttttaccagctccactaactcccatcagtgctgttaagacaccaggcctaaagctaccgctaacactcttcagcagaaccaatttatcctcaaccacaccttgacccttcatttcctgcaggttcaagtaaaaaaaaaaaaacatcaacatgcttaatcatctgtgatcaaactcctaagttgaacttgaattcataattacaatatgccatttagaaagtaataataacttacttgaggcatgtccactgagtaacaaacatcatcaaaacaaatagaatgcggttcaaatggaagaatcattcctttttttttactctgattttcacccatgttttttggtctttgcgtcatttcaatgacttctccttcttcgtcattttggatatcaccactctcagaattttcattcgaaacagcttgtctctgctctagtgctgcacaatatagtctaggaaattatcctctttttttttttttggagattttattaaatataaaattaaacaaacttacgattaaggtaagtgagagccaaagtgtacacaaagttgaaaatgacaacatatgcactcagcgccgcaaacccaagccagtaccaatatgagtcagtaaagaatcctcgtgcttttaaaacttgaaccccaagagtttctgttgagtttggtggaacctaataaaaaacaatgagtccaaccacaaacaaatcaaatgatttttacaaaaagaaatatctaactaaaagaacttccaaaccggtaagtttctcaaaacattttacatgtttccatttgtttccattgaactcgttaactacaactccagtctgaccgtacatcaatggtgatatccagtaaccccaaatccaccaacctttgatgaaatctgtttgtaatcaaaagaaataagcagtaccatccattaacaaccgaaaaaaaaaaccatgttttctttcgagtttagtgcagtaatgtacctctagacaacacaaaaccgccaagtacgaaaagcaatagcaaggaaaatgccccaaatgtgttggctatgatcatgctcctaccaattgacgcaatagctcgaaacagtccagaggccatctgattaataatgacaaagagaacatatagcttaacaaccctgcaaaaaagtgaagataaaataaaaaccaagcgctgaaaaggaacatggagcatcatatccaaataaagtcactatatagtttttcttatctaccttccaaaatacggatcaaacccaatgctgtagtatgtaatggtcatccaaactagtacttcaataaaagcaacaggggccttataaatcattgatggaagagcatacgcccaagcagggaagaattgaagatctctttgcttgtaaaacactggaagcttgacaatggtcataggtacctcagacaatccattgaacataatcatcaacgtggagaagaacaaagcaccaaggtagattgaaccatcttgtaaagttttgtgatgcatcttagttctcaggaatattgtggcagaaatcagccccaatataccaagctagaagaagcaaataaacaaagattaataagatattatatatgtacttaatagtatacgaagaaactaaagaaaagaaaacctacttgcacaatcttgaagatgtggacgaaggaatttcttttcatgagtaggaattctcttgacatgcatgctttcaagagctccatcttgttgagaccatagggttttgttgtcaaagcagctgggtggctcttggttttgtcaaatggaattgaaagatgttcaactactttctttccaacgtgaaacgattggaatgcttcaacaaattcattgacagttacaaacttgtaaggttggtcactccttgcccaatattgagcctggtcttttcttgatgttacctatagaaatcataacaaaaatagtattattagttttagttctatatacacaacagacaaaagattaaacaataatgtatatagtatttagaaagatgaatagttgaactgctcacctcttgaagaaaatcagcaatagccttcctttctggacatttaaaaccagttaattcgaagaactcaagcacattttcacgtggaccctgatacacaatctgaccatcagataaaagaatgatgtcatcaaaaagatcataagtctctggtgcaggctgtagtaaagagatgacaatggtttcttcaaagatgtgggcaaattgcttgagtgagttcacaatctgaaatgtagttgaactatctaagcctgttgaaatctcatccatgaacaatgcccctgctggcccgacgagcatctcccctgtaatttaaaataaactatcattatattatttttctattaactgtggtgaaacaataattacatatgtaaattgctttcaaaaaaataattacatatgtaaattagtgctaaatctaaaagttttcgttaaataatggggttcaatacaatgatttttttaagggagccaaaaaaaaaatcagtaatatagccaaagagatacagcttaactcaattaagtaataatttcgattagattatagttttattcaatcctgacataagataaacagaataaattaacacttggttaattaataatctcgataaaattaggcaaagagatatataccagttgtgacacgtttcttttgtcctccagagatacccctcaacatttcattccctaccattgtatcagcacatccttccaagccaagaatctgtaattaaggcatccttcagttcagtaactaaattgtacaagaaattaaggcatccttcagtaactatatactggtttttaccttaataatataatctgtgatcacacttgattcttggccttctgctgaagctgcctacaataaagcgttaatctatatattagaataagagtaatactagacccatactcaaattacacaccatttacacataacaatgtgtttatagttttagtcatatgcagttttacttgtgttatcgagattaattctacatcattctgtgtaaaaaaaaaatgtatgtaatttgagtatatcacaatcatgactcgttaggataatatcatatagttataaatcttttagtacaataagttctaaatcccaccttcataaatatggctgcacatggaatcaaaaagttatttcttgagatgctatgttatatatactaaaaatttaagatgaaataaaatatttatcaaaagttatttgagacaataatttgtttcttatgtgttgctataaaatctttaaaatttaaactagcgggttagtgagaacttcccaacataagcatttcttcaaaatatttctactaaacatgtatagaacttgcaggttaaattctttctttttgcacaattcaaccccaatactaatttgggtagcatggttgatttactagaggaagaaggagatatatcatatatgtctcaatggaatttgttgaagattgttaaaaggctttgttataattgattaaaaatatagtttataattttccattacagtttaaagctacctctactagtttttttcaaaaaaataaaaaataaattgttaggaagttattattttaaaaaaaaaaaaattgttcagagagaatatttgcaccaaaaaacttatcattgcactcaattttaataattatcattttacataaaactatatatcattaattatattagtgttttttttattttatttcttccaattcatattcataaaaaatatacatatcaaacaaaaataattatatttcaaatattataacaaaaaaatt

SEQ ID NO: 21013 - DNA, 2015 bp, Cannabis sativa
aaggaccaaaacttttatcttttacttaggagggctttcatgtaataaacttttaagacaggagttaataatccacatatctaacagaataaataaatgaaatgaagttagattggtagacaaaaaatatggactgtaaatgtttacatgtatatatgttttgttggctgtgttgaggcccagaggactaataattacataaggagaaagaataaatgtattggctttgtaaaatttgcaggaacgggacatggaatgaagggggtaactgtgatatccatgtggaaccagaaacagattacaagaaactcgaagctgatccaccctataatcagatcatgtataacgcgattaaacagatggataatggaaactggaaggtcaagttcttgaacatcacatatctaactgagatcagaaaggacggtcacccttccaagtatcgtgaacctcgaaccccacaattttctccacaggattgtagccattggtgcctacctggagtgccagacacatggaatgaacttctttacgctcatctactatcgaaaggattcaaaaccaaatgaagtagaagtgaaaataatacctttatagtttgggaaaaaaaatcagcttcaactgtacatagtcaaggattgattctactcaagccagttcctctacactttcatcagagctctcttcgctggtttcaatttcctttaccttctcaagttgcctcaagagatccaacctttccgatccgtatgtagagggtatctgtcaaagaacataacagtgaaggttcatacaagtctcaactccaagaaaaaatttcaaaactacgtctcctcagttttgaaaattcactcaccagagatggtacatatctctgaatagcagccaacatagctgcatgcccgactgcagtaacctgttggaaacattgattctccatagtaagtttcagtaggtcaaacagctagcagatttattctgaaattgtaatgcataaatacaaaagattgttgatccttttatgtatgatgatggagttatatgaaatgaatgatctattaagtgaccctttgaaacttaagaaactctgaaccaatccttgaacctactgtacctcaacctgatcaccaatggataccttctaaacatgtcactgttgacacatggtactagcactgaaacaacataactactactccttgagttgagatcaattaccttaggatatacatgattcagaaggcataaggcatagtaatcttaaaattggggttaagaacctccgtaacttaattaatattgcttccgaagggaactcctatctcgattatcactggagaactacttatatgtatgatgattgcactaatttgggacgagggaaagagatgtaatatattttggcaatatatagtcaataaggattcatggaatatagtgactcacaggaagaagcattaaaacaccaataggaacaactgatgctaagtcagtcccagttcttcgtagtgctttcttctctttctctgttagttcatctcctaccagggcccttctaagcaatcccattgaagcacctacgtcaatggctagaagctgtgttccttgccagacatcctgtcaaagatcaaattttcaaatatttgaatatttggacaaaattttcaaaaattgttttccagggagaaaaagagaaggaaggaaagagggagggagggagggaggaggggagagagagtcatactgtgctagcttctttcagcttgtcaaatgatttttcaataatattttctttcttctgaacctggaccaattgagtggatccagcatcttcgcggtatttataaccttcttttccaatctcaatatcctggtagagaaatgtaggataacaatgaacgaagagaatccaaatgacaaactcaagtagaaacaagttttcacattactgcacataacttcaaaaagatcacgtaattgaaaagttaactacaacagccagattcataattgct

SEQ ID NO: 21014 - DNA, 2934 bp, Cannabis sativa
ggttttgacacgtgttgttttgagctgttttgtttctttttcttaactcctgtcatttattgaagttcatcccttttgccttcctcatatagtgttattagatgttgctactctcaccacccctctatcactaaattatcgagtatcatttcgtcagtgcagtcgagttgctggtggtcgttcctttatttcgtagtggagcgaatagcacttgatagtgcacagattcaggtgctatttctatgctactgaatctgtgcacttcggtatactcacatatttcttgatgaacttttttttaaaaaaaaaaattctagtggttcatctagcccttgatgtatcaacattaaatccgtatccacttctgtcagcttgatagtctaaaatttgagaatcatatcctagtatgaatttactgttcccaacaataaattatggaaccaatgtagagcgagtcctctaaaaccttgagtaaaggttttgcatttgatagcttcaaggtcttctaaagggactgaagctgtcagcatcttttgtttcaactagcatacatatactctgaagggtcccctattctagtatactcatggagctttggtgctacgtaaaatgtggagcctctactctaaggatatgaattctaaatgggatttgcattgttccctccatccttgccaatccactattcactcccaactagctttttgcttctaacaccaagagcttattctagatcatctcctgcttgtccatgtcttttgattgaggtaaggcattattatgtgctatttgcacagccacgcatctcttggatgtggtacgaagtgcctcctcttctacactagttttagcgtcttctctattcctttgcagttgatcgtgtgtgcgttatgtatctgcatcaaggctatttacatgccttgttgatctgtctagagtttgattgtgttattccaatttttacccacctaatgtggcaccttaacgtggcaaaaagcagaagacacatgaagaagagcccatcactggctagctagagtagtgttgtgtggttcctcaaccctcaagacatcaagatcatatggaaagtcagcactgaccgaccaggtttgtaccgtgcagccttccatccttcaagatccaatagtttcaagatggactcaaacaagacagtatggagacttacaagatcaacctcttcaaggttctgaagcaagttcattctgatatcagaaccaccaagcaaagacagagatatgcaagcactaggaagattcttgctggacctttagctgttcggccaggggagatagccccatgcaccaggtagcctccaaacatggctggctggccaggcatacatgtcacgatccaacacttctattttcccacaagccttctaaatcttcctcaacactcctacaacttcaaaacaattcaaattgcccacgaaaataggaattcttcatcaacaaatagcagttctattctttagggattttcggttatctattttgtatttcaaatataagatgtaatttcttattttaaaaggatattttcctatttgacataaataataacttgtaaaccttaacactatataaaaggttcttaacccaacgtgaaaaagaccaagctcaggacctcaacttgaattcatttatgaacctaagagctcataagcactaaggcatagaactccctctcttttcaagtttttttcacctgcaacacatattctcattattataatactaaagagagccatagctaaaaattacaaggttttagcatgtaatttgcatggtattatctcaggagtgaatacaacaaaaagggagtaggtcattacttgatcaaaggggtcgaacctctataaatccttgtgtctatatttattatcatttcgcacttgatcgccattagcgaaattcgatcctagtcaaactccatgcgagttggctaaatttacattcaatattttggtactttcattgagagcccaaaattctcgttcagaaagctcccatcttttttatttccattctacatggctgtcacaagatgtgagaattctactgaaccacgagaccctatggctgtggatcctaatgtccaagtgccacctattatgactaacccaagcatggctactcgaccaccaagctccggccagttggtcggcacctccatcacataggtctagccaagagaacaacctcctactagactcactatccaatcaataattcaagttcctagcacgggggttatgctggtgaaactggatctggggttggtaaccctagtattgatgaacctcacgtggacttaggggatgacactgaattttccaggctgagagaggcagtaggacaagtttagggtcatacaaatctccttcatcatgaccaacaagaaacacgtgctgctattggggatgctttcgcccagtaaagacatgaattccaagagtggatggatcagcaagtcacgatcttccaagcccaacaggcagagttgaaccacaaaaatagggaggctaacgacctaatcagatcatattttaataattttaattataaaattataatattcagtattatatttaaattttattattattttaacttatttataattgataaattcatatatcaataataataataataataaattataaggttttttaatatgttgtgttgtacttttcggacttgttgcatgttgtgcttttttttatgttagttagttagttagtttatttgtgcttgcttatgtgtcgtgcctttcgtgcttctcgtgtcgtattgtgcttaaggacatattttccgtacagtgtcatgtcaatttgtagcatcgtgtcatgtcgtgctacctgtattttttgtaggctcgtgttaaaaaattcatcccgtatttacaata

SEQ ID NO: 21015 - DNA, 2756 bp, Cannabis sativa
  modified_base (33)..(37): a, c, t, g, unknown or other
  modified_base (69)..(73): a, c, t, g, unknown or other
  modified_base (103)..(107): a, c, t, g, unknown or other
  modified_base (135)..(139): a, c, t, g, unknown or other
aaatgttatttttgatctttattattaagtaannnnntgatctttattattaagtaaaactgattatannnnntattattaagtaaaactgattatattgaannnnngtaaaactgattatattgaaatgagttnnnnntagggcacaaaacccaacagctgagtgggacatggagtgagatcccctttagtgagcccaattgcctagaatgcaaatttaaagaaaatattgacagaacttccgttatctaccaaaaccatggaaacccgtttatttgcaatttgtgcgtcaattaataaggggtcgttgtgagggaaacgcacattcttggtatcctcttcagtgaaggtagtcagtagattcatcattcttggacgttgcgtgggagactataccattgcacacatttctcccttttccacctcttttaggtatcttttctacacattttggctacttcctgtaagatggggcccacttgagattgttacgacctgtccatccacgggtggtggagcgagcccagaaggatatggtgttcctagtcctggagcaagcaaagccactccagccagagttagcaaagcaagaagagaaggtaatgacgtttggggagttggagggagcccaaccccttgtgggggatttatagcaccatgctgtcccagaagtatcatgtgtccctagactacccctatccaagatagataatcaggatgcaaactcactattctagatatctcgcttagactaacatttcaatctcatctttcaaatattcgcattcatttgtggtatgacccttttctccatgatacacacatttctcgttctgatctcacatgttccttctgccatttgacatatgtagaggcttttgataatggaccatgttgcacgttgccttataaacattaccccgagtatctatcagacttgtgtattcagtgtacttaggattgtactcatttcttggcttttttatagaatcgttttgactgccccatacccaaagaaatgggtttgcgtagggacgagaccagatgcagtaggtccgtagacagtcggagaggattgaggtcttggaagggacaaagatagggctagagtctaggatgaaaaactaggagcatctgtggttggagttggtgcaggaggaactccaaaggcttgaatataagcatcttcaaggttaatgatgccttacgccttagccataaactaattcaaggtctcagctctcttcctttgcatctctactcataataatgagcctatagccagtccggactggagaaccatcagcttcaaattatcactgaaaaacacaaatagtcttccacggacttggtcaaatttagagaaaaacacaaacacttagcatcatcactgacataggcaacctacatcatcttgttacatttggccatatgtgcttgtcgatcagttgtccctccatacaatttgatgtggggcatcttaaagttttctaagattggagttttcgtgatcattctgacactgggctctgggtcctcatccttaggatctaacaatgctccactttggtttttgactaacttagtcaacgcaacaatttgttcatccaatcttttggtatcactttcgaggagatcacgtcccctcttcttatcacttagatgatttctaaagatcacccccacgtggccatacgtttttgcagatctgtcgtggaccaactgtctctggagtgactggcaaggatcctcccatcttggttaacagaatcactcaatggatttacacatcttctagtcttagagaactttgtggctggtccctttgacatagctctgcctcgagggtcagaagggcatctaggctcaaaagtgttgtcggcccttactcttttctttgcgagggtttgaggttttagccttattttgtttatgagctcaccctcacggcttctactgatgggtatccatcagtcctagtcaagtcatcaaacttactctaaagttgctccatcatttctatcatctaagcagtaagtttttgttgctctactcaggctgcctgtgtagcttccaattgtttagttacccgtaccaaacttgggttatgttcataatagacccatcttcataatatccatctctatagtaataatcatcattgtcctcttcaccatcttctacattttggccatcatcgtggtctcctgcgactttctcggcgttccttttttggttctcagcagcagttgcaccttcttcatcattttccatctacgcatcgactgcatgagagttttcttcttccataaccgtataaaacagagttcctttaccagtagccttttgtgttttcaccatgatcgagggatgaagagtattaccaagcttccttcagctctcaatggaagcaccaaaatatttaccgagtttctcgaaaatcaaatatatttaaagcttaaagaaataagaaataataagaagcaataaataaatagattttttacgtggttcaggtgttaatgatccttagtcgattactcaaatgtatcggcctctttgggcaagtatttagagatcacaaaatggttacagtagggtttactctatttctttcactcctcttgaaagagagagagctttcttggaatttttgtagagtgtctggaagtaaaatttttcctcctcctctttaaagaaaaaatgggagtatttataggcacatatggggtaaagggcataccctttacctacct

SEQ ID NO: 21016 - DNA, 1858 bp, Cannabis sativa
  modified_base (1496)..(1496): a, c, t, g, unknown or other
gagaatggtcttgaatggatgagggtggtgtgtgatcttaagcaggccttggtggtgagtatagccaaattcatgggcagaactgtcaagaagagccacaatcgaaggatgagaaatgaggttggttggtaaccacatcttctcaacgacgtcgtcttctcttcccaccaatatcggaacatatccctttcgaatttctccacatatttttgatcttttaccaatatttaacctcatatatcctaacttctttcccatatatattacgaattattactataactatataacacttaataagttcttataatttgcacctcacaggacaatttggcaaccttatatatatagtactcttcatttaaccttctgttttttaatttcttttttggttgtctttttcaatgataatattatgataatcatgtattaagttgactttgtataagcttgaaaaaatggtagtgaaacacatattgtagtaatctttaattattaaaaaaatgaaagggtacaaaacccccttagcatgcaaatgttgtatggtttttttagtgtgtgaaactatatttttcttttctttctctactatagtagtgaaatagacttgactttacattaatactgttgctattaatattatatatacagaatatatatgtgtagtttatatagcagcacttaattaattatgttatcatcagtgggcgtgtagcaataatagagctagaatatgatgtgtgcaatatataatgaaaatttataatatataaaatacatatatatatatatttaactgtgttttgaaatcaaaatcagtgtagaggcatacaacgtaccgaccttaaaataaaatattaattgaaatggtgatgactaagaaatatttttatataaaatatacattcgtattaattaattgatattaattatgtaagcttcatcatgaataacatacaacagtttctcattcatctttcatgctgttcttatttaatttttaattttaataacattcaacttaattataaactaattagtattggactggagcatatatatataaatatattttgtttgattagtgtgtggaaatggattagctaatggtatatatttcgcaaaacgatatgtaatatttaaattttaaaaattaataaatgtgatgagtcattaggtaattagaaatgatgatcagtgttgtacaaattttattatttgcatgctatgcctataaacaaaatcctatatcatatatatgagatatattggcggttgaattatttaaactttaaattttttaaacatttaggcacaaaaattaattttttgggggcaaaattatctaaatttctattctgttttgctctgtactcctcccttcaaatatcatagttaagtgtcagagtggagtgcccatgtgtacacatttgtacacatgaaaaatttttagtggcccatgtaatattacctttaaaaaataattataaatattnaaaaaattaaaaaatcaaaaaaaaaaattaaaaatatttcttttcgggatattggcgactacaccacccgactttaaattttttaacacttaaccacaaaaatcgaaaataattttaaaaatatattttttttattttttacttttactttttttttttttttattatttttcttcttctttcttaaactttctaaaaccctagtctctcagccctccctcccaggccctctctttctctctcacgtctcaccacccaagacctcgccggagctgaagcacccaggccctcgctggagccattttccctcactttctctctcacaatcttctccttcccagaccctctctctctctctctct

SEQ ID NO: 21017 - DNA, 6029 bp, Cannabis sativa
  modified_base (2419)..(2433): a, c, t, g, unknown or other
ggctggggtcctagttggtgttaggctctatgagtgctttttagcattttttcttagattaaatatatatatatatacaaaggattatcttatatactattttttaacttttttattaaaaatttacagtttggattgcttctgtagttgctctagtagtttttatgtgaattgttatgtgaattttggtttggatttatgttctgttagttgctaggtggatttccgtaaaaatgtgaaaaaaaaaattattttaaagtgtaaaaaaaaaaaatcctaaaaaaatagttaatcacactaatgaaaaaaaaagtgtattagagataatatgagtaaaatgtgtacaccattaaagaactaaattttttaaaaagtgttaaaatatagcactgtaccattattttagtacgtgaatgtagatgatcttacttttgaaatatgcattttcttaagaagatgacacacaaaacacaacacaagacaagaatacatacctgagtttcaaatctttcagggaggttgttaatgaaagaaatagcctcagaaagtttagcagcacgagtgatctcatcaagtgaagcctcatctttcccataaagaatattctccctaatgctagttgcaaagagtgcaggctcttgattaacaagtccaatttgttgcctcatccacttgagatcaagctctttgatgttgttcccatccaatagtatctcacccgaaacaggttcatagaagcgttcgattagggaaatgactgtgcttttgcccgaaccacttcccccgacaagagcaacaatcttccccgaaggaatgtcaagagacaacttgttgaagattgttacatcaggccttgatggataactaaatgtcacattgttgaattggatgtgtccctcgagttttcctaactttcggccactcatggcactagacttgcttgcagtgttcctctctatcatcgcgaatatgggatatgctgctgccttagctcgaacaaatgcagaaatgtctagagctgcctgtcctaatgacctgatcaaattcataagcaaacatgacattaatcaataactacattttaatataagtacataattactcaatgttattttttggctcaaaatgaaaatgaaaatgaaattataagttgtgaaccaatttataaagtatctgataataaatacaattttttttagagtaatttgcggtattataagtttaatttttggcagtaataatagttatattactggaactcacacttcacactcagatacttacagaagtatcaaaattataattaccactaaaaattaaagttaggtacttatttacaactaagagttaaacttaagtatttatgtcgtaaattactttttttttaaatgttcaattttaattttttactcaagtcacttaaaatgtttagatgagtccggcttactttatgattattagcagtgcattcattcagggtggataagaaacttacaggccagcgatgacgacgttaagcatggtagtgaaagactcgccgccattggctatgctcttatggacaacaatgctaacgtaccacacaagcaaagaccaagagaggaaaagggtgcaatgcatgaaccccaaacccaaacccttagccaaccctgcttttcgtccgtacatgtatgtgtgggcaagtgctgacgtgtacattttcactgccttttcttcccctgcaaatgcttgcaccgttctcacatttcctattacctaatcatcataataatcatcacaaaaattaggtaagattaaaattaatgctttataaaataacatttaattatcattatgtgtaattaatttatgagtggtgctagggccggctttaaattaatttgggttgtaagaaaaataattttttctggacttttttttataagataaatagcatttttaaaaattattaaaaactaagtatatttattaaaagttcgtttttatatttggcccctgataggagtgggccctaattgcccgctttagtgatgaccggccatggcgtcttatgattggttagagatatttcctaaaaaatattatgttaagttagactaaaacgggctaggctcgcacctaaggttcactcattttataggctcaaataaaaaaaatataaggataattacataagatgcccttttttgtaaaaaaaattatttttttatgtataaggaattttttttacatttttacggtttttcttaaaaacaatataaaatcaacaagaaaactacataaaattaatttgaaaataacatttacataacatcaaaataacaacaaaaaataacatacaggtaacaaaaaatcaacaacaaattaacaagagtacaacataaaaagaccgtagtttctgtaaataaaatcaaaaaannnnnnnnnnnnnnnaaaattccgtgaaaccgtatttttataattttttgttatttttgtatatttgtgaaattatcccaaaaatatatcttttaataaatatacattttttttgaaaaaaatttaaaaataataattactcttgtaataagagtttaaaaaaattatttttctgagacaccatacttaattatataaataataatatgacatcaattttttttttatcatttctcttaatttatgaagaggaatttattaaatccaagtcaccatttgcatgttttacaacgaacactgtctttaatgttatatagtggtaattaataaacaaccgcaataaattaatggttgatgactttatatgccatacaccaaattaatttttgtacagtaattattcgtaccaactaaactgacaccattttttaaacatacatgaaaataataatgtcatttgcctagctagctacaatactatcataaaaatatacatgttacccataaatgacaaaaaaaaaatagactacaccagcctcttaaaaagtagggcatcatttttaatatctcaatttttttaatatgatattgtatattataaataataatagatatcacaagttttttttcaaaataattttttgtgttaaattacatttttaatacagtaaattatttatttaaaaaaaaattaaactatttactataaccataataaaaataaaaaagttgaattataatttttccatacaaaaccaacctaaacctaatgaaagtgatattcctagctatagagctaattaataagaagaaaaaaatggcattatattattattatcataacatcaattgatgagaattgttaaaaaaatattatttcaggtagctagcactttttttttggtgtaatactaatattagtgtaattaagcatgagaccccttataacttaaaaaaaatagttttaaaagaatattgttaacaaattgtgaggtgtcacctataaaaggtgtttagcatcactgatgtccaatagtgcattgctattgagcaccaattggacccaacatcttctataagtagcgctctacgattagtaagcgatattccttaaaagttattttttaaagttatatggaatctgatacttacttacactaataacgatatgacaccaaagaaagtattttaaccattctcgtatgtacctcttcggcgatctcaccagccttgacataagattttcgaaccctagcaataagaccggtagcaatataagcgtagacacctccagccaatgcaattaatgggactatagacagagtcaccaaacttatctgccaaacccttgcaaaccctactatgaatcccaccacaaatcggcttatgtaatgcaagaaattacccacctgcaagaaattactaaaaataatcacactttttacaccaaaaattattacactaccataaaaacactaaagtagttgtaaaatgactataaatttaccattactatccaaccataatagtgatcactgtgtgtgtatatttaatgtgattattttacatgttttttattattattattttatatttttggcaaagctagaaatatatgcatattattactaatttactacataatgactttcaatgttaatgaattgaaaaatgctttgaatattattcttctacatctcaatatcgatattaatacaattaaataataatttttaagatttatcactaactaattttaatgtaacacgtttagaaggtgttaagtaccactaatgcctaatagcaatgctcgaattgaagaatattaaaagacaccaataatacttagagaaatattaaagggcaccagtggtgtctagcatcctcctatgtgtcaatatcgctattgattcaatcaaagtatgaggtctcatatagtttaatataataactttttggaggtatcgttagctaatcacaacgcaacatgttgagaaattattaggcaccacctgtacctaatagcaatactcaaatgtaccatcctcttctaatgaatttatttggtacctaattaaattgatatttgatgtccaaataaatatgaattcatttccaaaaaaaaaaggtgagtttgtgtagctggcaaaaccctagaaaataataaatgaagcccaacaattcatgacacatagccccaacggtctacccggctcataaatgttactaaataaataagaataacgctttgcatttattcaaaaacacacccccacacctttaaattaaattaaaaccacatatatttataattaagattaatttgaatatgcatgtgattatatttaattaattaattaattaccttttcagaaagtgcatcttgaacaacaataatatcacttgtaatagcagaaataacttcaccagtagaagcttcagtatcaaaaagactaatatcttgacttaacattgctctcaaatatgccattctcatctttgctgcttgtctttctccagtatgcatccaacaagccacctctattatatattttaattaataaaatcaaccccaaaaaaaaaataattaaataaattccaaaaataattaattaattaaataactatatatttatatgtacctgtccatgatgaaaacaatatagctatacttagatatacaaaatccaacgaatactgcacaaaaaattaaaaaaaaatggtttatatattaataataattaaattaattaattaattattatacataaaatatatttatttatttatttatttaccttggcaactttgtgtgaagcttctttgggaaaaagataagccattccaataacgtttattaattttccaaagaagataaagaaaatgggaaccgaagctccatgaattatggctccaattgtaccaatgcccatcaaaacataatcgtaaaaatctgcgaaactaaacagtttaagcaacgaaactttgttgctgttattgttgttgttattctttttagtgtcttcttgatcttgatcttcattatcgtcaccgtcgccgttaccgccgcgatgtttgttggtcttgttatccatgttataatattattggccggaaaatgtttcaagtgatggaaaaagagagagtagttgttaattttgtgagtagagagaatgtataatggatatgtaatgaaactgaatgtgtgtgtgtatttattatggattgttgggatacaactattggaaaataatatttattacaattgattaataaaataaataagtaaaaatggaaggtatagaaagagaaatatgacaaaagaccctaaagaatatttagagcatttttaatatactatttgttaaaatgtttggattatttaaacatataatatattatatgtgttatttttgtcaatatatattttttctacaagtaatcaaatgatatggggtaatttaaaaaaaaaaaacacacacacacaaaaataaccaataaattataaaaatacgatttgtacgaaatttttaattattttatagttttctagattttattacataaaatgcggtcttttaatgtatttttatgttgtactcttgttattt

SEQ ID NO: 21018 - DNA, 3148 bp, Cannabis sativa
ttcttctactttgttcggaggagtcagggctttcgtttcccaagattatggaatctcaaaaaacctctgttttcttcccttgttatcgattgggtcggctagggcattttcatcgtctattgacccttcaacatccaatggcaacggtaaaagaagaaaaaacagcgacgatgatgaagaagaaaacggtgaatcagatcccatatcgttctcggaggctaagaagctaatgaggctggtgaatgttgaggcactgaaagcgagacttggttcagaagggaaagaggtgatttcgtattgtgagcttttagaggcgtgtgaaagcattggggtcgctagaacttccgatgaggccgccgcttttgccagaatccttgatgaggccggcgttatccttcttttccgggataaggtttatcttcacccagataaggtacgaacccttcttcttcttctttttgtttttgttttaacttttttttattattgaatttgaattggacccatttatttgtgttttcatctgatttgtgggtcagctctgtttctccatagttgttgttctgtttgtttggctctctgaaatttcaccatttttgtactcaaaagattgttcctttagctacaagcgttttcttctcattcatacaagagaggaatatgctgatatgttaggtgtgtatcacgtgtttggagatgagaattttcaggggaaaattaatgaaattattacctttttttattatatatatacaatacatagtgtctataaacaaccatagattagatttgtttgttggagatgaataataatataaatttaggttttttattataaacaaaaaaaacatctctattctaaaacataaatacgaggtttggttggtttatttcattgtgctagggtaccataaacttaaggtttgattttgaattttttgattgggtggtttctcaattgactagtgatgtagaattcacatggtccaccattaacaaggaggaaggaacctatctttatcttcttctctttattttccaagaatcagtcactttccaccattattattattattattattattattattataatttttggtatttcactataaactacagtgttcattgcaccaaatgggttctattcacattcgatccaattatatattagatgttagattttattatcagatttaatctaattaattttaatcatcaaatcgatccaacatctaatgaatattgaattagatcggttctaattcatctaacattttaaatctagtatttattagatttaattaaattcatccaataaaaaattaatgttaatttttatatatcgatattttttttacgtataataatataaaatctaattattcattcaaattaaataaaaatattaattagttcagttgaatgttgatgtattagattttcagacatcccatccaatctctaatccgatctaattagatatttaaaaataacattcaattcgatccaatcacagttgaatatctaatatttaacggtcggttgtcattgaattagatcgatttatgtacacctctataaactacttcagtcctgtagttacatcaactcactttttcaatttggagtcaacttctttttacaaaaaataaaaaccacaagcatctacaatagttcagaacatcgaaatattcttaatgtgtatgtatgtgtaactgaaagtgttgtagtgtacctgtattgctcacctgtcaagccatgatatctacaatattttcagcaaaataatttagggaaagcttgtatttttcggtagaccctgtctggtttaatggttttcaagagagagtttctaggaaaattttgtatattatcgtattcgttatagttatttagaattatacataaatttttagaaaattttaaataatttaccgtgtcaaaaaaataatgtaaaaataattacataaaaaaaatatttaaattttatttttagtataaactattcaaaattttctaaaaatttatagataatcttaaataactataatgtttatgatcaataataaaattagattaaaaaattcttttgaatgattaagataaaggtgtaccaggttaaccctttaggggtaaactaggctttcctaataattgaatgatttggttttgggcagcacaagtcctacgttttgggatttctgatggattggttgtcctcattcttgtattgttgcttgttcaggtggtggatctggtaagaagagcagttcctattgctttaactccagatgatgaccccttgagagatgagctaagggcactgcatgagaagaaggaagaaattgatgtcttggctcataaacatgtccgacgaatactttggaccgggctggtcctagcgacattgcaagttgtgatctttttccggttaacattctgggaattctcttgggatgtaatggagccaattgcgttcttctccacaactaccggtttagtcataggctatgcctactttatgatcacttcaagagatccaacctaccaagacctgatgaagaggctcttcctctccaggcagagaaagctgattaagaagcacaatttcgattctgaaagattcaaagagctggagagaaaatgcagaacgcgactagatgccactgcctcgattaaaaaacgagttggcctggaactggatctagatgatgccatgcataaagattaacatgtcaagtttgacaatttttttggaggaaaatatgtttgtaacaatgtgatccctcctgtttttaagtaggtaggggacataatttttacttggacttgtacaattttgggtacttaccataacagttggttacccatcttaaagggagaacactgagagaaagtgtaatgccgggccaacttcacaaaaaatctaactaggataaccaagttcaatttgatgcatacttacatacatatacacatatatactagtgctgactttcatggattggacccaacttgatcgttttagtagttcctaaagtaaattcaagattaccagagggaattatttaagggattttttcatttttacactttaaatttttttttttttttttttgtatttttacgaaattctgcatagaaa

SEQ ID NO: 21019 - DNA, 2510 bp, Cannabis sativa
aaaggtggaccttatcagcttacaaacagaaataacattccctatggtttggaagagtcgtagtttattgtcatttttgtgagcaattgagcttgggctcaccgccatttttgcaaaacaattattatcttccatattttcagcaaaaaaataaaataaaaattatcttccatatgggcacatgcctaaaagacactactaaaacacaatcacatgaagctaataatactaaactgccacacgaaattgcttgattaataatatttaagtaaaccatagccgtacgggtcctttccctccctcaaactttgttgggaattaaataatttagagccagagctatcaagcttttgtggccataaatggaggattcatctttgatactgttaaagttattaaaggcaagccgtgtgcttgcttaataccttttgatgtattattatccttaataaatatatttggacctctttctaagttaaaatcataacctagttgatttttctccaaaacaatatttatatgacaccttttcctttatgtgcttctacaagttctattcctctccacatgaatgttttatttattttccactaaacacgtacaatttacttaatcatttccctttttttttttcaccttggtcttgtcagcgtggcctaaacaacaagaagtttatttaaattagaattttatagcaaaaatatagaaaacgacgtcggatagaccgtgcctgatttgccctcgtgagaaatggcagttggtttgaaattattatctgaaaggaaatagataaaaacattgaattgtcatatataatatctccaattactaactttcacgatgacgttagaattatgcagatcaataatgttaagatattttcttgcttcaaataatcaatagatatttctttcttattagagttccaaatagtgctgtctctggtttttaccgtgtcataaaaacaaaactagacaaaatctgctgctctatggaaaatgttgcccaaattttgtaccgattagataatcacttcttaagtgaacgaataatttttttaaacaaatgaatattaataatattgggaatatttgaaaaagataaatattaaactaacaagaatgaaaccgaaagactagcagtgtgttcatacttgtgtcacatcaaatttcgctttgttcaggggatagaagccatatcacatcaaacaatacattacccttcctttttacacctcattaacccattaataagaacacaaatagaaaattaattaaaaagttattccttcaaaattaataaattaagatatttttaatttttttataatgcatactctaacaaatattcctatctatttcagtatctctgaaaaaaaaattaatttaaaatatttaaaatatttaatttttttttttataattatctacttattaattatttaaaatattttataaaatttaaagaaattctaaaatatttaacatgtcaaaaaataaaatctaaataatttattatagattaattttttttatttatatataaaataaactatttaaatcttatttttcacgaattttataaaatatactaaataacagacccttttggggtgcattaaataatttttccttcacactttttttacgagtgtatacaagcagctcattctttccctgttgtgatatgcatattattaacagttgattttctggaggtttcttcaactttactcttttaaagggctaacattgttagtttctctaccgcattcactcaccactctcaacttacctaacacaagtctaacagtgaccgtttgaaaaaggactcacctttctctctcttttcatcttctccggcttactagccaaaaacccagtcagtagaatcgaatgagtgaaggattttggtgatattttgggcttcatttgacaaaaatgttggaacccagattcataacggttgttgtagccctgttttctctgttagtagtttggagatcacttccaaccgcggaatcagccattggagtgaactggggtaccatttctcttcacaggctcaagccttcgaccgtggtgaatcttttgaaagataacaagatatccaaagtgaagatttttgataccgaccatggtgttctcagggctctgatgggtagtggtatagaggtcatggttgggatcccaaatgagatgttagcttccatgagctcttccactgctgcttctgatatatgggttcgtcagaatgtgtctgcctttgtgggaaaaggaggtgttgatatcaggtttgattctttttgttctcttcttactcttttccaccggtgttctctttattatatttgttatcttttactttatttgtttctttctttctttctatatttagattcagttgtttgctgaagatgtatttgtaaaaaagaaaaaaaaaaaaatacttgataggtaacatgattagttatcacttgtgctttgattgaataacaacacgagatggat

SEQ ID NO: 21020 - DNA, 1539 bp, Cannabis sativa
actgagtagttgagctaagttaaaaaatatctaactttaggttgatctattgatttttgaatttgttaagtctggtaggatttgatctaacttattctgttgtataatgaaataagttggctgggaattaatttcaacagttaaataaccaatcaagaagaatagatagaaaagattgtggtttgaaaagtggaacttgctaaactaatttggccaggttgtaaaaacagtttgtcgagcaatacaactattctcatttaacaataaaaatgtctctgtttgtcgtatatatagaatggcatacagatacagtagtaagtatagtagtatatactgttattattattatttgtttttctactttaatatttgactttttattagtttgacattctcttgaattgaaaataagacagacatccatgcatatatatatctatatgcatgtcagtcatatatgccatggaccagcactaccaaacaaagtaatattgtattgctatgtgtacgtattgttgtatagatggtagtgtgcgtggaccaaaaaattaaagtatatctatatgataatctttttggagaaattaactttatggtgaattattcgaggattcgagtatgttcaaaggtagaacacagaatctatgaatatattatggaccccttcacggtcaaaaagtaagtctctgacattccaattccatctcccccatagcttacccattatatacatataaaagtcaaacacatcacacacatttccctcgccactacatatatacaaagaatatgatttctttgtataaaaataaataaataagttgtagtctctaacgttttttttttttttttgtaataataaactttttcctctctttttatagattgtagatagtgaagccacactcattatatatgtcattcttttgattgttttacatctctaaacactaatcttgttgttaatattgttactttacctaatgactatcagattcacatcaataaatttagcaccgtaaaaatatatgataagctaatactaatcgcgatgtgttatatattccagaatttaagttcaatttattttctcttaatgcttatcttgaacattgtcataataaactcacttttacttttactcaatgtttgattcaggatccctccctgactagctaagaaagttggccaactgtttttctttgaacaagagcagcattttctcacttccaatatttctatctttacaaacactacttgtactttgaaggacccctggcatcttcgccttggtaatccttctatgaatattactagtatactaaataaaagtttacaattctgtgaaaaacctttggattatgtgtgctctatatgtcattttgctaaacaaaagcggcctccatttatttctaacaataatgttgtcaatgttgttttcgatttaatacaccttgatatatgaggaccttttcatattattagcattgaagattatcgatatttcttaactattgttgatgatttctctcgttacac

SEQ ID NO: 21021 - DNA, 5516 bp, Cannabis sativa
  modified_base (2561)..(2573): a, c, t, g, unknown or other
gcctgcatataaccataaaactaacattaacaggtgcaaataaagaaactcaatcaatacacacatttaaaagctcaagtgacttagataaggcaacaagagaattgattttaacttctttatctaaaaagtacacagcaattggagattcataatgtagaaactaaatgtgacatgacatttacaatgtcagccttagtcaacagaaagaaagcagtaaatcaccacagaaaccaacattgacaacaagtgagtaatagtctactagacaaatctgataaattgttcactaaacctgaaaatgttacatgagaagggacaagattaattaaatatttccttggtgcagaaggagctaaagtacttacaagttagtgacagttgggttgccacgaaagttggcagtgatgtattgggataacaagtttgtgtaaggccttgtatcaacaatctcatctgggtcaactccagcaagaggattaccaactgggtttctcacattatccataccactctgcaggcttgtcaagccaacttcagctagacccttaagaatatctggtacatcaggcaaaactactccacgaatttgccaattttgccttgttgtcacatctgcacaaccgtcctttccatattttctaatcacactagctaagtaccttgtctgagcacttgttgtgaccccatttggtagctttaacctcatcataaatctaccatctgattaaaacatcattcaaaaaagaaagctaactttataaacaaacaactcaacaagatgtcaaaaagctaaatcagcctaaggatttgaattgagtcaacaaaaccaaaaatagaaatctaagtgttgacacttacactgatgctttctcctgtgaaagagaccaagccactttagcctgacatcaatatcatccttggtactcttaaccttatcaatctcttccattgacatcttagcaaggtcctcaattccattctccatgaaaagcttcatgggctctttctcaatcttcactttctcttgaggattaataccttgtctgaatttctccttcaaaacccaaaacccatctttctcctccactcttggctccaacctcgaggcatctacttccaccggggccgctggtggtgctgcagccggagtggtggcttgaagccttgttttgtggttagaagaagaagaagacaaaggaagagatagacaacgaatagaaagtgatgacatggtgaaaaaaagattgaaaatttgagaagagaaagtaaagaaaaggaaaggtggtggttgtttatggattggcaagagaaaagggtaagaagggttgtcatttttgtaggctaaaggagagagatttagaagcggtgaagagggtcacaaagggtctcttgggtggttctaaaggtcacccctttcatatcaaagtttcaatcttgagcgaacgtggtatttcatcttgacggcggatcgtgtgtgtgtatatatgtatgtgttgtgtttcagtttattatgtcttttccatttttaccaactgactttgaatcaatctcaaaccttgtgtgtttggaaagatattgtgtaattagaagtaattagataatttagtactcaccatgtaattacaaccataattacactgtaattttataatttaagataattgaaagattctaattgtactatctaattctcatgtcttgaattgagtgttattatacttgtaattactaaaaaaatttaaaatattattttattgtataattaataattaactaaacaaaatattaagaatttatatctaattatcatcttatatttaaatacattttgtattattttaaagaaaaatactaaaaggtgctaatagtatttactgtttagtaccacttaagtagcatatcgagtctcatataatttaatataataatttttagaaagtattattagacacctaatagaaatactttattttaaaatatagagtaattactggtcattataattactactttaataattatctcacttagtaattacacaattatttttaaatacaccctatactttttctttcttttcttgtatgtcctttttatatttgttaattagttttgagtccttatttcattttttttattgtggttttgtccttacatacatggaccaacggtggtggtgggtctgacccacatgatgtgccacatgaattgaatggtaaactattttctgccccaagttcaagttgtttctaattttaagttatcttcttctctttgtaagtgttaataaaattatataaatacattttcatccattaatgtttgacctttatttattcatgagaatatctatgtataattctaaatcataagatatttattattatttaaagaattattatcacttttccattttgtttgtaatatatatagaaattaaagaacaagttgatggcacagatgagtggtaagggtatattcgatgaagtttccttctcatccaaccaagagccacaagccccaactctaaacctatacaaaaattattattattattnnnnnnnnnnnnnttattattattattaaaaaagaaaaatcataaaattaagtaatgaaaattaaaataataataataataacaagcccccacttctcagtctcgacccgccgcagccagccacactccttcccttgactttttttgcttttttctttcttttttttttttttttaattttgaataattgctattctagtttttaatcctattttcataatctatgtgctgttttgttttacttttcctactctctcatcattcactgaatctcacctcatcttttatataatataaattaaaacaaatatacaaaaaccaaacaactaataataatatcaaatatttctacttcctccttaacacttaagagttaagatatatatttgtcttctcataatgttgcctaaaaatcaatgatgtcaactttgaggtaggccattaagtgtccatcccattcaaaaaaaaatattgttaataatttagatttttacagcaaaataactttaatatttataattataattattacacataactttaattaaaaataagtaaaaatactttactttacgattttattgcaatcgtactattttttagttattaagtgtcaactcaaaaatacgtgaccatataatattaaacaatgtattaaataagctaaaaaagtatattatcacgcatttttaaactgccatttagtaatttaattaacacttaacatccaaaaacagtacgaccacaacaaaatcttaagataaaatacttttactaccatttttttttaataaaattttcttattacaaatctagaatcgaatactacaaatctaattacaacaaagaaatcataacatgctaagttgatggacttttagcaacaagtcttttcttcatcttttctttcctaagaggagatggtaaacacagaagaaaatttatttcataaccatatggctagaatgaactaactaagcaatctaaaatggtagtagagaaatcttcaaaaacaatgatgctaatatactccaaccaaagggaaaacaaaaagtgagagaagagtggaacctgaggttaagtattttcttcaagtgaaggattcacaataaaggtacatcaattggtttatcctcttaaataatatgccacttgtttgtagttcactaaaattctaccaatctgatcagaggtaacaaatatggtttacaaagagggtcaaaacaagaaaaaatcacttactactctgctccaagtttagtaacaagtgctgaaaaatgctgaacttttatgaaaaaaaaatgcagagacttgttaatcctaaacaaagattacttcaaacttggcgcaaggtttgttttccacgtaatttttgaaatcggcatctcctttaaacctgaaggtatacagagcttgtctctgtgtcatgccaacaggatgtattctgtatactttaagttcatttcctcctcttaagatttcgggtctttcctgtttccataccggaacatgctttagagagttaaactttgtgagcaccgcagattccaatgcttccaaagtcagattcccagccctgcacaaaaagagtttttataagaatccataatatctgaaatttcaacatataatggtgtgatatgaaaaattttactaattttgtgctctaacattatctttaacaaagaaataaccacacagatgcacgagttttcatttcccagcttccgggagagcacataagcaatcacaaaatattaatttaaatggaagtgatgaaatcactcaattttgctgagatactcctcattttaaaattacagcagttttgaaccttcaaccataagtgcagtgcatacaagggaaaccatatgaaaggttaccttaagaaaacagattccatctcaaaccttcctctttctcgtacatacaagtgatacacagtttctggtcctctggtgcacttgcaaggtcgtctcttgaaccttgggcccttttcttcttcatctctaatctttgttgccaggtgaatgcaaagtcggcatgatgaatgaactgccgccatatcaacaagggccttgaaagaatcagatggaccttcatatttccacctaaccaattgaaacaatattgttaattagactaagaacaaaaaactgaaagtcgcgaattatgttctgaaaaaataaaagcccctatcatactaaatggtcattatattgtttacctgagagtctgattatatgcttctgggttttgtgaaaggaatttcattgtctttgcaacagactcaacatcactgagctccttaatatgcaatattgaaccaggagcaggagcaaaatcttgaatattaggagcaccaattacaactggcacagaccctgtaaaattagagcattaaaaagggaaagatgtcaatatcatcattatcaagtcggagtatgataatagtttcagaaatgctaaaagctccaacagcttcaatttatatgttttccaattatactttcaaaagacaaccaacagagagaatggggagcaaaaatgttttcataccagcgacaagagactgaaaaaatttctccgtaacgtaatcctcctcattggaattctcaaaagcaaaactaaatttgtagcgtttcagagtttctactttgtccactgcaagaaggttaagaataaaaaaattattcaacacgcagatttctccaagagtatatcctctttaaggaaccaaaatatatagcatcaactcataaagccagacacgttgcaaagctaggaaatcgtacaatccaacaataatataagcagaaatcaatacagactcaaaatcacaaattcaaacagcactgatattgtaatttcagatataacatacccagaacacatataaatagtacccaaacaaaaccttaccatgtccagtttcattatataacaattaaaaaag

SEQ ID NO: 21022 - DNA, 3417 bp, Cannabis sativa
  modified_base (1107)..(1119): a, c, t, g, unknown or other
ctatgtagaagtctagagagtccttcagaaaaaatcaagaacaagtacggggacaatggatctccttgccgaagcccccgagtaggcttaacatgtcccacttcttcaccattgagcatgaaagagaaactagtggagcttagacaacccatgattaaagaaacccatgtactgtgaaagcccatttttagcattacctcttgaatatagaaccactccactcgatcaaaagctttgctcatgtctaacttgagagtcgaataacctctattcccccttgttttatgctttaaatgatgtatcaattcaaaagcaacaagaatattgtcagtaataagtcgattggagaggcactttgtgtttctgaaataacagccggtagaacatccttaaatctgagagcaagcgccttagaaatgattttgtagatgacattgtgcacaaacttattgggcgaaagtctcccattcccgttggtgacttaatcttcggaataagagtgattagagacttgttaatggattccatactacaaccctcattcaaaattccaagtaccactttagtgaccacatctctcacaatagaccaataattgtgatagaacattgccgacattccatcgcaacctgggcttttatctggattgattgtcttgagtgcattgtagacttcatcgctggtaaacggttttatgagagaattattcatttcagccgtgactgtggttggaattgcagcgagaaaaatgataacttatatagcaaatgaaatttatattttatattatttttttaaaattaaaagtaaattatttaaagattatggtatatttatattaattttgttaatttttttattttaaagttattgatttttttttattttttatgggttgttgtgggttattagtatatggattttgtggtacaatatatttatattttgttagatggtatattattattcttaaattatatttatttttttattttgctatgtataatgtatcatagtgatatataattttattagtataatacaaatattttaagtatgtatataattttattagtatgttatatatatttaattattatttttatnnnnnnnnnnnnnatgatatattatttattttaaatatattagagttagactcacatttttttatgtatggaaataaattgttatatataagatgaataggctaccaattttgaacctcattcaccttatctcaaattttaacaaaataatatttacatagtttctgttttattatataattttattgtcatgatatatattttaattgtagtatataatttggttagtatagtatatatatactgataataaatatattttattattattgttagtatatatattttggtgaatgatatatgtatctttttaaaataatattattttctattgtatttttattgacgtgatatataattttattagcatcatatatatttttaattatatagtatataaattttatcatatagtatattattttagatctatttagtttttattttattatatataaagttgatatataattttataagtatgatataattatttaatagtatataattttgttaatatgatatatataaatttttttaatgatattatatacattttttaattttttattgcaggtataaatattttgttgtataatatatagtttttgttgtgtatattatataatttatttaaaataatatttaatttctattttattataaatcatgtgttaaatgtatattaaatcaattaatatatatttttaaataatatataaaattataaatgtattttaaagtatataactataattagattaacataatgataattggatcagtttagtcggttatccattagatcggatgtctgatccgattagatttttaaaatttacatccgatttaattcaattatgattggatgttcgattctattaaattagttgaaattgaattgatcagatataatagaatttgatgattttgtgcacacctctaatttttgttataatatattattatttaatattaaaaaattatataatttaattcttatatatattttttaaaaaaaataatatataataaatatatttttataatttttattagttaatttattatgtttaattattttattaaaagttttaagatgtttttgcattttagccctacaaacaacctcagttgcttgcttaccggccctgtctaatacttgaaattagagcccaactctgaactcttttcaggctatttcttcttttagtttcaattaattacaaaaccacccgccatagccgaaaacttgtatgaatcgtctgactcacctgggcatccgcttcaactctctccactcggacaccctactcgccaccttctccaccgtcgctctctgtcatccccgtcctcctactctaaaccgcgtcaccttttcgcctctctcgcaattatcaacccttcgcaaattctcaaatccaccttcctccatatccgtcgaacgtcctcgatctgacctcatacggtcgtcgatggattcacagtcaccggaaattgatgcgccggagggcgaggactttgtccgcatcgaaggcgctactgctgaggatttatcggaaagcattgttcgcgtggatgaaccaagggagaacgtagctctaacgagctcccccccggccccaattgaggataattcggagcaaagaatggttcttcccgaagagctatcgaggagtgtggtggtgctccagtgtgaatcttcggcagaaggtggcgtttgcgatgtgtacctggtcggaactgcacacgtttcaatggtaatctgttgaataataaaaattaaatatttaaaaaagggaagaaatctatgtagaagatttgttatctttgcgaattttaagatttaattgggcaataacggatatgaatttgattctttgtgtcgttgcaggaatcttgcagagaggtagaagctgttatcagttatttgaaaccagaagtgagtactttaccgtttcttgatgatttgattattcggcatgataatgagaattttcaagtttgtgtctttgattgtaggttgtcttcttggagctgtgctcgagcagggtggcggtgcttacccctcagaatttgaaggtctgtcttcatcgtttttgttttgtgcgaaagatcagttctttttggagttttgttcgtgtaaacttttccaatgaaagaatggtgttgtttattgctttaaatcgtgtctaggcacgatcttctttccaagattactttgaaaactggatgtgttcaaatgactttttaaaatgaaacctgcttgctttgtaatgtttagactgacttatgttttctcaatagacta

SEQ ID NO: 21023 - DNA, 5262 bp, Cannabis sativa
cgattttttagagacaaatccactaactaatttactatatatttttatgtattaatttaaatatacttaatgtgtaaattgaatttatgagtattagttttatagaatttgaaatagaaattagagttaaattaatgtttcatactagtttttctagaaaaaaaattgtgtcgggttgcttttcgatttgagtttgttcttcttcttaggtgacgtcgtcgaattaatggtgcttcctcatttgtcggagttttttcatcgttgtcgattttattacatcacacgaaagttattcaatctcaaaaagtatgaattgtgtggattgacggtgtgtgtaagagtattttggaacgtcataagattctttaatggtgtatcttgtccagtgcccttcctgtccagtctgtgattaggagacgattccatatcgaagatacgagctgccctctttgtgggttggaggaggaatcttttgaacatttatttctttcttgtgatgtggcttttcatttatagcgattttctccctggggcatttattctatctgtaatactggtattcacctgtgggactggatcaaattcatctagaacctcaatcataggggtatccgtgttgaggatattttcctttacgcatccatagttgttgacactatctggcggacttgcaatgataaggtacacaataactgtccagtgaagaagtgtattgactctatttgtacttcctttgcatatatacatgcatctttgctcccttgccctgctccgtgcttgctagaggtctgatgtcctcctccttaggactggattaaactgaattgtaatgttaaagtgagcttagatagcatgtgcattgcagtagttgcaagtaatcacctttgcgaggtggttcgaattcagacttcgtggttagacttttctgatgctttatgtggagaggcaacagcctgctgtttggctgtgacggttgctcttgatctcgcctccaagtttattattgttgagaataactcgagggtagttatcaacactcttaatgggaaggagtctcattggacacttgagaactatacctctttttgtaccaagtcttctccttctttcattagttgtaagtagacttgtaattttgtcgtccataatgtgattaagtggacgttctcccacaagaggtttggttgtattccaattttaactatctatgtaaaactattatataatgaccgaaaaatctaactactttgctattatcataactacgatttcctttaaaaaaaaatgcctacaattttttgtaatattgttttttggtgttataactcaaaaaagaaaaaagcccgtgtgaggcacgtgcactaacatagtctcttaaattcgataacaaataataaaaataatacctgctagtccaaccaaaacaaacctaacagacatcttcctcaacaaacaaaccttttcccaattctaatttctctattttcatctgctatggccaccaatggtgcttctccggtcagcttcccttctctctctccctcactctctttctatgtattaatttcttaccctaaattttaatcttgatatgttagcagaggcccggggatgccgagagtagcttggagaagatcaagcggcagctagcttcaggttctggtcggaatctgctccagggtccacttcttaagcgctccgatacggtaccaattcgatccccaaactgcttatctttcttctaaagattcttgattttcttttattttcgctgatttcattttatgttaattgtaatcgctcaaaaatttgtgatgttaattggtacttgttcgaagtttgaattatgtgtagactttttctttttttctttttttttgagaggcaataatgttatgctaaaaccgtggaattagaatgtatgttaggacactatactaattatgattaattagttatataattgttgttaccaagtctacaaagaactgggatagtgccaaattgaatggtttaagttttaaggatgaattcaagacattgtggtcctatagtttagagacaacttttgcagaacataattaagattctttgacaattttgaaacggcgttagaacaatttacttttttttttatgtatgtagttcaaagttggccacatatttctacttgttctggaaattggctgatatgatagctttcattttatttccagcttagaaaatggaacgagcgatgggtgatcctagatccaactacagggaaaatggaatacaagtaagtagtgcgtaaattttactgctttaagctattataacaaggaactgacaaattcaatttaatcttgcttatttttatgttttaggatcaggagaaatgagccgactgtcaagggaactattatatttgatgagaatagcacgattactgtatctcctgttaacttccagtaagaattttgtttcatggatgattcatttctgaaaatgtttgatatctatgagattctatatgatctactccaactaatgttaacatgggtttttctttttgggttgtagtgggctgccaaagtacgatggctgctgtatatgtatccatatttatgtactgaaaattgttagtaatggttaacacattttctttttccacttaattttgaaagatttgtatggctggttcaagttctatactggtctttttcttaactaaatcatatagatataggaactccacaaaagacggactacttcctctgtgctgagacacctggtgcggctagagcttgggtatcaactttacagtgagtttttctttttctccttaaaattatgttcttcattcccttactctatttttagtatgttctaagagccaaggatgtttatcaaacaaatacagatgtatgacatcgtaatatttctcttgttcaagtcctaaaatctattatcatatgtgctggatatcatttttgaacttgtggatgaggaattgggaagaggaggattgtaaattcaatcttgtcattcttaaggcatttctaaagtttagattcgtcaactcggagtaatctctttttattatgaattgaattcattatatcttaactgtacttttcctcttcttaatgaaatttaaattgcattgtttgtattacaatattaatagcaacagaacttttttatttggaccagaaaactctataacattcattatgtaggtgcccaggagggggactcaaacctcagatcttgtgggagtaaaccatatgcgtaactgtttgagctactcctcttgggtgatccatgaactcttttctgcttaactgtttgagctacccctcttgggttatccatgaactcttttctgctgtagaaattattgatgccagaccttttctttagaaattttggttttctttagaaataataactgatgagtcaaccctaccctctgtaattgcatccttggttttggatgatttggtttaatgaagtttaatcattattcaaaaaaaaaaatgaaaataactgatgagtcaaaagtcagttgagcagcagattcgtttgttattgttccagccctcaaatcaactccatgaaaaacattcaacgaggtcggatctatggcttccattcaagattaattttttttctcttgtttggtctatttttattttttgttttctggcagatttaaccagtatttgtgccagttatgataaagaaaggttgattggatgaaatatacgttacttaattaggggtcgtgtacgatagttgtgaattgtaattcagtttcatcatttctcaattaaatccttcttctaggttcatcttcgaagtagatattgctattagtttttaatttaacaagattttcttccttttgactattagggcaacacagttggttctaaaggcccacaaagaagctgtaaattcattaagtggcaatggttctgcaaaattaggaactgttgcaacggtagtagctgctgccaattcgactgccgcagaatgttcaaaagaaattgaagcagcaatgcagatttctcttagaaatgctcttggtatgatgacaaataagattggcgatgggccgatggatgatttttcaatcatgaaggtaagctctagtattttttattttttctcttcttttggtttcaataatgactcaagtataacgcaattttttatatcctggttatcattaaaatcatcaattcacaattcacgttatattttttttctggtaacataaattaaactaagcttattttgcatttgctttagatcatgacacttaaatgggctgatgccaattcatgaccagctaagaatttaatcacaaaatgtcttgtctgatgctggttacttggccgtgcttgatgtttgtctacctatctttatgctgaacctgcaactatgattaatgtgaactcgttacttttttttcgcaggaaacactgcgggttaaggatgaagaacttcaaaacttagctcgggagcttcgctcaagggattcaacaataaaggaaattgcagatagattatcggagactgctgaagctgcagaggctgcagcatctgcagctcatacaatggatgagcaaaggcgaattgcttgtgtagaatttgatcgcattataaaagaattagagaagcaactagagttagcccgattaaaggtagcaatgaatcccaatattcttagtggtgtgcttatttctgttgtcttattattacatgtacaaataatgtgaacaagatagaagagttgaaggacgtgtggttagtgtagttatgttgctcctatctccgcttaaaatttctccctctattttccacacttccagtggaataagataaaagataagaaaattggtggctatggtgttgattaattctgctgatatatttgttccggttttactgcgtttctgtagctaagagagtctgaagacaaagtttcgtccttgagtaaagaaagagatgacttgattaagcaaagagactctgcaaatcaagaggcacatatgtggcgttctgagcttgccaaagctagagatcgcgcagtaattttggaaggagctgctgtgagagctgaggagaaagtaagggttacagaggcaaatgctgaagctagattaaaagaggcagcaaataaggagagtgctgcattaaaggaaaaggaagaccttcttgcatatgtaaataagttacaagcacaacttcaaaggtttgcctcttatccct

SEQ ID NO: 21024 - DNA, 1107 bp, Cannabis sativa
ttatttcattgttttagagatattcgtatttaggatgttaattcaacatacttgttagtaaatttaaatcttggtaaaatattcccaacaccatcttctcaactagaacattaccttttcttcctttagcctaaacctttattcctcaaaattaattccaaagattaagactcgcaaaacacttgttcaatccttcattatttgaagcgaaatgaagaaaaatgattgggttcttttcgggtcttatggggttcggccgaaagagggcttaagggagagagattgatttttttctaaatttttctacaataaatggtgatgtctataatcatataaaacaaaattacctaaataccctttaagggtataaatctaattaactaattcaagggcaatataatcataacacactaacccacataaaacataatatctaactatccaaaataaattctcagtcacctctaaaatattaatttacgccactatgattttttcgctaatctcttaaatttgcacttttgctatacattatttgaaattttaccaaacaaaaaaagaaaattatcatagtatcccaatttattcacacaagttcttgaataaaataagaaacagtaattagtgatataataattattaatttacaaatcttatcgtaaatcttatgagttttggttcacccctaattaagttaaacagtcatttccaaacaaactaaaatgcctatatcgatccaaataaaagttaaatagaaccttaaattatacatcattctctataataataattaattttgtcatttttcttattagcttaacttttttaacatggtgatgataatgggttgatgcatagaaagagaatttaagcaccatatatataagtgattatttaatagtcacattttcgctaatagttatattttttttataatatgttataacaggttatatattaacagataaaaatttatttttatactcaaattaattatatatttaaaattaattatttttttaattaaaatatttaataagatattttttacaattaatatttataaattatttgttatttttatttataaaagataaataaaattag

SEQ ID NO: 21025 - DNA, 2236 bp, Cannabis sativa
caccactatgtatccttgtacatacctctagttatgtccatatccttacagatcatgtactactcataatatatagttctgctgcttctactacttattattgttgttattatccatcataagatattttgttggtataatctagttctatggaagaagctcggcactgggtgtgggcaaagagaaagcatggccttgtcagtagtagcagccctcatcatcttatggtgcccaaaaaccctgcttcttcttatgatgattcctgggaagagcaagctttcgcagaagacgctgcagggcctctcggcggctgcatatggcccccgagatcttactcttgcagcttttgtagaagagaatttcgctcagctcaagctcttggtggccacatgaatgtgcacaggagagatagggctagactaaagcagtctccggagctccatcaccgcgaaatcgtcaatcaaaatcaacatatcaacaacgataataataataataatatggctcttcatcatcttcaccatcatcatcatcttcatcaaaatcctttgatcactaccactaccaccacatcatttggccctcccagccaatatggcccatcatctcaagtttgtgcctttgtttatgatcctaaccctaatattactgaccctgctccagaagtaggttttattccatcatcatcaccttcttcttataataacaataaaaaacagaattgtggaaaacaagcagaaaccttgttagtccctcctttcttttcatcttctcttgtagttgaaaatactaagaagtcttccaatagtactaatagtagtgctctaaacccttcacaccagtcctggtcaaactttgacaaatatttccatgactccaatgatcataaaaatgatcatatgagagatcctaatcatcacaagaatatttcatcaataactgtggaatctggatcttgtagaaggagtagcacaacgactaaggtggactatgtgaagagtactgatttgtcagtaagtttgaatttggtggtttgtcatgcaattcaaactgaatctggtaatagtaataaagataaagagggtttactgatgagttgcaagagaagaagaattgagccatgttcagatgagtcaattacatttgatgaacttagcccttgttctatagaagaattagatcttgagctcaggcttggtgaccgacctaaggtaaagtagaatttcagaattatccgatcgaagtttttacttttcatacaaatattatagatgtgacttttctctcttgtaccttccgtttgttcaatctttgtttgtttggttaaaatttccacctttagttttctcttcttttggggtttaatttgatcacaatctagtgccatgccaaggcatgtttgcctaaatctgagtttgatcactctgcagggtacaacaaattatacaatattgataatgatatgacaaaaaagcgtgaaagctcaatattattgctgtttataaaagtataattacattcagatgactgcataatcaccattatcattgcagtagttcattttatctatttaattacgtgtatatgtatatatatatatatatatataaatttttacagtaagtagagcattgtccttgttcttaatatcggtgatttcaatgtatatatatatatatatatctttatataacatattcaattattccatggtcgatttggatagcccctatgtctcctttgaaatatatattttcaaatgtatacaatacaatggtatatatgtatgctataatatatatactagctactacttgtactaattatcttgatcaaaaattctatcaaaaaaaaaaaatctaattaagaaatacttagagaaacattttaaaatatgaataatatatatatatatataaacatatatgatgatgtataccatactgcatgataattcttgggttttctagaaaaagtactaaactgactgatatcgatataccgtactcttccaaacataattacctttaatcatgtcaagacaaaacaaaacaagagttaattactgattactaacattacgaaatagtatttcttaattaataatcaaataatagcagtatagcacactaataagtgatgaaaagtgctacacatttctacacttttcttctctagaaaattctagtattaactacacaaaactaagaaaattagagaaaactagaattaccta

SEQ ID NO: 21026 - DNA, 4027 bp, Cannabis sativa
gaagacgtgatttgaagccataaagaaaaagaaatggcatcaaatcttgttattaggagttgattttatattctaacaatgaaacaaaagaaaaacgtcaatcataataaggaatataagatatagattagatttgacctcttgatgactcaaagtattgctgttgtttccattgatcaatacatgagatagcaactcatgtaccaagttcagacaatactccgtgggtgtagctacatccattatataggaaagatatctgcaagtcaaacaggatactgactaaatttagtagcaactttaagatccataacaatgaaatcattaacagatcacactattcttcaaaaatttctctcaattattcctaaaccgtggccactggcaaagtattttttttttgacattttttaaaaatcccattaccttaatttggtatacacatctgacactccatagtatgaagaaaattctgtcacaagccacttccaggggccttttagtatcaaatttttctggctaaattgctgaagtttcaaagcaacttctagtagataatcatatgccatagtttctgcaacagagccgcactgcagtggaaaagagtgatatagtatcattcaaacttgcaaactttactaaagattctgcataaatggaatcataacatctcgggaatagattcatattatcatataattatagttagaatcttatgttgacaacccctatatcaaacagatattgcatcataattggttgcctgtatgaaatttgtcaattttattttgatattaccttaggatgttcacttgaacttgtatagtttatgtgcaattgtactctgccaactgtattatggtctggatcactgaatattggcaaccaccgcagcttctcatcctgcattaaccaaagatttagagtccaatatttgtgtatttctcacatacataggaagaaaaaaaaatcatactggatgatcagctatggcagctacttgaacttgagctcgaccataaagacgccccttagaatcttgtacatcaacaagcaaataatcaccaagaccatctggaaagctgtattaacaccacaagaggaaccatatattttatccacacaaggaaaagggaattaagaagtttcaacataaagcaatcaagaacgtacaacacatgttcttcaccagatcctggtcgcatacgaactacatcctcatcagatgagctctttaattttgacaagaaagagtacgtttctgtcatccagagaccaacaaaataagaatggcattaaaaaaaaacaacaacaacaacagcttaactaaaatgaaagaaaaatattcttcctctaccaaaaaataatttatgctaatagtgcatccaatatagagctgtcatatttggtcatatcagcaagaaagatgactaatataaaagtttataaagaaaacacaaaataaaacctgaactcatatcaaatacctaatgaacacagaaatatgaaaacataccttgaatcacttgttcatacggtaaggggcctctgcataaatctgttgttcctacttttagtacctcagagacctgcttcatgtacctactgacagctttcgcataagccaaactccagcgagaaaaggagccatttgtagggaccttaggtgctagacgaacattctgtatagacttccaactagaagatatatttgatttcaaatgagtatattgtctttgaagtgattctttctcgagcactgaagagtttatgattggtaaggtgccgcatgaaggaagtgggtcggaaccaattttcactttacgcactatacaatgacaaaagatgagaatggtataaaaattaccaacactttcatggataaaaaagaaaaccaaaaactctatctttaccttgcaattttatctttccaattgtcttcttggatttttgagcagctccttgactaactagctctgcagatccctgtcgttccattaactcgtcctctgattggagaaaaacatgccgtagactacagttgtaagaagaagtcagggattaaaagtagtaaaagcaaaaaaaaaaagaagcaaaagagctacttctacaaaaaacatcacattgacatgttatagaaaactgctgtattatatggggaaaatgctaaactataatggccagattctcacagggtaatgttcttgtattccaactttacctaacagactgcttagtattataaaaaggaatgtcattgaacatgaccaacaaatgagcattactggcgccaaatagaagtgctctaaagagtctaaacaaaaacaagacaagccaactcacctgaaggcatctcgcagtaatgcacattcattctcaaggaaacagtgcacttcactagaaccgcttagagcccaagcatgaagacaaaggcgaacacaagcttcataggaaaccacagcataccaactaccatgctcactaaatccaaatcaagaaaacaacaaaaatgggaaacaaaagatgttaagaatattacagcttgatcatctactttcaaatggcttcagcagagttccaattattaaaatacctgatcagcagcctcggttgaaatgctgggagacgaggaagtaaggaatgtgcagatccattagcttccaaaccagcaggagtcctgccaatggttaataatgtattcattctcagaaactaaaagaactgaacgaataaaagagaattgacaatttgaagaaaaaaaaaagaaagaaagaaagaaagaaaaacaaaaactttcaccaacctaactgatgagttatgggttactctgccattagtagcttctgctaaaggaatgctttttgtgcctaaagaacaagtggaatttgcatattgattgatctctagacgagaaccaactaatggaggagcactaggagtatcagagtctgacaattcatcttccttactcacacccggccgcttaactaaatcatcatgaactttattctgtgatccgtaggagatttccatgtccgaacccgaaccattttcatttcccttcattggctttgtcttaagaatctgacccaaaccagatgaaggaaaatacccagttccaaatttggatgaagaagacaatccaaagcctgttccttcatcccttgagttgacaaacgtagctgatatgggtacatttctttgcttgattccactgatctgttaatcaatcagacaaaaactctcaccaaagtcagcaaagtcatactcatacgacaaagattctaaaaacgacaatttgtacagaaagcagtgatgagattgaaaaaatgtataaatctgattaccttttcagaccatctaaaggcattggactccaacccattattaagaaccatcacaatctctctattctcaccaaaaagaaaaagaaaacaaccgaaatctttgtaatagaattagaagctacaacacttcttctaactggttctcaatctgggtatatagccaaataagaaaagaaaaaacaaaaatcagccaaaaataacataaaaggtaaaattgagacttgcataagagaagtactgaatgtgcttacaatggttgaagagatatagacaaaagtgtgtccgtacttaaagctttctcggcaaccaaacaatgcatattacgagaatcttcaaataaatgtgagttgttatacttaacaccgatcaatccgagaatgaagattcgatcttctaccaatgcaagtatcaatttttagaatcaagtaattatagaaactaaaagaaaacagtgacaaacattaatatgggtagcaaatttccacgtaccaaaaataacagacctcaaaattatggaaattttagagagaggggagagtgtgtgtgtgaaagagaataatgtacataagaatcggaagtgggagagagagagacttgactgcaaaaaaggaagaaaaatatattaatattttattttaattttgttggttttcttctctatgaagtttccaaatcccaat

SEQ ID NO: 21027 - DNA, 2619 bp, Cannabis sativa
cggtctcagccctggacccgggcctagccccgaacctagacctagactctagccctagaccacaggccaaccctaaacttgaacctaaccctagtcctagtctcggccctgggcccagtctcgaccctaagccccgagccaatcctggagccgaacccgaccccagtctcgagcccagttccaaccctaaaccccagacccgacccctgaccctggacccgaaccccgacctagcctcggaccccaaactggaccctaacccggaaccccaacctaaacttggatctcgaccccaactcggccccgatctcaaacccgaactcggaccccggcttagatgggagtcgaagttggggttgagattatgataaatataatataattgtacacaatttattcatacaaatcagcaccaaacataatattatatgataaataatattaatataatccaatacaacaaaatatatttctctataatttaattacttagatacttcgaaggagatatataatatatagtgaataacttgaatagggagataaataactattatcatcacttgtgagttgtgatctctttactttatacataatcatataagtgtggaatccgtgtataagtagtctacatgtacaaggcaattttaatgtatatgttgctctgccaacatcatattaacttattcatttactatattatgtcgttgacatgtcttagtaccaataaattctttttatttttgatcttaattagtataaaactatagctagggcaatgtctcccatttattactttttagtacctagctatatactacaatatatatatatatatatatatgtgtgtgtataatatatacatagctaggttttggaccatatagatatacccatattgatcataattatgagttttttgaaatttagtataaacaaattaaaggccttttatgtaaggatgtacgtacttgaatatatatatacatatagtgcaacaagcactcaaagtcaataacaccatatacaaaagagaggttggatataataaatcattcattgctattattaattagtcacctctctctctatatatattgtgtattatatactctttaattaattgtactagctttacaagaggttagtttcacactaaatgaatgcccataatatttcttcacctattcttacttagagtatcatttttggtatcactactacaaattgtacttttggtgtcagttttaaactgacacttatacttttagtgtcggttcatagaactgacacctatatttttagtgtcggttcatagaactgacacctattccacaattacaaaaagtcaaatatttagtatcagttctaatataaaatatattatataaaaaagttacattttttttaaaaaaatagtcttattaaaacctccataataaacccagtaaaaaaaccctcacaagaaaaaagagtctcaaaaatatcattaattaatttatgttaacctaaatcaggcgagtaattaatacaatcaaaactaccagaccaacaaataaagtgaccatctagagtaaaagcaaatttagccagagcatgagttacactattagacaaacaacagcaaacttattacaacactcaataatatctctaacaatacaccataaataaaaatgatcaataatatgttaattgaatggcaaaaatgacagagagacacaatcaagtgaccataccccaaatgaagacataaacccaatcttgaaagaattgcaagagcttcaaccatgactggttgaaaaaggccataaatcaaaacacaaagttccagaagctttagccaacccgaaacactctcaaaattgcacctataccatgctttagaagtaacagatgaaaaactagcgttataatttaccttcaaataactagcagcaggtactacatgacccaacaagaaaagtaggaacataatctcgcttattagtcccttgaaattgataaagatattcaatactccaatcaaccaccatacaatcttaattataaattaataaaagtttagccaactattacaaagtctactatctttcttgtttcttattattttcatttcccaaaggtagtaatttcttttttaacaatttttgaaataatactcgttttttataaaactctttaatactagttttacaaggttagttatagattgtaaatcccataatatctttccacctatattcttacttaagataattttttgtacatatataaagagagagttaagtaaagtatatacatataaaataaaatctaatttttttatgtgtttaaactttaatgctcacaatatatatcctttcccattcctccaaataaatacatcattcattccatcttactaatttatatatatatatatatataatacatataatagagaatattgagcccataaaatataaagagacttgtgaaaccttttattgtaccttctctatcttgtgattgttattaaagactacacatcatatcatatcataatctagtgtgtgtgtgtcttgtctcccaccgctcttcattcaaactactctaacctatatcacatttttcttt

SEQ ID NO: 21028 - DNA, 6714 bp, Cannabis sativa
tgataactaatcagattgtaaagacttttatttagggcataaaacccaacacaacagtcatcatactaacgtgtgtaataatctgaaacaagatataaaattcctcatcgagcgaaataaaccgcacttgtaacagtatgttaagatcaaccatgatcaaagggttgcccagctatataataatcataaccagttgatgcctccacctgtggatgtaaatttacaagtgattattgtggccctcatattactgaagacttgaataaaaatagagagagttatgctcggaccctatagtatgaacaaaaatatgaagttttggtcatataagaaaaaaaaaacaaaaatagtcgcgcatagaagaactagtcatctcctttagtgatgaagattttaaccatgtcatttatccacacaatgacccccttgtcgttgaagtgcaaattataaataagatagttgctcggacaatgattgacaatggagcctcttcaaacattcttttcaaaactacatatgaaaatatgaggcttcaactcaaagacctggttccttgcacgcagcttgtatatggtttctctggccaaagtatagctccattaggacacactcaacttccacttatgctaggaaaatctccaaatgacaacaaaatcatggcacaatttttggtaattgatgttccttctgtattcaacgtcatgttgggttagcccgccctatatgatttgaaagaagtaacctcaatttaccacctgtgtgtcaaattttcaacaaggaattgagtaggttgttcgaaaggaaatcaaaggactggacgggaatgttataaccttgctctaactaaagccaaaaaggaagaaatatctaaccagagtttagagaaaagtaaaggtattgaaaaataaggatccacccaaggcatggacgaagacatggatccccgccttggggaaccaagtgcaagtgttggataagtaaaagaattagaagaagttgagattgatcctactatgctgaccaagaaactcaaaactagcaaaggtttgttgcttgaaataaaattagctttgataaaatttctaagagtgaatcttgaaattgtttcctagtcgcatgaagacatggttgggatcgggctaactgtcattgctcacacccttaacattgatcctaagttttttcccgtccagcaaaataggagactgctggataaagagtatgcacaagcattgaaagaagaagtagaaaggcttcaagcaaatagattcataattgaggcttttatactagtacccacaccgaataagaaatagagcgtgtgcattgatttcactgacctcaataaggcatgtttgaaggattttttttttcaacttccaatgatcgactagcttgtggatgctacagtaggtcatgagatcctaagcttcatgaacatctactcggggtgtaattagagaagaatgtatccactcgactaagaacacataagcttccaaatagatgttggcttgtactgttataaagttatgtcattttgattaaagaatattggagatacctaccaaaggctaatcaacaggatgttcaaagataaaattagacgtaacatggaagtatacgtcggctacatgctcgtccaatccagaaaggttaggggcatatagaggacctagatgaatgcttcaaaatcctcaaaaaatataacatgaaactcaatcccttaaagtgttcctttagagttaactcaggtaggtttattagattcattgttgatgctcagggaataggagccaatccagagaaaattaaagcccttttggatatgaattttccaacaaaagttaaggtagttcaaagtcttactgatcggatagctgcactaatcaggttcatgtcaaagtcaacagacaaatgtattcctttcttcaacatcctctaaatttttggtgatgtcattcgggttgataaatgctccagcgacctttatggatctaatgaaaagagtgttcaaggatttcctcgataattgtgttatagtatttatcaatgacatccttgtatactctcagacagaaacggagcatcagcaacatctccgaatggttttagaacgacttagagatcataaattgtatgaaaagtttaaaaagtgtgaattctggttattagaagtatccttcctagggcatattttcgagaaagatggaattatggtcaattcagcaaagattgagtcagttaagaattggctgaggccaagaaaaattactgaggcttaaagttttcttaggttggcaaggtattatcgacattttgtagaaggtttctctaatatttcaatgccattgacataattgactaaaaagaaccaacggtttacatggtctaacaagtgtgaaatgagctttcaagagctggagaatagattgatcacgtcaccagtgttagctttaccgtcaaaccaagaaaaatttgttgtttattgtgatgcgtccagacaggagctgaaatgtgttttgatgcaagctaacagagtcaaagcatatgcttctcgatagttgaaggattatgaatagcgttatctgacacatgacttagatctatatagaccacaagagtctcaagtatttcttcactcaaaaagacttaaatatgagatagaggcggtggttggagttagtcaaggattatgactgtgagattttatatcatcccaagatagtcaatgtggtggtggatgctttgagcagaaaaggtctcgagcaggttttcagtaccataatgatatcacttcaataggctttagacatggttaaagctggaattgagttcgtggttgggaaactacataacttgacacttcaatcagacttgttagaaagaataagaaaagtgccattggaagactctgagctagttaagattttggcggaggtattggcgggtcagcctaaagacttctcaatcttgaataatggaatgttactttacaaggctcgagtttgtgttccgagcaattatgagcttagaaaaaaaaaacttgaggaggctcatactacaccttattcattgcattcgagaaccaccaaaatgtaccagtatttgaaaccctactattggtggtgcagaatgaagaaagacgtagttgaatacgtgtcaaggtgctaaacttgtcaatagatcaaagcataaaataaaaaactggcagggttatcacaaccattaacaatccctaagtggaagtggaaagatgctataatggattttgtggttaatttacctagaaccaccggaatgaatgactcagtatgggtcatagtggactgcttcacaaaatcaatacacttttggccagtgaaaataacttatactgtggataagtatgtgaagctatatgtaaaagagatagtacgtcttcatgggactccaaaatccatcatttcagacagagatctgaaatttacatcaaaattttgggtgagtcttcaaaaagctatgggtacaaagctaaagtttagcacaactttttaccctcaaaccgatggacagtccaagaggacaatacagatattaaaagacttactacgagcccgtgtcattcactttgagggttcatggagcaaatacttgcctttgatagagttttcctacaacaacagctatcagagtacaattgggattgccatgaaatgttgtacggtaggaaatgccattccccgattcactgggataagactagggaaagaaagtatttaggtcctcagttagtttagcggacaattgaagccgtaggcaagatcaaggcttggatgcttccttcacaaaacaggcaaaaaagttattcagattctaagcatagagatattgaatttcaggtaggagaccatgtttttctgtgggtttcaccaatgaaaggtataagacacttgagaaagaagggcaagttgagctctaggttcataaggccattcaagatactcgagaaggtcaggtaggtagcatatcagctagccttaccaccagccttatcggctgtacataatgtatttcatatttcaatggtgaggaaatatatgtcagacccgactcatgtcctaaattatgaaatcctaaaactacaattagatctgtcctatgaggaacaactgattcaaatcctcaataggaaggaaaaggtccttcgaaacaagacgatagcattagtcaaagtactctagaggaataacaagatggaggaagccacctgggagttagagtccaacatgaggaccccatatctagagttgtttaggttagattttgaggacgaaatccttttaacggaggaatacttgtaatgaccgcatgattagattatggattagtaaaggcaattagcattaattattgttattttatgattatacacgattttatatcttttgtgggtcccattttcagaaataggtattagagttataaatttttcaattccagagatcttattaaactttaagggtactattaatgtcatatataaatttatagtttttaggaattttactcggcgatgatggaaaatgcaacagatggccaatttagtcacgtgagttagtttagaactttttttatttagcgggatatttataagttgatatttggaatatcaggattagcaaaggttggtgttaaatcattttacccctaagccattttaccatttaagcacttaagtgagggcattttagtcatttttattttgtgggtttaggtgtctagtttattagtgggtagctggccacaaagttttgttcagcctaaacttgttattcattaattagattaatcaaattaaaagaaaaagaagatagaaaaccatttttgcttcttttccctaaccattttcgaacccagcagaaccagcagcaaactaggaatttattgagtcattttagggagttctagctgaattcaagttatgtaatccaaaggtaagaaccctagaacctatttccttaagttttgttgatttttctttagttttaagcatgcaagtgtagaatttattgttgttagaattagggtttattcttgattgctttctactgtttagtcaagttgttttaagttggattcttataattttgattggttaatcttgtgttggacaagtttgagttcaagaactcaaatttggtccattaatggttgattgtatttttgtgttatacttagttttaccacttggaaatggttcattatgttgttattaggtattctagagcatagattcaagtttgggttggttgtaggccgaattggaggttctttgtttttcgttgcacttaaaaatggcagaccatttggtctaccatttttactaggaaaaacctagaaaaacaacttgccgttttttaggcaatttctccattttgttgattttcttgtgttttctttgatatttagagctttgccatgctaattattaacaaggaaacttttagttttgagtttagatccctaagaaggttttagaaagtggtttacccattttacgtgattgtgacataaggtctctgttcagtacgtgatttttgattcaggtcgaccgacacaccttgaatttagaaacgaggtaagactagaatagaatatacatatatgtgtgtgtatgtatgttatatgcatgctgttatatgattcatatgctaccaacactagtacggtagcaaaactgagtcaatgtggtacaacctatgatgtttaagagtacaatccggtattaccaacactagtacagttgggtacgtagttcatgtggtacaatacttagcaatacttggggtatagttaaatcctacaacactagtatagtagcggtacatagtacatgtagtacagaggtcgtacctttgttaagaacgttcttattcatctgttaagccttgtggataggtgtatgggtgcctaaatacaagttggtaatatattgtatgttatatgcttttctcactgagtttgtcaactcacagatattgcttgcatgtgtaggtaaaggaatggccaaggctaaatagcaacgagtttgagacttaaggatgattatacatgtcaggatggtgtgacctagagagttcgatcttgggacgacttgggtttgttttgtagtcgttgtgcgacatagttataaagtttagtttgaacatgtaaacaagtttaaaagaaggatcccaacttttttgtataattatagaattataatttgatgttattcaaatatttatatttatcacaatttttgataaaactctttgattagcaaaggtttacaatgtaattaaaatgtcactgtagtgtgtctactcattagggcattataagaacccatcacataggctgacctggtgctaggtcccaatgcccatgttgatattttttcaacctcggtgagtccaaatatttttccttagaagtctcgggcattttttcctttttcagaaattacgaagatacaagtgttctcaggaaacaaacgagaccatttgagggccaaaacaaggacctagcacccatgttgacatgggtgctgggccctgcgcccaggttgacattcaacctagttcgcatgtttttactcctcgaatgcaaattcaactctaggcattcttcttatcttagtccaaaacaggtgttaggctatttttagcctatgttttggatccaatttat

SEQ ID NO: 21029 - DNA, 4214 bp, Cannabis sativa
ctttctcctttttgatctgttgatcatgtctaagaagtttaacatggtatcagagcattttccgccgttaatggcgaatgttgtcaccggaaatctcaactccggtaatggagttgctgtaagggccaaaaacaaagaaacaagtgactcttcaccaataatgttcagcaacaatctctctgtcagactaaatgaccacaactatcttctatggaagcagcaggtgctagctgccatccgtggaaatcgactcctgcaattcattcaagacactgctccaccatctaaatttctctccgatcaagatcaagcttcaaacaatctgaatccagccttctttgagtgggatgttcaagaccagcttcttgtctcgtggcttctgtcatccatgtctgaaagtttgctaacacgcatggttggctgtgaaacctcaaggcagatctggaaaactctcgagaagtacttcacactaaaggtatcagctaaaattcttgaattcagaactaaacttcaaaatctcaagaaaggtcatctttccttgaacgagtatcttcttagagttaaacaaactgtggatttgttagcctctgttggcgaagtgttaacggatcgtgatcacatcgctgccatattcaaaggtcttccgagcgaatatgacacgtttgtcatctccactaacactcgtcttgaagattactctgttgcagagattgaatctctgctgcttgcgtctgaattaagaattgagaagtctgatcttgatctctctgctcatgtctcaacaaatgaatcagatccttcacctgaagctcactatgccaataacagaaatttcagacaacctatgcagggaaactcaaatcaaaattactataccaatcctagcaatggctatggtaattttggttcgagatccaactttggaaataatggtggatcgaacagtgttttcaatagaggacaattacacaatcaagttcctttctatggaactggacgaggcagtaacaatctcagaggaggttcgaattcaactcgaggaggaaaatttccaacttcctcaaacaaacctcagtgccagatatgctttcacattggtcacatagctcaggattgctattataggtttgacaaaaccttcaccccacaacaacctgtgtctgcatcaacttcatctcctcagactcatctcactgcctcagaccgtgcatatgatccaaattggtatccggattctggtgccactaaccagtgcacaccagaagctcagaatgtgctgaatagcagcgactatgaaggaccagatcgcatgtacattggtgatggaacaggtttgcctattgctcacattggtcacacttacatttcaacaaacacattatcttcaaaaccattactgctcaaaaatcttctccatgttcctgaattaacaaaaaatttagtcagtgtatccaaatttgctagagataattgtgtgttttttgaattccatcctgacctttgttttgttaaggaccaggtgagtcgagccactttgcttatggggaggtacaggaatggcctgtattcatttgactccaatgaccttcagcttttgtcttcacctcttcaaccacaccagccatcctattcttcctcatctcagcatcaattgtcaaccaacatggtgtcatctcagccttcagctcagtcttctattcatctagatccaaataaaacctcatgtaccaactgtaatggtgccaagttatcagattttgatatatggcacaatagattaggacacccatctgaacaaattgtaaaacaggttcttaatgcctgcaatatgtccattaataaaacaaccaattctgtttgtgctgcatgttgccttggcaaaattcacaagctaccttttccaaaagcatctcaaaccatttacacagcacctcttcaattagttgtttcagatttatgggatccagcacacaatatatccttcaatggttacaaatattatgtgcatttcattgatgcttactctaggtttacttggatctacatgttaaagaataaatttgatgctgtcaaagtttttctaaacttcaaagctgaagctgaattgcaattaggagtcaaactaaaatgtctccaaactgactggggaggtgaatacaggtcattcacaccacatctagaacaaatgggagtcattcataggaattcatgtcctactacccatgaacaaaatggtcttgcagaaagaaaacatagacacattgtagaacacggtcttgctcttctttctcaagccactttacccttaaagttttgggatgaggcttttagaactactgtttacttgcacaacaggcttcccaccccaattctaggccacaaatctcctctagaagtcctttttcaaacaaaacctgattacacttactttaggactttcgggtgcacttgttatccaaacatacgaccctataacaaacataaattacagtttaggtctgcaccatgcaccttccttggctatagtttaaatcacaaagggtacaagtgtcttgatgccacagggagactatacatttcaagggatgtcatttttgatgaacattcctttccttactcttcactcacaaaaaatcacgtcacaccacttactcctgggtctgttcactttccaagttgtcaaattcccatagtctcacctgttgcacagtcccaacctacatccattacacaaccctgcactccaaacaatctcagtgaccaatgcccttcgaatacaggccctccacctggctttgagaatgtttctcccagatctgtcactattcaggatacactttcaggcccccctcctggctttgaacatttatgtaacaggtctaatgatgctccagcttctagttcttttcaggtacctgaccttgagctcaatagacacactcaacaacagcctcttagtcagacacaggctcatgatagtgttcctatcactggcaataatgagagcattccatgttctggtgtgcaccaacctgcaataacctcttctgctgctgacagatctattcctacatcagcttctgtaacagcaactcagtctacacacagaatgcagacaaggtccaggtctggtattttcaaaccaaagacctactctgtttctagtattcccgatactcttgctcaagctttgcagaatatcaaatggaatcaagccatggcagatgaggctcttgctttagccagaaatgctacatggactgtcattcctctccctccaggaaagaaggcaatagggtgcaagtgggtatatcgaattaaggagaatcctgatggttcagttagtagactcaaagccagacttgttgccaaaggcttccatcaacagcctgggtttgacttcacagaaaccttcagtcctgttgtgaagcctgtcacaattcgagctgttctcactttggctttgtccaatggatggtgtgtcaagcaactggatgtgaacaatgcctttctcaatggcatattgcaagaggaagtgtacatgacccaacctcctggctttgaaatcaatcctggaagcaatttggtttgcaaattgcacaaagcaatctatggccttaagcaggcacctcgggcctggtttgaaaagctccaacagtgtcttctcaatcttggtttctcctcttccaagtctgatcattctatgttctttcaacatacacctcatcattcaacaatcatccttgtgtatgttgatgatatcttgatcactggtagtgatcctcatgtcattacttctcttatttccaaactcaaccaggaattttctctcaaagatcttggcaagttgagttactttctgggtattgaagttagtgacacctctgaaggtatcattctcactcaaaccaaatacattaaagacctgttgtgtaaagcaaaaatgcaaggggctaaaccgaattcaactcccatgacaagtggcctgcggctctctgcatttgggagtgatcctgttgaagacattcaactttatagatcaattgttggagctctccaatatcttaccattacaagacctgaaattgctttcagtgtaaacaaagtatgccaatttatgcacaatcctcttcaagtacactggcttgctgttaaaaggattctccgatatgttagtggaactatgaaccatggtctgcatcttaaaaggtcca

SEQ ID NO: 21030 - DNA, 3237 bp, Cannabis sativa
gcttgtaaatttttggtgttgaatcgttgattttttttttttttaatattaaagcataaatcaagataaaatcaatccaaatatgacaaatataggttagacaaacttggggcgattgaattaggaaaaaaatgttagaatgaattgaatgtaaagccctacaagaaactatcagagccaaaaacattccacaatgggaagtgaaattccaaatttgttatgtactgtataataaatagctggttttaactaagtcgacccttatattaacttttgttatcaaaccaaatgagaaaaagagtgaactctgaagaagaatacaacaagaaactattttcttcccattgagatgccttaggctttattattctgattaagtaattccaacttaggtgctgatgaaacaagcaccctattgtctaacattatataacattgtaatgctagaagcagtatcttcttaactctagctaagagttttcaagcatagaaactatggtgaaccactagccttactcttgggataatgacaagcttccccaattggaaccagtggatcagaaagcttacccttaagaatttggttagcaatctgaatatttgcagcctgagaatagtgtatgccatcccaactaatatgccttaacggattcttacaaggattaccataaagtgttccgttcaccatagctttcttcccacaatctatatggtagccatagtagctgccacagcagaactccattggaccaacaaaacctacaaaaccataaatgggtgttatagcaaaggcttgttcatagaactacaagtatggttaaatataagaacattaccaaggtcctttgcttgactaattatcgcatatttagcagagtagacatcgacatagataaacacagcaagagggaattgtcttctgagttttaaaaccatgtccttaagctgcctattgaactcctgagccacttcattttgaggtttcacacatccatttttgtccagattacctgtctttgatttgtaatatataacactgtatggtaaacaaccaataggtcctgtgttatgtacccaaaagaatctggctccttcctcgtatagttgctgtaatgtgtggcaatcaaagaatagtaatattattaataaaagctataagttctgctcatttgaaactagttttgtcacttaactactacacacatgtattgcttgagataattggccaagtatatcaggaatgaaagctttgacttgttcttcactagagtattgtaagccaatggccaaatcattctgtcctatgtctaaagtatatagagcctttgagaagtcctctgctcttggaagcctgccttttgagactaggatttattttccattaagaaaaaaaaaaaacccataatttagtataaagcttttcttttagtactataatgtgattgaattaaatagagtagaggttcaagctcaccaccactactactattggaaatgagtcgattggaaagagacttgaaacgcatgaattgtgctatttgaaccccaagatgaaatgggctataccctcctttccgaatagacgaacctccagtagcaaagttggcaccatgtctgaaattagtcccaagtgaatccatgtaaggactaaggtaaggtaacctcaatgcctcagctgcaaatagcaaagcgacatgtcgtattctcccctcaaaaagaaaaagaaaaagacaagaacaatttcttctgttctaaggatcttaactcttcagtcttttaagatgtttcttaccaataaaatctatgacaagacgaccatcacaagctcttccagcggggtttccaaagaagctttcgccattaggtggaagaatctgtgagagggtggcagatattgctcctgtgtcggagtttgagtcaccgaaattgtataaagctgggaatttgcaactccagctgtcaccacctccgccgttaacagccgccagttgtcccaacaagcccaaaaccaaaagcccaagcagcctgagtagctgtagattcacataaggattcatggttttggtgaatccagcttggttggcaaattcaacaactctttttcttttttccttttttttctttgctgttacttttatcagtgattacaattaacactagctttgagaattggacactgatactactattactaatcaacgttgtctgtcaacgtctataatatgtaatgttaatttatattaatcatattgacaaggatatgaaactgcatccagactcgagaatcgagatattctattattattgggataattagaataactaaaagaatatataaataataaaaactcaacaacaacaaacaacataaatatatattaaaagattgtatttttcataaataaaatcataacaaataaaaataacaaaaaaaaacccatacaacaatatttttataatatttttattattattttaatatatttgtgaaataattttcacattatttgtcaacataaatatatattaaagattgtattttttataaataaaatcataaaaaacaaaaaaacaaaaaaaattccgtacaacaatattatttttataattttttattattgttttaatatatttgtgaaataattctcacattatttgcctcattcatgattagtaaaatttaaaaaggtggtacgtgcacacacaaatttatatctatgcagcaattacttttaaataagactaattttaaataaataaaattggttgaaattaattttcatataaatatatatcaaatttgtatttgtacttattattaccatttactagtaggtaattaaacgtatacttacttatttttaatttttattttaattatgtatatttttaattgtataattaatttttttatattattcaataattaaaattatttttataatttattgttaattataattttattttaattaccataatactttttattatttttgaaattatttttgaaataatatacattaccttttacattaccttttcaaaaaaaaaaaaaaagaaataatatacattttttttgaaataataataatagaaatatatatttttattaaaaaaataataataataatatatttttttaaaaggctttttacaaaatattagaaaaaaaataaaaaatttaggttccgtttggtaacacttttgttttaaattttttaatcacaaaatgaa

SEQ ID NO: 21031 - DNA, 7558 bp, Cannabis sativa
  modified_base (1836)..(1860): a, c, t, g, unknown or other
tagcatatatttaatcaatctcttattttagtccttgtattattttacaatagagttgtaataaatcttgattttcttccattgttataaaatctctaacacaaccgttgcaccaaactggccataatcactgatcagactaatgtaaccactcatttgctcatccaataaagctcttcagattactttataaccaatactacaaacgaaaattaatttaaactttttataactagtcaaattaccatttaaaaaagaaaaaaacttacacaaagttttatccataagaaatgtaaactaaaaagtcaataccaacccttattttaaacatctaaataaatacatatacgaattatctttcgtgaacgacacctcaaaggaccacattattattagttattgattagtgcgtccatgctacagtactgctactacgtttcaaaatctttaattaatatttaatttcaatttattatctccattaaaactcaaaagttcacctataataaatatacaaacactacgtacaataagtagcaattaaatctgggataataataaggaacttctaacctacacaatggctacatcctacatatatatgtctaatccagctattcctctatctaatttatgtcattgtgtccctctatatatttgggtcacctaaacaccaataaacacacaggtaacacgtacagctagaattcataaaatatatagatattatagatcaataataatatgtacaagattcaatgcttcagttgattcctcccttcaattatgtttacactgttatgaaactcatttttttttagtaaatatcgtatttgggttttcggttttcaacaaaacacgtatcaaaaccaagcaggttaatttaactaatgtttgattgaagctgtacgcaaattaactatatgtacaaaaagaagttaaaaaattgactttcaagttgcaacaaactaaccgcacgtgggttatcatttacatagttgaatatatatgttttagttctccaacttgaaaaacaaatttggccaataagaattatggtcaaagtgtgaacattgtgaaaatcatttcaagagtacgtgggcttagataaactgatccagtcgtgctccatgacatccagctaatagggaaccattttcagcgccgcaaaattaataattaatcttgttggcttgaatattactgtgctcttgtatacataactatagtgtcaaattgaatattatagaaattcgaaattatatatgaatcagtctaatccaacatgctgatactaatgtatcccattacttcgatacttttgaagctataaacttattatgtgctttcacaattacacgtacagataaatatattattttttagtactgatcagtggacaacataggctgcaaagcataatacaaataataatatacaatatacatgaatttttattttatatggtgtaatatacaagcatctccctacctaccgaacaacatgttgcaaagtgatcagtagatatatagatatatatatatatatatatacatataatatatcgcacaacatcctctaaaatttattaaaaataccaacctcaattatttgagtcgatctattgatcccaaatgggagaaaacattcttgtttgaacaaaaaaaaagaaagaaaacaccaaatgggaaaaagttactgtgctttaaaaattacgtacaaagtttttttttttgaagagaaaaaaaaattactaacttaattattatagacgagtaaaaaagttataatgaaataaaaaaataattgccacttctattattattattattattnnnnnnnnnnnnnnnnnnnnnnnnnttattattattattattgattccagcactaaaatcgtaaataaagctaaaaatatgaagaagaagaagaagaaaaacaaataaataatattataataatgttagctatgcagtgatagtagttgagaaatttggcccccactcttcaagttaaaacataccaccttttgcttatgtatgtcaaaaaaaaaaaaaaagaaaaaaagaaacaccaacttttggaactctacaacatctaatatatattaataattcatcataagccagtaagccagtgaaaaaattacggttaattgtttttaaatccatggaaattatttaaaaatattaattgaaagctttattactagctaaccccattttttcgaaaagctagttgaagacatggaatttagacacttaaatataaatcaacacagacacaaaagaaaataataatgtcatgaaggtagcgcctatttaacaaaaagtgttataaaatacattaaatagtactgagtgaaaagatgcttagtgctttttaaccttcttttttaaagccaatataatactttttaatgttggccgaaattctatatactttattttactttgaataaaaaattatgtaatatgttatatataaaagtagactaattactttcatatttattcgtgagtggtcattttgtcttcttgtcagatcaggaatgttcatgtgcacgtttgttagacttcaaaagttcaattgtgcatataaatttataatttttccattcatatatataacaatagtatatgcttaaacaatgtaattttatttttatttaattgcttatttgggtatgtgtaataagtgtaaaaagttctacatattttattgtgtacgtccaactaatttggtatattatttctattcttaccaattttcactcttaacccaaacaaatgattataattaatttgggaatttgacaatgattactctgatttctttcagtaagtcgaatttaaaaaactttatataactaaaagaaaaaaaaaggaacactttaatgacatgtgacacttatttcgatcaatattcatcattaataaataattcatattttttataataatatttacatcacaggtgacaacagaggccacaacaaaataatattaaattgacaaataacaacaaaaagccttccccagctctaagctagctattactataattgatcaccaagactttatagtcattattattcctattaaatatctcgctttattttcctcttcaaggcatccagtttgattattgactaagcatataatttgatgggcaaagtcagctaaatcgataagatatagaaaagtattgaaaacgaacacaaagaaactacatattattttcttaatatatttttttaagaaaataaaaagaagaaaaaagagaggagagtctgaaaatatatatatttaaaatcaactcatacaagtctaaactcaataattaattaatttgatttgttattgagttgagaatacatgtgtacgtaaaatatttagttcaaggtctaagcagtgaaaagtaggtgcaaaaaaccattgttttctacgacaagtgtacatttcatagaatcgcagccgtccaagtgccacacacaaccacatattaagtgccatgtagcaattgtgatatgtgcacgtggccaataccgaatctcaacaaggctaattttaacacctaattgacctatatttttctattactttatttcctctttgggatttcattttcacttaattataataataataataataataacaataccaaaactctcgtcgtaaataaaaagtgacgacgattgcttggaatctatatacgtgcaagctatttgacctttcaatcatatcgagtacaaatactatcattgaaccaataagaaacctccacgttcacaaaatccatatgtagtaacgtcctcattacaaagaagaaggatccagttctttccacctctcaaacctttgaccaattcacatcaccagctagcaattaaataacaccaaatatatatccataaaatttatgtgtaaaatcatacttgtaacctagcttatagtagttgatgagtgaaagaaacccctaaaatctcataaacgaacacgtatacaccttcaaaaagaaccccaaataataaattaaaattagagtactgacaaaaaattttatattacgctgacgtgttatcaggattgggcatcagttagttacatttaacttttttttctttttcactccatatcaccgtcttgtcgttttgacaaaaattccagcctaactctctccttctttctccggtgtgagctctacatcagtccacgtaatggcacgtgtcctttctcacttgccgacggccaatggaccagggccctctttaactccacgcgtgaaaaacgcctccacaacgaaaaatgcaaagtaggggccttttttatcttttttaggcgcagatgattaaaataaaaacaaaaacaaaaagaaagatggtctagaaggttatctcattggtagacacgtgtcctcctcctcgggatgagtcactactgtatcttttcgcgaggtttcataaattcatgcacccaagccctgaaccgtacgagtttcggataaggtcggccgcatgataacgtcgaacttaaaggtgcacgtggccatttctaatcggtgattaacttccgtaggtcccacttgaacaatagtaagacaaagatgagtcatgaccgtacttatctaacccccacaattactcttctataaataagtgtcatttcttggaacttaaaaaaaaaagagaagaaaaaagaaatcaatttcaaaaatcccaattctcatactccatctctctctctctcactcatctgctttatttgaaagaaaaaaaaaaacgtggactgaagaaatgggtgtacccgagatggacccgctttctcagctgagcttgcctccgggtttccggttctttccgacagacgaggagcttttggttcagtatttgtgtagaaaagttgctggacaccactttagtctcgaaattattggagaaatagatttgtacaagtttgacccatgggtattaccaagtaagagcttgattacagtttgcaattcatatcagattggtttcaattactttttgaatttgtattaacaatatcctctttcccctgtttttaggcaaagctatatttggtgaaaaagaatggtatttttttagtccgagggaccgaaaatatccgaacggttcccgacccaatagggttgcaggatccgggtactggaaagctaccggtactgataaaataatcaccaccgaaggtcgaaaagtggggattaaaaaagctctggtattttacgtcggcaaagctccaaaaggaacaaagacgaactggatcatgcacgagtatcgcctaattgaaccgtcgcgtaaaaatggtagcactaaggtacgtaattaaattaatatataatcaatttgtcacatgtaacttaattaagaagcttacttaattagtttattgttgttttttcgtataaaagtattaattaaattactttctatttgaaaattattgtagctggatgaatgggttctatgtcgtatttacaagaagagctcgggctctcagaataagcaaatgatgatggctagtccaatgagcaaagaacacagcaatgggtcttcatcgtcctcttcgtcgcacctggacgacgtcctcgactcacttccggccatcgacgacaggtttttcaatttgccacgtgtcaattctctgaagacacttcaccaacagggagacgaaaagctcggtttccttaatctgggttctgggaattttgactgggcaactctagcagctttgaactcggtgccggaacttgtaccgggtaatcaagcttctcaacctcaacaatgtactggaaccgtcggatataataataatgacatgttcgtcccttctagtatccctcctctctgccacgtggatcaatctccaccgaagaataagttagagaactcgatggatgaagaagtacaaagtggactcagaaattctcaacggattgataattcgggcttctatcagacgaactcgaacgttttgactcagaattactcaaactcgctggacccgtatgggttcagatacccggcccactcagcgggtttcgggtttaggcagtgatgaaattacagaagtaggaatgcattttgggagggcattattgcgaaactataacaatcaaagtagggagtgcatttctgtaaatatctgagattctttgggctaacattttggctttagatatgaccaaaaaaaaaaaaaacagaggactattcaaagtgttgggggtgtaaaaaaaaaaagggtagatagcagtttcctgaaaaggaaatcataataatagtatatgaaaagggcctaaacggaatttcgcccccacttttttgcttgttagcatacaaattcgatgtatctctactctttgtataatacaatccaacaaggacgtgatcaatatttggtacatgtcattttggaatcaaaatattgttttataaatttggtttcggtcgctatctacagttaatattcttaccaatgctcttttaccttattgattatttcgaagttgtttttcaaaattaaatgtgttttgatatcatgagagttatagactagttatgtgttgctttaatttgtaagagatgatgaacactaattgataatcaccatatattatatatgatgaggtttttcgatttgcaaaggaaggaaggagtatattggattaataaaaaaaaaattctctgcataataatatttttagatttagaaatcgaatagtttagtttataaaagaattagtcagtattgatcgaatatatattcggataagcattgtcaatatgaacatgatcatgattgcaactgaaaccaacttttgtaaaatatactacgaactaattaataatcctcctccagtagtgtggacgttattaaatttcgacataatatatataaatatttgcacgattaattgatgttgatgatgtacattcattgcgaaattccagtatggcatattgtgccaataattctttattgttaagatacaagcaaaactttattcttcacagaaactagtcgacattcaaaggtatgatttgtttacataacacgtgaaaatcatgtagtacttttatttgtctttttgtgaccaataaacatttctcccgtctatggcgcgatcacgttattataactattttttgttgatttttcttcttcattctaatatggaaatatgttcatatatagttgtgattttgtgttccttttttctattttgaaaaatattacagtcaagggtgttttattttgcgcactattcaaaaataaaagtactgacttttacttttatattttctttcgagtgaaatttaattggctaatgcaacaataatattgaacttctgtaccgcgtagctaaagtataataaatgatccaacagttacccctacactacacacccatgtataatcaattcagctaattaaaacatgaaaaaaaaatgagcaatttgcggcgaaaccctcttatgttttgatttttatacacttaacccccttatctttatttttggtggcaaaaccccttt

SEQ ID NO: 21032 - DNA, 5691 bp, Cannabis sativa
  modified_base (26)..(27): a, c, t, g, unknown or other
aagttcttatttaggatgttaataannatacttgtgagtagatctaagcccaatcagcatcacaaaaccctgtcaaggtaagagtggaagcagatttgaggtgcaaaccaaggtcaattgagccagagagatatcggagaatcttctttacactcttccaatgtgtctcgagtggtgtctgcatgaactgagagactttgttcacagcataagatatctctggtcttgtaatggtagcatattggagggcacctacaatgctgcggtaaaaatgggggtctagataagggtctccatagtgagcagatagcttttctcctcctggcattggagtaggtaaagagtttgcattgtccatcttagccttaaccaaaagatcaagcatatattttttctgacataagtgcaatccctttgtagtgtgagcaacctcgataccaagaaaataatgcaacagaccaagatctttgaaggcaaaggtctgatgcagctgttgaattaaagaggaaacagcagtagaagagctacccgtgaccacaatgtcatccacatacaccaatagaaatgtggaatgagcattagtgtgcctaaagaagagagatggatcagatttggcacaagtgaacccaaaagagagcagaacattcttcaatttatcaaaccaagcacgaggagcctgccttaacccataaattgccttgtgtaacttgcaaactaaatgaggattcttgctgtcaataaagccaggaggttggaccatataaacctcttcttgaagttccccattcaagaaagcattattcacatcaagttgtcttatgatccacttgtaagataaggcaatgtttaagacaatcttgatggtggctggcttaaccacagggctaaaagtctcagtgaagtcaaagccatattgttgcaagaagccttttgcaacaagcctagctttgtatttttcaatgctgccatcagggttaagtttctctttaaaaacccatttacaagtgatagctctcttaccaggtggaagagaaacaagagtccaagttccatttttctttagagcaaacatttcacaattcatggccttgttccattaaggatgcaagagagctaacttgtagctttttggttcagaagtagtgagtaacaccttgggtttagagatgctagccttggccctagtaaccatggggtggttaggggctggaggtgtgagaataggaggagctgcatcaattgaagcagcaggttgtggcagaggactcgggttgatggtggtgagaggtggattaaggatagaagtctctgtggcaggaggtgaagatgtagtggattcatctaaaataaacacaccagatgaagaaacaggtagtagaatgagggatagaagctgacactccactggaacaagtaccagtgagaattgagggaggagaattactggtagactgcacactgaagggaaagaaatgttcattaaaaagaacatctcttgatatataaattctaccagttggagacatgcatttatatcccttatgcttgttgctataccccagaaaagtacacatgacagatctatattcaagtttatttttgttgtaaggtctaatattggggtaacaagcacatccaaacactctcaattgagtatagtcgggttgtttgttatatagaagagtgagaggagttttatgttgtaaaattggtgtaggaagtcggtttatagtaaaggcagaggctctcactgcctcatcccaaaaagatagaggcatagaggaatgagcaagaagagtgagggcagattctataaggtgtcgatgctttctctcagcaataccgttttgctcatgggtagtaggacacgacagcctatgtgagatgccattgttaagaagataagattgaaatgcttgataatcacctccccaatcagattggagagctttaatagagcattcaaactccttctcaacctgagttttgaaattaacaaaggtctgaatagcttcagactttgtttttaaaagaaaaacccatgtataccgactataggcatcaataaaatgtatgtaatacctatatccactagaggagggaataggagatggtccccataaatcactatgaatgagttgaagtggttgagtgtactcactgtgtgaaataggaaaagggaacttgtgtattttgcctttgcaacaagcatcacagaaatcagcaaaagttttattacttccacaaatgttacatagagacataatctgcttaacaattctagcagaagggtgagctaatcgattatgccacagactaaaagtggacatagacttattataattgctcatttgagcattattgacagaaaaagagacaactggtggaacaagtgtagaactggctgactgaagttgagtgggaggaatgacatacagtccatgactaaaatgcccttccatgagtggctgcttggactccagatccttgacaacacagtgatcaggatagaattcaaacaaggcattattatcattagtaaactgagctacactgataagatttttggtgattttgggaacatgaagcatattattgagggtaagagttttagatgagtaaggagtgtgaaaaagcttcttaccaacatgatgaatgtcaagaccagccccatctcccatatgaatctgttcaggaccaaagtagggttctttttgggtgaaattggtttcatttgcagtacaatgactggttgcaccagaatcagggtaccatgccggatctgcaacagtttctgatgtagcaatgtgagcagcatattgttcaacattagcagcaccaaccccagggaaaatcaaagttgaatctttgataggagcgagctgctatatgacctggtttagaacacaactgacaaacaggtcttgaacctggagtatttgatgctgaaggaggtacaaaagtttgcaacgatggtggaggaccacaaaaaccaggtgttgacgaactagtacctctcggactcacggcataaggattccacattgtacggccaccacgagacggagatgaactattattagttttgaaatcaaatccagattgaggaaagaaagcattaccagatccagatccattactacgtcccctggaatgacgattcgtagcaagattagcagaatcaagatcgcgatgatgagtctccattctgtgttcttgagagagtaacatcaattcaatctcagcaacgttgtaaggttgtgtgcgagaattcacagagatgacaaatgtatcatattcagctggaagacctttcaaaatggctgctatatgttcttttacagtaacaagatgtccaacggatccaagatgatccacaacagttttgatccgaagaagatactcattgattgataaggaacctttcttcattgtctgcaattgattagtgaattgatcaattttagctgaagtttaagtggagaaatatacctcaagagtttgccaaacttgagcagaggtttcactgccaacaacacgagtcaaaactccctcagtcatagacgaaagaagccaggaatagcggagttgatcctgctgttcccattgagcatagtgaggattgacagtgtgagtgagtcgatcatgatcagaaagaaacttctgaggtggttgaaaagaggatgatatgtaatctgaaagttgatggcctctaatggcagagagcacttgaggacgccatagaagaaagttgttgttatccaatttgacagaaatcttgtgagaaaaaaccactgggtggaacgttgttgctagagtcgaaccagttgatgcagacaaatttgacatgatgaagaagaaagagcagaattactgccaagaacagatgatgcggaagcaaaaaattttgagtatgaacaactctgataccatgtaagaacagagagaatcgaaagagagaatcaacagagaaagagattgaatgcaatgatttctgtacattgatctgagccaaagctcttagtataaatacaatattcataacagaaaataacagaaacaaaaactatacagctgtacaaactaactctctaacagtataataaccatcctaactgtcactgatttcagtgctaacaaacataaccataatgctagagcaatttctttatcaaatgacaaggtaacttactaatctatttctttaccttgctcataactagtcaaaaacacacttgataatatagtgagtgttatttggaatatggattttctctctgttacttctttggctattagtgccgataagcatcattaatgttgataagccaattagtgttgttaagtacacacttaattatagtgttagtgctatttggaatagagattttctctctcttgcttgttaggctattaatgccaagaagcattaatatccataagccaattctgttgtgttttgtttggtgtttgaagaagttctctctcttttttcttctaaactatttagtgggctccaaacccacaccacaaactttccatcactccaaaattgacttttcactcatgtcaaaattaaaaaattatacaaatataattaaaatacatcagcctacttacctaaacattaattaattattttgattaaaaaaaaaaaaaagctaaaaatgaaaaataaaacaataacactcattttcaacaataaatttttcattaatatccaaagataaacgttaaaaacaacttttttttttctcaaaaaaattaaaataaatataaatgaaagaaaaagacatataggaacgaatgatttcaggtcaaacctgtaattcttcgtctgacgtcattacatctagtggcgacgaagtctctgcgaaagctctctctttctctttcacactctctctcctcttttacagttcatccgcgtcaagcttttctttccttccatcttttttattttttgtttctctgattcactttgttgtgatttctctctcttctcttcgcatggcggagcgcggatcgtacggtatcagccctcgattaggtcagatttttaataatttgttcgcttctaatgttttaacttattaatttattgaaagatttattgcgattttaggatttgtggaattttgtggggctgtgaggttggaaattgtggaaatggttttgtggagctgaggttgagacttggatttagtgtttttttttagctgattttagcagaaaggtttttagttcagcttataattgaatggtggattttggagtagggttttactagttcttggtaggcttttgtgagtttttttttggtcataaatggtaggtaagaggaagttctccaagtagggggaagagagagaaaacaaaaagggtgaggctatgattgagtattggagaacaatggctattggtcaaggaaaaataagtgcgctgtattgaactctgttttgttggtcactggactactatgattgaaatctattactatatcaacatttacacataatgaccatcctgaaaatagagtgtgtgttaatctttttagatcatattaactaacattaatgtgaattgaggtttttggaaaagggagaaagctaagttctttcccgttgttgatgaaatgaaaaagctaagagtagtttgagtataatcaagtatttgtgaaatttgtttcta

SEQ ID NO: 21033 - DNA, 2720 bp, Cannabis sativa
atttatgtacatttttattgctaaccaatcacaatatactacattatgttaaacaccttaaatagcaatgcttgaattaaaatgagacaaaatttaaaggggaaaatcaatataatagcaaaattttacaaaagggcaaaatcgtaatttcacataccatcatcatcttctataaacctcaatttttcgacgaccttcagatcgtgccatttccatctctctactttctctctctaaaaaacctctctttctctctctaacctcttcgccggagaaatggatcccgtcaacgagtggggaaacactcctctcaatgtcgtcgacccacaaatccacgacctaatcgagaaagagaagaggcgtcaatgcagaggaatcgagctaatcgcatccgagaatttcacctcattcgccgtaatcgaagctctcggaagtgccctaaccaacaaatactccgaaggaatgcccggaaaccgttactacggtggaaacgagttcattgacgagatcgagaatctttgccgaagcagagcccttgaagctttccatctcgatgcagcgaaatggggtgtcaatgtccagccttattccggttctccggctaatttcgctgcttacacggctgttcttcagcctcacgatcgtatcatgggtttggatctaccttccggtggtcatcttactcatgggtattatacctctggtggtaagaagatctctgctacttcgatttatttcgagagtttgccttataaggtgaatcagagtactggttatatcgattacgataggttggaggagaaagctttggactttaggcctaaattgattatctgtggtggtagtgcttaccctagggattgggattacgccagatttagggctgttgctgataagtgtggtgcccttttgctctgtgatatggctcacattagtggacttgttgctgctcaggtaattttgtttttatatatatatatacatatatatatatatatatattagatcagatctgtgtgtttatcgaatttggtgatttttgttttcatggatctgagatttactattgttgcatgtagtatttgtttattgaatttgtgatttatatatttaattgattcaaattgggattgctaactactgtttaagtgtagatctgttgttgtagaaatggtatttaattatcaattgagttaagtatgtattagaaatggggttaatttgtaagtgttaaataatttataagtaaaacattttagatgctttgtgtaaaaatcctaatttatgttttcatggatctgtgatttaccattgttgcatgcagtagttgtttattgaatttgtgatttatttatttaatttaaagattgggattgttaggtacatatggttgtcttgtttaagtgtagatctgttcttgtgtttcatatatgttaatttatgaacctatttgatccttgctgacatgtagaaatggggttaatttataagtgttgaataattatgaggaggaattgactatcttagctagtaatttggatctaatgagtggaccggttcagatttagtcttttgaatctttgataccttgttaacatgaattattggctccatttgattttaccctgttttaaatttttaatctttttatattcaaacgtgtgtttcaagtttcaatttttataaattatgttggactattactcctacctaatcttgtttgtttgtttgttaggaatctttgacttagtggggttcttttcgaatctaataatgttatttgtttttgttatggtattaggaagctgcaaatccatttgagtactgtgatattgtcacaactacaacccacaagagtctaaggggtccaagggctggtatgatcttctacaggaagggtcctaaaccagccaaaaagggccaacccgaggatgccgtttatgactttgaagacaagattaactttgctgttttcccttctcttcaaggtggtcctcacaaccaccagatcggtgctttggctgttgctttgaagcaggctgcaaccccggccttcaaggcttatgctaaacaagtgaaagctaatgcagttgctctcggaaacttccttatggccaagggatacaagcttgtcaccggaggaactgagaaccatcttgttctgtgggatctcaggcctctcggtttgactggtataaaattatttttttctctctcgttctcatttgtacctcgtaaaacattaccataattttgtgcttgacattctttcctattgatttttcaggtaacaaggtagagaagctatgcgacctttgcaacattactgttaacaagaatgcagttttcggtgacagcagtgccttggctcccggtggtgttagaattggtaagcaatgagaaaatattgaccctttataattcttcactatgtcatgaactttttaacttactgtgattaaactggcaggtactccggccatgacctcaagaggtttactcgagaaggacttcgagcagatcggagacttccttcaccgggccgtgaccatcaccctcaacatccagaaacagtatggaaaattattgaaagacttcaacaagggtcttgtgaacaacaaggacatcgaagagctcaaggttgatgtcgagaaattctcagcatcattcgacatgcccggattcaaggtttccgaaatgaagtaccaggattaagtctt

SEQ ID NO: 21034 - DNA, 4734 bp, Cannabis sativa
atattggttttttgagagcatatgtaggtgtcagtcaatgatgaaggtcgagatatgtggaaggtctatcttgacatgaaggagtatgctgcagctttagcgaattgccgcgacccacttcagagggaccaagtttatgttttgcaggtcagttacttttctgaatatggacctccattttctgttcattttcaaaaaaattatgtgccctaccaattattgccagaaagtttcctgaatttattactaatacaataggagttatattggttgcaggctgaagctgcatttgcttccaaggattatcttagagcagcatctttctatgccaaagtatattacctactttcttgataaagtaaataatttattcctattaatattgcattagttatgatggactggttccaaaggtgggaacatgttcaggtgaaccaggcatgaaatacatggaccgtctgaatagagttttctttcaatagatataatttaattattcaatagaaaatgacaactttgtaactgattaaagtgtattgcagattaactacatattgtcatttgaggagattactctgaagtttattactgtgagcgaacaggtaactgccaaataacgttcttggtcaaatttgttccatttgaattatagatgcagactttcattttagtaagtactttgcctacttgcaggatgctttgagaacttttttactacggaaaattgataatattgcaaaaggtgacaagtgccagataacaatgatttcaacttgggcaactgaattatacttggacaaggttttatttacccccactcatttgttcttttttttgggtgtgtgtgcgcacataaagtttggatataagaactctgatttcgccctttaatttttgtcctattgcctagatgataaagtagatatgataatgtcttcagttaacagaaaaactaagaacagtttgccagtcaaatttctactatctgcatatttctgttacattagtccactaagcttaaggagtctgagaaagtcaattactattaagttttattttctgatttttttttccttaaaaatgagatattattaaaaataaattttccaaattgacaaaaaaaaaaaaagggagcgaaaaattcccaaagaaaaaggaaccaatgtgtaaacaagccaatagtagaactctgcatgggaaactgacttatctgatagagatgagtcaaatttcatgaacacaaaattatacatatttacatctatggcagaacattttgatgtttactatcactatcctccataatttattactatttgatgctgtttcagataaatttcaaacttaatctttccatttcagattaatcgtctactcttggaagatgaaactgctttggatagccatgattcagagtaccaatcaataattaaagagttttgtgcttttctcagtgactgcaaggatgtgttggatgaggcaactacaatgaaacttttagagaggtaattgttgacaggatcctctgtaagttaatcacattttttttaatgaaagtatgaaagcaatagctacttattttctgtcttagtgtagatgaaagtttatattagtattttagttgcttttttccgtgcatgcttacaaatgacaggagttattttttttcttgtaaacatttataatagctgtgcataagcagagactgtatcaaccattttttttcttacataatcacttgatcattttgatgttgtttgttatatcaaagaacactagaattaattatttagcaatattttgcagttatggtcgggttgaagagttggtgttttttgccagtttaaaggagcagtacgaaattgtaattcatcattacatacaggtgcttcatcattcctttctgtttaagcattttatttttgtgaacgttgtcactataaatcgcatttactaatgttttctactagttctgtactttaatccgtaaatacacttacacaagtatcaacatctacctctattttttattgttcaaaaaaattcctttttaaagtaaatttatcatcacttaaaatctagcaaatatgtttatattcatttcacagctgtgatatgcaggattgtgttccttttttctttctttttctgtataggacttggtacttattaaacttaaacactattagaactatcattcttttccaatgagcttttcaattcacttctatatatatcctaggccaatttgtttaagttgataagtattttcatatggtttctggcattagcaaggagaagcaaagaaagcattggaagtgcttcagaagccatctgttcccttagaccttcaggtaatgatatccaaaaatttcaattaaaattgatttttaccacatatatacttaatgtgaacttgtaattgctattgcagtacaagtttgccccagacctgatcatgcttgatgcttatgaaactgtggagtcatggatgacaacaaacaaactcaacccacggaaactgattcctgcaatgatgcgttactcaagtgaacctcatgcaaagtaatttgcaagcaacgtgcattttcatggacatttttttgattaaatgcaaaatgcacaccaacggacttactcttagacatttattatcagttacatgcttcaataacttgtttaaaactagacataaatcttgggaagaattaaaaaaatgactccttagttcttttgggattaataataagtagaagttgatttaggtttagttttcgatttctcatggggaccaacctagcaattaggtaagagtttcttgcctcccccaagattgtagggttcagcagtaaaatgaggaaattagaagttgcgttttgtgctttgatttccttctttgctgtaaatttaatattttaagtatttcttggatagaaatcttgaatactaatatgctaaaaatctcttttgccgtgaattcacatgcaggaatgaaactcatgaagttatcaaatatttggaatactgtgttcatcgtttgcataatgaggaccctggagttcacaacttgcttctcactctgtatgccaagcaggttgtcattcatttactataatttctattttacttttttttgttaaaagaaatgcttttaagctgcacatggtcaattatattgcattccaacaagtgaattatgggtcattctatcttgattttgaacatccaagtcatgttatgggtctctggtcattttttaataaaaccaagcacatcaatcaaaatgttcgacttctgtatttcttacagaacaaaactatcaagtgcaattttttgtatcagtcaataaagtcagtgtgataaaaagtggtttgacacaaataggatcagcagtaatttaaacaaaattttgttttccaatttaacatgtgatttgtgaagattgaatgttgttctgaccttgcatatgctcagagagtagactaccagtgaatttattgttgattttgcttatgaaatcaggaagatgatagtgcattgttgcgattcctacaatgcaaatttggaaaagggcgggaaaatggtcctgatttcttctatgatccaaagtatgccttgcgtctttgcctcaaggaaaagcgcatgcgtgcttgtgttcatatatacagcatgatgtctatgcatgaagaagcagttgctcttgccctacaggtgatgaatttaattactaatgtttttcttgatcatactcttcaatctgttatgtataggtctttaatcgccctatctcgcattgtaggttgacccagagcttgcgatggctgaagctgataaggttgaggatgacgaagatctgaggaagaagctttggctaatggtagccaaacatgttattgaacaggaaaagggagctaaaagggacaacatccggaaggccatagcatttctcaaggaaactgatggccttttgaagatagaagacatattgcccttctttccagactttgccttaattgatgactttaaggtataaattacaagtttcaattggagttcaatgccctgccaaacaaaacaaatacaaacataacaagcactacaataacaataaaacctctctcttttttcagaggctttagaagactcttttatctttaaaatctcattctttcattccagtcaaactgtcgacataacagccagcacttcaaaaatatgattcacactttcacttgactgttctcttgtttttcttattgtcactgtggatgactcttactctgtgttctttacttgttagtgtattagttttttcctcaaaaagttttagttggtatgagtatctggtatctacatttctgtttatttcctttctttttgtgagaatccttagatatcttcctgactgttaatttttgatgattgattcctcttcttttttagctgattttgtgattaatttgttccgtgctaaaacttcagtctactttttcttttcttcttttatgtatcttttgcaggaggcaatatgctcatcattagaggactacaataagcaaattgaattgctgaaagaggagatgaatgatgcaacacatggtgcagacaacatcagaaatgatatcagtgcacttgcacaaagatacgctgtgattgaatgtgaagaggaatgcggggtatttactattctcgtggccctccatttttgggtcttttgtactacaacaccataca

SEQ ID NO: 21035 - DNA, 3058 bp, Cannabis sativa
aaaacaattgtaattttcctttttcattcttttttccagaattctaattgcgtatgagaatggattgatcattctctgggatgcttctgaagatcaaattgttttcgtcagaggctctaaaaacctcaatttaaagtataaaacagtgctaaattgtgtacaaggaacaaaacatatgcttcatgataatttgaatgataatgaaaccgagaaagagatcagctctctttgttgggcatctgaaaatgggtcagtacttgctgttggctatgtagatggagatataatgttctgggacatatcaagttatgtttcctcaaaagatcggcaggctgaagacccagttgataatgttgtaaagctgcaattggcatcaggaaacagaagactccctgttattgttctacattggtgtgcaacaagatcatctaatgatcgagcaggacagctttttgtctatggtggagatcaaattggatccgacgaagttctgacagtatattcttactcttaactcaaagttgattgcctgtgttttgttcttagttgtgcatacttgtgttttcaacactaaaattggcacgatttttcataattcaaccggatgaataccaagtcattagtttaaataattttgcttgaggaagttaactcaattcttacatgaagacaaaaaaaaaacctttagccttcaacataattatttattaggcagatcttgtgaaagatagcaagatgaataattggaaattattgaaaggttacgtttcatggatacattttactcacatcttttatatttccttgttttgagagtaattgattacttagctcatattttcctttgatagagattcttaattctttaagtttagtatatgagtaattgtaagtatctttatttactggagcaatgcaattattatcttctcccatttgcagattttaagccttgaatggtctcagggaatacaaagtctaaaatgtgttagccgcgtagacctttcacttcatggttcttttgctgatatggtcttgttacgaactgccggtgtaatagacagcaacagcaacgagactttgttacttaccttgacaaatcctggacagttgcttgtttatgataaggcttccctgtttgcctcaacgtcccagctaaagaatacatctgtcagaccagtaccagtaaagtatactacagtcgttcctactactgaaccagatatgacagtttcaaagctcagtgcggtgcatggagatggagagttttcacaagctttctctagggtactgctttgtcatttgatcagttctaattatcaagcacatttcagtaacatcatctttcattattggaaatcacttttctagttcaataagacggctgagctaccaaagttcttgcagtacttaaagaaattactttttaaatgcttggcacttgttgtacatgctaactagtttgaccttattcatttagatatcagctgaaaagctaagtgtggaacatttacgtaaaggaagtacagagtggcctttgactggtgggcttcccagtcaaggttttgatgcccaaacttatcaggttgagagagtgtatatttcagggtaccaagatggatctgttcgactttgggatgccacatatccttctctgcaacttattcattctatacaacctgaggtttgtgtctttgttgtgttttgttccttctatgttatcacataattgtactgttcatatgatattaagtttgtattgtgtatataataggtgaaaggtatgactaatgaaattgtatcagtaactgcattggacttctgctcttctacactcaagttatctgtcggtgatgaatgtggcagggtaagaatttatacttttgtctttgccttttgaaggaataaaataaagagagattaatttgatggacaataatatatttctttttccttttgagggtatgtaggttcgtctctatgacctgataagaattccttttgagaagaatttgcattttgtgacagcaactggaaaagaaggtttgggtttaaatgtgcattacctcgatgctgatgtctctatactccatatagatgtcaatgtcagacaagttttaatgttcttttccttaaaatcttttgcaaagtcaaggcaggaaataagatggagcttgatttatagataaaaatcataagatgactagagttttaacagtggactcctagaacaagtttcattttttttttctcacttaaatctttgtttaggagtttgaatctagttttccttcacagttatactttcaaattattgcgtcaatgttgggtttgattttctattggtctgtgtaatatttctttctcagttcataatttccaacaaggggatgtgccttattgcctagcagtgttttctatcctctcttctcctatatgcaccctacatttttctaattctggaaaccaactttttgttgggttcaactgtgggcaggtacagtcaatgtcatcttttttttttccttgtgttttttcttttcttagttaaacgttagagagttcttaattttcttttcatcatacttcttttcaggtcgcaatgcttgatattaatacgttatctgttttaagtctaactgatgtttcatccgagacaagttcccctctaaaagttttggatgttagatcattattagatgctaatagctcagtccagagtccaaagggctctcaatccaaaattccgagtgattctgaatcaggggttctgttcactatgacaatgaatgcacatattagtgtacgagatatcactaccggaaattcggtttgctctcagcctttacaaccaataaagaattgtacggcaatttcattgcacgtcataggtaagtaaatacagattacacagaattatctcatttactttgatttgtgtcgtctgaggactctttcttttcttttgtgtgcagatggtgatcttatatctgaagttggcagtggaaagcattcatcgaaatcacctgaaagtagtaaagctatagatgaactctca

SEQ ID NO: 21036 - DNA, 5765 bp, Cannabis sativa
gtgtctaatagcaatgattttctctttaagataactgctctagcatacatgtaaataaagcttcgtttagctaaaacacttacaatggtgatacaaacttaatcccattttttgttttcaggttattgcaaattggagcgatgtcagttgtttatgcccatcgtatttcatccatatcaagtcatatataacatatcaactactcctagcccattaaccctcttcttcttctattttctccttccatagaaatggcaattggggtaaggcattagtagttcgaaatagctaaggtcttcgagttgggatgtagctaaaatgagaataacaggtaatagcacagccaaataactccatagctacaccggagttgcagtagtttaacattccatggtttggtaacaaactatgccctttgacagattcacacatcaaagggcataaattcgatcaatctctgaattggaataatcagagtggtgccatgagttggaaccgcttctctttgagtacttctctttttttctcatagaccgggatctctttgactttaccacataatatgtcatggtgccaagaacagcagccattatcaacccaccaacacatgtgaccagaattgcagcccatcggtgctttcgtcccacaactatgtacgaagacgccatgaaagccactgaagtgcacactgaagctagccacatcaacttattgattacttccactacctttttctcagccttcgtctcacctctaaccagagtaatttggacaaccacaacggccaaagaagtgaaaagtgcaatggcattaaagatgaagaaaattttaaatggaggactttttaccatcacagctgtaccatcgttattatcaccgccgggtacagtaaatatagctgcaaaggcaactgttgcaaaaagcacagccacgacagtgaccgagttggtagcattgttgattccttcacggtggagcttcctgagttcttttgaaatattatggacatttttgtttgttttctttgtttgttcaagctgagtatgaacgtcttttttaatttgagttacagttttcctcaattcatcccttggttggttaagttcattagctcttacagctccatattgagcaaggcacgcctttatatctgtggcttcttcagaaggagggagttcttcagcaatgtcaagagctgttttatggtctctagtcaatgcattaacattggtgtctggaaggagtaacaactcctttactatctgcaagggaaaggaaaacatcagtatattaagaatatgtaaatataaaactgtaatgagatgcttggctataattcaagttttctcatttgcataagcgtgcggatatataaagaagacgacaaagatttctttagaggatagagagggaggggtggggcataaagaatccacagaaaagtgtcatttaatgtagtgatataggaaatttatattatacaagctttctttgcatcttccatttgtacaaactgtcttatatgacacatgcagaatatgaatattgggaagaaaatatataatacctctgcgcgctttttcctggtagctacatgtaatgctgtgttaccaaatttgtctggaagcatcacaatcgcagcatctgcctcaagaagcaacttcaccaccccagtactctgccctttaacagccatatgcaatgcagtttgccctttcttgtcagtcctccttgccaattgtgaatcctttttaagtaatgcatctacaatatctacatgtccctgtcttgcagccaaatgcaatggatttttcccattagatctagatatttccaataaactacaatcctttgagaggagttcattgacaactgcagtgtgccctcttgtagctgcagaagtaagcggggttgaatttgacggaccaatcgttctgctaagcccaggatcatgatctaatagcacttggacaattgctgcaggaaagtaagtgccaacatgagtttagaagttaatgtagaagtccattttatttgattaaagacacttcctaagtaaaagaatgttagagaaaagcattcagcacgatatcaaataatgaggaggaccatagcagacaataacgaaacctattcttacaagtatagacaaatgaagaaagggcaaaaccatatgatctgaatgtaaaccaagctatctatttgtgtagtagagctattatactatcatgttgccatcataaggaaaaaatttatgtatggcttgccatgattctggtagtcactcactgtaatgccgaatgctcataaaagcacttataaattcttctaaatttctcaggcatcgtgtaattaagaatggcagcatgatagcgaagaattcaagtgcaataaaaactagccacatgataataaagaactcgttctttgtttgcatctcttataggaaacagacaaagataatctgaaccttctacataggcttagaggaacaaaaacagcaaccaaagagactgaatttgtgtttatgttcaacaaatgcagataagatatcctcgctactaaagatatccattcttctgccccatttctttaatcagatttgaataaccttattaagaatacttgataaacttaaactaggcaacctccactacagttttactaatatttcttctaaatgcgagattgcatccatgtttttatcagccaacttcaaattaaatgtcctttcttctaaccgatttctttgatcaatcttgagcaacctcaattaacattactggataagcggatatccttaaactaggcaagccaaataaaggtaattccgttacatttgtactaccatcacttttaaaatggcggattgcacccaatcgtattttcgtttcagaacttcaacataataaaacttccctaaatcatacagctacttcgacaaaactactcagtcagcacaaagccttaagaatattaccatggtggccttggtttgcagcggtatgaagtgggtcatatccacctcgatttttctttgaaatagtttctttattcgaatatttgagcaactccttaacgatgtcaagataccctttgtccgcagctgtgtataaggcagtgtctcccaactcattcacctcgttcactactgacgcccgaatctccgccacctctgcatcaaactcagcccctctcggcgtccccaccatctgactatcaatgtcgtcaagaatctgcttcacggccgcaagatcaccgcgctgcgctgccaagtgaagttcagtatcgttatgccgccccgtcacctgctttacatatttcttcctcccagcctgatcgatccgcttgccagagttcgagagaaccagagccggcgccgatgcagttgaagacggtgacggagacggcgatggctccgccgtcgggttttgactcatcgcagcagctgatgatgatgctactgatgctggactgatcaaacctgactccaagtccctcccaccacctacacataaattcataaccaaatccgtttgtttcagaagtaaactaactttctacgaaaataatatcaaacaaacttagcaattcacaagttttttttttcttttgattaacttagcaattcacaagttgatcttctaacatgtgacatatccactttcaattgcaaattcttaaggtactaatcacagcataactgaatacaaacttcacccattcttaaaattttccaggaaagcattttcgagctagccaaacagtaaaaataccataaaacagagatagaagtaagaataccataatcgactaaggtcgccatacaagatagagagcttttagagagagagatacgattagggcttcattcaaagtttttgagctgagcagaacaaaacgaagaagacaatggttttgattgataatgaaattgaaaggaaagtgccgagaaagcaagtattggttggcgcataattataaaactataaaaataaaaacaaaataaaaaataaaaggtaaggtacactattaaaaactcactcgcgagtgtaacaacttgttattattgtccgttcgattagaaattggacggtataaactagagcattgttagacttgcgagtgtaataatagcgatgacggaaaatggaattggatttttattcctattctttccacgtaggcaagaaaattttgtatgtaaatttatgacaaatggtacagtgcatgtgtggagtgtggactagcctcaaggtcttcatagccatatgtagtcatttttttttacagaaattgtaatttagttaagatataagcattcgttactagagtagagtaatactgttggtagatttatgctatattttattcagcctaatttaaaaatagggttacaaaatgcaatcagtataattaagaaaaaaaaataataactcacaaattggtcggttcggtcgggttaaccagtccaaaccactactaattttttaatttaatttttttttatttttacatttaattattatattttagttttttttgaaagaaccttagttcgggataaattaactccaaaagatgtcgggattcacaggggaaatccctcccctttgtagttcagaaagccgctttgaacatgtgtagcatccttagcaagcttatcaacatgagtaagtctcttttagcaaacacaacattatagaaagaaaaggaagtaagcaatataagatagaagaaaaaagagcagataattgccagtccggggttcttttcgcacgaagagcatccacaaagcctttgaatccgaggcaatggaaacacgatcccattgatgttcaactacccattttaaggcaagcaaaacagcttccatcttggcttccaatgcagagccacagcagccggaggaggagttaaaccaccaatcaagcgagcctttagtgagggaaatcatggcacaaccgtaatcaccattaagaaaggatccgtccactagcaaaaatctatccatagtgataagggcctcaacctgaatcggattcacctgcatcacaataggattagccatacaaacttcctgaaatctattaaagatcttcctcctagcttgatccaagcagggccgggcatcaatagtgtgagcaatctgattcctggctctccaaatactgtcaaaaatcaaggctgcacagcataacatatcagctttcatcttaagttccagcaaggaacagagcttagtgattagatcagcaatatcatcgcaagggatagaatcaatccggaccggcaaaggatcagtaaacaaaagagaaaatgcataaaggcacttagtaaataagtgcaagggtgtctcaaaggaagattaacacaatgggcactcattttccacagaagggttaaatttataaggagatattttagttaattgtaataatgagataaatatatatatattgaatttaaaatttaaatctaccatttcaacttatattttttaaataatcatataaattatatgatatataaatatatatcatggaaacatataaatatatgtaaaaaaaaaactctcttaatcgggttggtcggattagttcggattaattgagcgtgttggtattatttttaacccgcctaatataaaaattcggcaggttatattttgattggattttttagtttgtattttttgtcgagttatctcgatttggtttggacggattattcaggttggacggtttataaaaatttatgtacag

SEQ ID NO: 21037 - DNA, 2794 bp, Cannabis sativa
attttatatttatgtattattattattttatatttttttaataaattattaaataaatattaaatgacatattaaattttacatccatttaacttaaaaatatcacaaaattacttttttttttttgttacaaaatataatcaccttttacctaactatctatatatattttttctaaaaaaatatatatatatatatatatttgattttatttgtttaacaatctccataattcgaatcaaccgacaaagtttattcttttcagatatactaataaacaccatcgcagctgcccctttcttactttttttctttttggatcaatgatcgtagttgctttgctttagtaggtacaaatacagtatagggtctacactacactactctagcccaaatcgaagctttcttcaattcttttgctttagaaaaaaaaaaaaaaaaaacattaagaaattgcaacttgacaataaaaatttgtcaaaagataccaaagatattttattggaatacaggcaaaacttaccaaaatcccataaagcaaattctttagcaaaatggttaaatgtcaccttttttttaatttatttatttacctcacagaccaataagccctacacgtttatacgcctccaaccaaaaaaaaaaaaaaaaacccactcgaaaagaagtctaaattctgataagaacatagcgagttgactcattttgtagtacgtacaattttacttttaactcgatccaaccaaaaaaaaaagaaaaggaaaaaaagaccgggaattgtcccggtttataattttataaatctatccgtgaatttacaataataccctttctgcacaaaactatttactacacccttaaaatgacgtcacgtgcaatactcatcaagggttcagcggcgtccggagagaattttctggcgaacaagaaggggtcacgcctgtggctatggtcaaaccttttgcttactgaagaatctgtgccgttgatttccatatcaccgtaccttggcaagtcacttctaagcgtctggattaactcgggtcccacttcggatgcctcgtacgtgcgaggatgaccgtcggatctgcccgcccagtccacgtgcgtgagcgtggcaggtacgcacccccggtagtcaagcatgttaagaagggtaggaaagtaattctcttcgggatagcacgtgtctaatgtcacgcacggtaagctgaatttggaccaaagcttgcgatctctgacgattagcctcgcgtgcttacgtgtcaagacccagaactgtgacccgatccgaaaatcctcaaatctaacttccggcagcattgcttccggaccacgcgcagcccacctgatgtagctccacggttcgtgctcaagaatctcgatgaagcttttcttggaccggatcaaagtccggtaagtgaagttgaacgagtgtagcggaacgcacgagggtgagagcagagcgaacatggcattcgacggatcgtctagaagcgcgtgagctaacagccgacgcgccgccaaggtaagtgaaggtgtaagtctttcggaaggtttagaatgaatgactcgtcgagcgaacactccggaaaacggcgggtcgtactgatgggtcgggtcggcgtggatgtagatgttgtaaagggtttttggggtttggttaaagtagagctcccaaagcggtgcgaatgggagtggggttgtagtgaggaacataaaagccaacttcttcggcgacttacgaggcagcggtctcgagttaactcgggaagcgagtgagaatagcaactcatcgtccttgggcggcggaggtggaggtggaggtggcggtaggtgtggtcgtgatggtggagggagagagattgatttgatatcgatcttttgatgacgtttggcagctgagaaagtagtttcttgttgttgagttttagaaagattacgggtacggggaatggttgtggtgatggcggtggttgcagtaggagtagtggtggggctagttatggtgaagactacagctaagggtaaacaaagaagtagagcacaaatgagagagagtggagttggggaaagcatggtttttgcttcggaagagagatagagatggagagagaaaagggtcttccttgactgtgtgtgtgactaatttaatgaaagagaatcgttcagagagagagagagagagtgtgggattcggtagaggaagaaaagggttcaattttcaaagtatgcaaaataaacggctacgataagctgtagatatatatatagatatatgagttttttattaaaaaaaatatatacaattaaataacagatataacacattaattataaaataacagataatgcgttaattattatataagaaaaagaacataattgtaaaatcatatattatacaaatacattagtgagctcgtacttaatgaagtaacttactatatatatacatatttaaaatcgaataataaaattaattacttaatttgaaaaatttctaataatttttattatttttaagatatttgtagctttaattattttaaaattttgaatttgtaagtacttattacttaatttttgttaggtttcgttattatgcactcccttgcggattaaaagaaaattttaaaataacttataatatacattttcgtctaaatttaatgatttaccactttagtattacatttacatgtatcacactaatagaatttgtgttgattaaattaaacagaaattacagttttaaatattgaataagtttataacagttactaactcaatg

SEQ ID NO: 21038 - DNA, 6801 bp, Cannabis sativa
  modified_base (6570)..(6570): a, c, t, g, unknown or other
ttaatttttcttttatatttttgggaccccttattagagctataataatgctcagcatgttaaattaaaacttgagatgaaatataaaaaggaaccaatgtaggaaggattatacacagtagtataatttctcccactttttttctaaaagaaaatcattgaattctggggcacatattttcatcacagggaagttatgcagatgcaatatcttgctacaatgaggtgcttcgcattgatcccttggcagctgacagtcttgtcaataggggaaacacttacaaggagattggcagggtgaatgaagcaattcaagactatttacgggcaatagctacgaggccaaccatggctgaggctcatgcaaatctggcttcagcctataaagacaggtaattactatctttcatcttgttcacatctttgaattagttttcaagttggacaaggaaccagtatttttgaaagctgttttagtagcctgaaagtcgtggctggcttggtgtagcaccaacaactatggtgattgtgtccggaagttttgaaattatattattttattatgttgtttgcaatctgcatatcttatttttattataattttaagatatttcttttacaattttattttaagaaggaaaatcatgtagtaatttaatataattttttattgcctaactctcagcatatgaatgaaatttcttactgtgacaataaaagagttctaattgctgtttatgctgtagtgggcttgtggaggcagctgttaagagctacaaacaggctttggttcttcgacctgactttcctgaggcaacttgtaacctgctccatacattgcaggttaatgatttttattgtatctataattttggtgtgcatagtacttggctttcgtaattctgagtttcaagaaattcagtttgttattgatttccatagtgtattttttttcgttctgtattgcaacatttacttgagttcaattattcaggggataaatttctattttcaggtgctgggagccattgtattttgatatattaatcatgttaataacatccttgccttattaatgaacaaaacctagatattttttctcgtttaatacgatcattaactttaattctttttacagtgcgtgtgcagttgggagggtcgtgataaactttttactgaagttgaagcaataatcaggagacagattgatgtcagtaaaagtctttgtgtttgtctctttttgctaatatcaccagctatgttaattttgtagtgttgatgagtttttgttttttcagatgtcacttcttcctagcgtacagccgttccatgcaatagcatatcccatcgacccaatgctggctcttgagattaggtaagacactcctttagaatactatttttctcagaaatgttttcttgtttttcttacttctttgcctgctcattcagctgtaagtatgctgcacagtgctccatagttgcttcccgctttgcacttcctaccttcaaccatcctacaccaattcctgttaaatgtgacggtggaaacagcagacttagagtggggtatgctctctgatttgtacacatatgtttagctactctagtatttcttaccctacgactgttttctgtgccagatatgtcagcagtgactttggtaatcatcctttgtcacacctcatggggtctgtttttggcatgcatgacagacaaaatgtggaggttcgtagttctttacctttcgttttgttctgtaaagtcagccattgagcttttctaattattgcaggtgttttgttatgccttgagccaaaatgatggtactgaatggagacagcgtatcttgtctgaagctgagcattttctagatgtttcttctatgtcatcagatatgattgcgaagatgattaatgaggataagattcagatcttgattaatcttaacggttatacgaaggtgatgctatttacccctttttttgttttctatctgaagcttcattgttttttttattatcataaacacataaaagttgaggaaataactatatactaactggtgcagtttcagaagaatcattgtttgtcatgggttctgatgatgattttgaaaaagtgaatccatggttgctttgtctcattactttcctctttaaaaatgcagggggcaagaaatgagatatttgccatgcagcctgcacctattcaggtatcgtatatgggatttccagggacaacaggtgctagttacatccattacctggtaaccgacgaggtaagatgggtcaaattttacatcgactaacttgctttgtctttttggggggtctcggattcatataatgccctctgtttgatttcagtttgtctcgcctttacacttatctcatatttattctgagaagcttgtacatcttccccattgctactttgtgaatgactatcagcaggtcagttttctagcatactatgttagagagagattctgtaatttttttccctgttacctgaatcttttttgtcctgcatacagaaaaatcaggatgtgttggaaccaaactgtctgcacaagcgatctgattatggtctgcccgaggacaaattcatttttgcatgcttcaatcagttgtataagatggaccctgaaatattcagtacatggtactgtcacgatacttcttcttttcatttttataaaaagcatctcattttttttcatccttttcatataggtgcaatattcttaaacgtgtaccgaacagtgcactatggctactcagattcccagctgctggtgaaatgaggcttcgtgcatgtatgatggctgatttactataaccattaattcttcatccgcactcgtacacactagtttatggaaaatttatgctttctcattgcatatttaacctttcctctggtgaactattcagatgctgtcgcccagggagtgcagccagaccagatcattttcacagatgtagcaatgaaaaaggaacatattaggcgcagttctttagcagatttattccttgacacgtaagtttttcctccactttatacgtgttgctgatctctctattgttcctttttggatttaagatgcgtgcatttatgtgaagttgccttgggctatttggtttttattgattattgaattttccctttcgcgttttaggcctttatgcaatgcacatacaactggcacagacattttatgggctggtttaccaatggtgaccttgcctctcgagaaaatggctacaagagttgcaggatcactctgtcttgccacaggactaggagaggagatgattgtaaataggtaagcattttgaatgtcagtatgcagcacattggtatatggtaatctgtgactgaaaaagttatccaccagtgcattttccaatatgaatgtgtgtcttttgggttcttgggaataaataaattgtgcacacatcataattttagctttggggcgtggttccttgattgtgtctaatcttttcttgtatgccttgcagtatgaaggagtacgaggagaaggcagtttcattggcattgaatcgtcctaagctccaagctcttactaacaaacttaagttgaatcgattgacttgtccgctatttgatacgaaacgctgggtatgtttttctgatgttactcgttattctgttttgcattacacaggattaagagaaatggttgagccttttactactgttgcaggtgaggaatttagaaaggtcatatttcaaaatgtggaatatgcattgctcaggccagcaccctcagcatttcaaggtcactgagaatgatttgcaattcccgtacgatagataaggtatacagttaggagaggcggcattgtagatagaacaaacatgaggaaattatttatcaaaaagtaaaattatgttgaaaagtttggaaatgagatgagtacaagaaagatttgtatttgcgtgattcttccagttaaaatggaaatattcaagattaatatttgctgtgtaactctgggaccggcttcttggcccttccttgcgtgccttgacaatattgtgtacaagtgtcttttcatgtgatcattttgtatccttatggtctcaatgaaggtcactagagttgttctctgattttctaactattcctaaaagcctcatctattccttaataacggagaacgtaactcttcagctgtaatgggctacacaagaatattgtatcactctttcacctgtaatgtttgcacaaaaccttaaaattggaatccgaagtccgaacaaaattaccttgctattcaaggaacaccaccacctgaaataccaactccaaatttgggacgattctgttgtatgacatcttcattttctcagcagagtacttgacctacatgagttcaccgtcttcaaaaacctcatacgacattggattagaacttctattgctttgagttgacaaatggataccgagctctctttgatctgcaaaattttgcatacatggtatttgtaagcatgccattttaggaggaagcgttcacccggattcaaacaaagaaataatcataaattgacatgtttaggaatctaagtatgatttttgaaatgttaaaaagcatttccgaagtgcaactttcgacccaaaggagcaagatatttggacatataaaaactttcctagtacctcttcaattgtcgctttatctcaataagaaaaggcacactacaacctccgatcagcaaatgatgattaaccacattatcatgtgccacgtacagaaacttctaactgctcaatcctactagccaaatcatgctttccacaattcttcaaaccatcagtgaccaaatcaaagcaccgggaaatgggagtcaaacccaactcagtcatctccatcaagaaattagcagcctcgatgaacctgccgccacggccgaacatggttatcaacatggtgtaaacgggtcgattgggcgggtgacctttaaccttcatctcactaaagaagcaatgagcatcatcgaactgtccactcttacacattcctttaattatgggcgcatacaagcttggaaatggcttgtgcccatcttcaatggaattatgcagaagcttaaaagcttcatcgattctacccaatttcgaaaccgcaggaatcaataccttgtaagtattgatatccggaacaagaccgattctgcatacttcgtggtaaagctcaatgcaaaactcaacttcaccagattttgaaatgacttccacaacagaattgaacgtagaaacgtctggagaaaagccttgtttcaccattcttttcaccatttctttggcggactcgatgtacccagcattcagtagcccttccactagtagatcccggcctcgcacaggcggattgaaccctttttcactcatttccttcaagaacaattcagcttctctcatctttccagccgagcaccaagcgttgacaagaatcgtgtaagtccgcttatcggggaccaacccttttcttatcatccttcgtactaatgcgtaagcgccatgaaagagcttcacttcgcagagcgagaagagaagggagttatggagctccacggtctgctgacatcggaaaatcttcgaggctctgttaaagacttggactgcctggtctacgaggccctgtttcccgtattcctcgattatgaagcaaagggtatcggaagagacgactaaggcgtgaagggtctgcatctgttgaaggattttccacattgactcgtacttttttgtccgggcgagagttcgcgccagctcctccagctcgacggtggtgggtttgtaagaggggtggtgggtccgagcccagttgaagaaacggagtgactcagtgccggatttggaacaggcccggaggactcggtagacgagttcagagtcgatggagattcgcatcttgttgagagttcgctccatgtagaaatcacgctgtacgatgttggagatgtggtggattgctgcaaagtaatcatctttggaagttttggtgccattttgatttccctcgatgcggtcgctggtgtggaggtagcggacgataggctggaggctctgtgtcttgtatgtgtttgtgtttattcctctgagaaagaggaaaatagcgtctttggaggacctaaacatcttcgtcttctttagcaaaaaacatcttcgtttttgcctcgattgtttttttagtagctcacttatatactatattcttgagtaatttttcaagtaaatactatgtttaactcttttacacataaatatttgggttttcttaatgtaaatactccaatttaatttttaactctagtaattttttatagtttaattagtatttttgcctcttaaattttgacatataccaaatcatgctccctgaacttttaatgtcgttaaaaatgttcttaaactattgagattattggatttaaatatttttgtctaatttcattcaattttacgtgattttttatgtactaaatcatgctccccagactttaatagctaccaaatcatgcccctcgaantttgacatgtactaaattatggctcctgaacttgactttttactaaaattggaaaaaaaaatctttaaatccaacaatttcaataattttggaggcatttttaacaacctttaagtttatatagggtgcataatttgttacaaagtttaagggacagaaatctttgtcaactttccttttctagtttctttttcaacaaaaataatttgttttcttgagaattttatttaa

SEQ ID NO: 21039 - DNA, 3354 bp, Cannabis sativa
agacctgcaattcgtatgactagtcctgctcccgtttacaatcgatcttttttcgtatcgctttcagtcagaaaaaattattattaaaaaaaattatttaatataatttcattgtattttcactttattgtccaatctacctataacgcattcactcagtaactccgattagtaagtggtttattcaaacaattataatttttaggataaataatatttttagattctacgatttcgtaaaagttatcagttagacattttattttattaaataataaatttaactatgtattttttaaaataatacaaatggtaaaatatactaattttttattaaaataaaatttaataataattcaatttaaaagtattataagaaaattagatacattttcaatatagtcttcaagttggatacatataaaatagaatgggatacatcatgaaattgtctccttatatgtatgtgcacatgaagagatataactcttagttaatttagtagacaaaatacaaggcttgcttgtacttatatatgcatcatgcacatgtgtgagcttatatataaattcattgtatgtacttttctttttcttctaggtttatctgtccaattaaattagtaaaagaaattacagtaaaactaataataattaaattaaatttaagatcctcattgccttgggccagcttcttctaccttttgggccgagtatatagtacaaggaagacccaataacatgctttatatcatttaaatagtaattgtttagatttttacctcaccatttctatttaaccatttttaatcctaacaatttattaagagaaaatcaagacaagaatcttttgtccaccacatggaaccagaagagggagttgtatgtattcgattcacccatatttggctaacaatttccaataaacggaccacaatggtcacaattcaagctcttcttcaaaaataataataataaaaaattccatataaatggaccacatagaagatattgaaattgatagcatagccaccatatataatatatcatggaccatttcaccaacattcatttaattttgcaagaaatttagaggccaatttcttcccaaggaatcaaggatatcttaccataatcttctatctaacattaaattcacttgtgcaatataagggcccatgtgtctcccactatttctgtctcattatggtttggataaaacaaataacaataataataaaaaagcccaagaaagcccaaaaagccttcaaaatcttctctttggaggtttgaaaactacactactaaaaggttcacatataggaaaaacactaacaaaaagcccaccacatcttgggctatgaattggttgagagagtaacaggatgggatgaggaaatttgattgcatacccactttactttacttgtttcaattttacctttatttttatatcctttaaaatatacccacatttataaatgatatccctattatactttttaagttgatataaattatgtgctagacttaagtggagagtgaggatatattaggcaaattactcacaaaagtgggtacatttaaatgaaatataatatgaaagtatttttgattaataaatacaaaaaagaggtattcctcaacttttccctaacaggattgttcatacaatccataatctataattccaaccaatctggatcaaattattggagttttcatatcacatactgaattttttaacttttttatttttttattgtggggcgaaactttttttaaaaatactgtataagttttatactgtgtactgttaaattttcacgattgtttcacgattattttttaattgtttcactgttgttttaattgtttagttttgttgttttatgattgttttataaatctaatatttttgtaaaaaaaatctgtgtaacagtaaaattataaacttttgctcaaaatctaatatttttgtaaaaacatcccaaattatttaagaccaaaccaaatgaatctgatgccaatgattaagtcaattaaccatttataattttctgattcggttgcaattttagaattctcatcaatagttcaaactaaaccgaactgcctaatttatgtgtatacatcaataaacttaaaataaaaagtcttccaaccaaaatagatcaacaaaaaagggtgttgaaagtcagatcaaaaaattcaaattgatcatatacagagttcaggccaaacatcacaatgaagattgtgttaatgctgaagagaaataaagttcatgtatgcaaacaccaagaactaaaaaaacaaacttggtgttgagaaccaaaaaaaacatatagtttgctttaaaatatagaaattctattaaaagtggcaaaactagtctttccaagtttccttactcaaccttctagaggcaaggcgtttagaagaagtgaggctcggagaaggctttgatggcgtcctcggtgtctcctcatcgtcccagtcatcgccccaatcctcatcccatccctcattgtcggtcaacttctgttttccaccaacagaaaccggtagccctgtgtctaacttttgatatgtaaagccaccgattgaaagcaacttcctcctccggaagctaacaaacaaccaagctgaaaccactattagcaaagcagcaaaggacatgaatgcaatggtaggtctttgcgcgggaaggcctaggtatgcaaacttcggagaggaattttgcgtgatcagatccttaaagtcaaggttgcaaacgcgattgcctgctcttaagatgatcaggctatcagttccttcatttccaatagaaacctcaacctgtaaacaaaagcttcaagttggaatcagtacctgctttgtaggtgaatcaaacatcattctttgtattttgatctgaaacattattcgggttatttctaaggataattgacggcaaaaccccattatgttcttaacttcactcatgtttgtaaatttaagatgccagttaaaatctcattgttaaagaccaactagattgccactatggacacttgtgtatacgctacactttcattggcttcaaggttttagtgcaacgtgtacacagtgacaatcccagttgacatttaacagttgaatttaaccggtgccttaaatttgcaagccgaagtgaagttaaaacataagaagggacaccagcccatcaagctggaaatactttagcaatctagtgaaaacaagtatatactaaacaatcatgttcttgctctacttaaccacatataactatactatgggaaattcaagatatacattagtatgacatttagtgtctcaaatcactattcgg

SEQ ID NO: 21040 - DNA, 2759 bp, Cannabis sativa
tagttggggtggtttattcaaatttgactgtgtaaatttatttaaaaaactctaatatatagatactgagtgatgatgatgccaaatttattacattatcctgagtaggagcctttttgtctttggaaaacacaaagttggagatatgaacttggaatgaaacgtgggacccttttcaaaatcttaaataacttttttttttttagctgagttttcaatcgaattaaaacacgtaataatttttatatatttatttcagttttcaatactattttcattgagttggagaattttgtccacacttaacaggatcatatatatatatatatatagatttatttatttatattagattagaagtttgagcaaaattactcagtcaaaaagaaaaaatggcgaaacgtatatcggatcttgttgggcgagtccacccaagtctggattttgatcgtcaaaagttgctccaatacgcctccgccaacgtccatggcttccctcattctcccacaactttcacactctctcaggtccttctcaaacccttatctatctatgtcctttcttttatgtgattgtataaagaaaggattttggtttaattgtttttctttttttcctttaatttcatagttcgggcatggtcaatcgaatcctacttatcttattgaagtgggttctgggtcttcattgaatcgctatgttctgaggaagaagcctcctgggaagttgctggagtctgctcatgccgtcgagagagagtttcaggttagtctttttccaattattggatttggcatgaaatgaaacaacaattcatttgaagtcttttatgtaacttcaaaatttgattgtttttctctcccaatttcattgctgtatttaacaggttcttcaggcattaggagctcattcacaagttccagtccctaaagttttttgtttgtgtactgatcctagtgtcattgggactgctttttacatcatggaatatttggagggacgcatttttattgaccccaggctaccggtattgctttatagtttctaatatctttgcctaataattgatagtttgttgaattgtgaaataaactatgcttggtatgagagagtttaatcaagtttttgactttttcatcagggtgttgcccctgaaagtagaagggagttatacaaagcaactgcgaaagctttagcttctatacataatgcagatgttgatgccatgggtctaggaaagtatgggcgtcgagacaattattgtaaacgacaggtgaatctatttgtttcggtgtttagcttatgtaattctttctgttttagttctaagtatcaaaagagagaaagatatatagtgtcagcaaacatgcttaactattcatatgtttgtcaaggttgataggtgggctagacaatatattgcttcaactggcaagggtaagcctgcaggaaatcctaagatgtttgagctgatagattggttaaggcaacacattcctcttgaagattcttcaggagccgtgggaggcttagttcatggagactttcgccttgataatcttgttttccatcccgtagaggtttgactttttttttcaaagcttcaattaatgcaaatgccaaaatccctctgtttgatgggattagttcaatatggtcctaaaaaattattgtttcttatcctatttgttttatttctctagccatttagttgatatgctagacaaaacaatgtaattgtgtaattacatataaaagtagtgcatatgtattttaactatttggattttttggtcaaagtccaaggctttccaaaacttcttactttttcattttcagaatcttgtttcccaatctttttcatttcttttctttttacttcgttatttgcattagctgcacatctgatgtggtgcctttatagtgcagaatcgagtgattggcattcttgactgggaattatctactcttggaaaccaaatgtgtgatgtagcatacagctctatggtacttatatttcaacctccactatttggaaactaaagatctacagtattctgttgagtttgaagtgcacctaagattttgttacttttatagcctcttatcatgtgctcttcagtttccaaattattttgatgtttttcaaaacccttctaatcactaaattttggattctcattgagaggattttccttatttaatgttcgtatccttcctttgcttgcagcattatgttaatgacctcgcagttgacaaatctcaaatttctgaaggtatggaacttactgggattccagaaggaattccatcactagcagaatatttggctgagtactgctctttaactgtaagtccaatgatagtactattgtgaacttgttatttacttgttgctcccaacagttttggaagaagtctagtaattaaagtaatgaacaatgtcagtaatttgccacataatgagatgaaatggtgatagtgaagagcatagagagaccaagctattaatgtgttaagtttgactctgtatgattccattctatgttaattaatttaatttcgtatcagtttggtgcaagttacaattgtttcctattaattttattgagtgatggacttatgttgggactgttgtaattgcagcataaaccatggcctgcagctgtgtggaagttttatgttgccttttctttgtttcgaggagcatcaatctttgcaggaatatatagtagatggatcctggtattttctgaaga

SEQ ID NO: 21041 - DNA, 4824 bp, Cannabis sativa
  modified_base (51)..(57): a, c, t, g, unknown or other
  modified_base (107)..(145): a, c, t, g, unknown or other
tagagatctgaacgtaaggagacataatattttgctgcacccaatgtaagnnnnnnnatactttatatgtgtttattttatgatccttttagaagttcatatttagnnnnnnnnnnnnnnnnnnnnnnnnnnnnnnnnnnnnnnnggtaaaataatttccaacacgaatgtatgttggcaccctgtgtaagcggtgactaacatatctgacatcctaggcgaggaagtaacttcaggagtacctcccaatctttgacactgcattgttattggcgttgccaagccactggtaccctgactgactaatgtaaaagtatatggacctaccttgcaatggaacagatttcaactcaaagtattaccccagctcgtaaagtgaaggttatggccacctatgctttgtgtaaagaacgaagagcaccaaaaggtacttgacacctttcagggtgatttgggtcgtacacagcttaaagaagttggctatgtccctaacgtaaggatgtaggggcagcaccgccccttgctcaatgtgatgacttgaccaaggcatccagttagatcctagacaatgcgctaacttgtccctagttggcctattgagtcaaactcttcccacaagtcctcctaccttaatctcataatgtttcttagttgacagagaagacggaggtgatatccatcgttattgttccccatactcaagatccatggttcaggagctttttcatcaacatggtcgatcccgacctcacatggatgaccctgacattcaaaggccacctgaaatcatcataagagcctagggggtagctcaagaccacggtgcaagtctttactacctcccagcaacacctaatctagaagcaggttcagcttgctcagcatcagaaatactgtcatgaacggtcgagctctgctcttcctagcaggccatagactgctcaactacaggctcctcaacctagctggcccctagttggttagcttgaggttgttcaacctcttctacattgcaaaccctccttctcatgaacttaacaatgtgagggtttcgaggaggtgccttacgacacatctatctagccttagccatggcaggcttggagtgcctagcaacagaaactacagtctcaatgatggaaatatctctaattaatagtttttaccaacatgagggtaacatatcaggcacaccatcttggaaaatgtatgtccacaaaatagggaggaactgcctccacccctagtccagttcccaaacgatttgaccataaaattcaccgcttattcactctaaatagcagtgacgttggacttcatgatttggaaaaccactactaacctcaaaatcactcgaggggctacccaaagaaaccttagaagaagaactagttaaagaagctagacaatggttttcaaagagatgactaagctagttttcgtcgattcagttgtcacctccccaaacgtcacgcgggttcatctatataagaaagacaagagaaggtgagcaaccagaaaaaataaaaagacttagccaaagtacaagtcaactaaacctgtaagtgtcgttattttcacagattattttaatagaaagtctagtcgtatctggtgattttagtctgttatatctacacacctgcttactgttatagtccgtgtgattctgttatgacttaacagttggtgttagtttgtgttaggacggctgaactattgcatataaatagtcttttttgttctgtaaactaatcatccattgaatcaatttctttgattactttaggttcatcgtgagagtcagagttgtatcttgcttttcttgttcttgattttacaggtttgtttgttgagcttgaagatggagatcttttgtagacagatcagggcctgacgttgctgagttcagactgaagggatttcagtgtcatctttgtcatcagattggaagggatttcagattgaagagaaatgtcgaagacgaactcagtagctgcacaagggattgtgttcttacatgtgttcttacaatcaagattccaatcaagattcttaattggattcttaattgttttcttaattgttgtcttaattgttgttggtaattcattactaattgctgtaaagattgtattaaattcataaggtgaattggatattgtaatacgaatcttttggatttagttgaagtgattaccctggctcgcggaacccaagcactagtcggctgagatgcgttctcagtgcagatgaagcttgtaattcattttgtgctctaatgctttattctcaatccaattcttgaatacaagagttcaaattaatcaatccagtgataaaaaactcggtaataagaatcttgaaaattgacaagtagtactttcaaaacctatgggtactagttaggcatcctaatgtacaaagccgttagtcagcaaagaacaaaatcgaggtgcaagaagttagacaacaatgagtttaggctagtaattggccaagatagactcaacataagatatgccatgagagttcttaagggaaccacgtaatggataaaggcaagataagttcaaagagccatgaggagttcgtgacttgaagagtcaagaatctaacaatctattctttttcattttgaaattatatacatcctaaagttatcatgcagattataatgtgaaaagactatactataatgtgagaatcaaggattttaaaaagcttgaaaaatcttgaactcatcaatggtggattaaagagaacaagtagaaaatgagatttcaagatttacccactactgaagtccgatgtggatgctcgttggaaggttggatcgtcaaaaaagaagcaaaaaccttaggaaatggagacctttggggtgtcaggtccagaggaggacttgaagagtttttcttttctttttcttgaagaaaatttgaagagagagagagagaagtgaagattagaagttaagcaaatgaaccttatataggttttgatacactcctccccttataacttagtgggtggttactctttctaaaaaattgccatgtagaagatcaagagttcataagtgggaacgtttgcaacatacaataacacatataataaatccccataatgattggcaaaaaatcctttttgggcatgaagtgagttatgtgaaaggtcaaatttttgaccagccagtaccgcctcgttaataatttaacagtcagagctacagttgaaaagttcctatttgtacaaatgtttacgcatggacttaaggggaaaattttatcctaattttttaccacatgacgtgtcatatccacgtgggcaagagtggggccatgtggaatatagcgtctcaataagtacgcaaagtcaccatgcataacatataaattggcaaatgattcaaacactcaagcaggatcaaggtacaagaaaatggccaactagagggtcttgccggaccacatcctggtcggccaatgatgactatgtcccgactagctccagacaatgaggtaagattagcataaaatatatatatgtatatgtttaagtatgtaaattgtatgtagtattataagatttgtgtactaccagcagtagtacgagacgagtacgaagtacatgtggtacaatactcagtagttctcgaggtaaggttcagcgccactaacactagtacgggacgagtactttgttcatgtaatacagaggtcgtacttctgttgaaaacattctaaatgcatctgaagccttataaacaagtgtatgggtgcctagatacaagtcagtattatgttatatgttttgtccttttcttactgagcttgtcaactaatagatagtgtttacatgtgtatgttaacggaaggtgaaagctgagcatcagtgagtttagggcttgaggatgattatacatatcaagatagttagacctagagagttcggtctcgagacaacaagggcatttattttgtagttgcagagcgacatgtttataaagtgtattttgaatatgattgaaaacttttaagacgggatcaaattttaaaagtttatgtacagttgtacatttataaaattttaaagttcaattaaaattttaaatttgacagaatttttgagaaaccctttgattagaaaaggtgtacacagtaattagaaaatcattgtagcgtgtctaagaaagtaaggcattatagtggactactacagaaaatgggttgaggtgaaggctttagttagcatcacaaccaagaaagtagtatccttcatcaataaattcataatatttagatttagaatgcactacaagatcattacatataatggaacccagtttgagggagacttattaagtttcttttgtgaggagaaacggattgagaagggattctcggcagtggtgcacccccaagaaaatggccaagtggagacaaaaaacaagataatcaagaagaacctcaaaaaaacttggagaagcttaagggtagatgggtagatgagcaatcaaatgtgctttgggcatactagatgacaccatgctctactataggtgagactcctgtttccttggcatatggatgcaaggcagtacttcttatcgagatgaagctccactcgttctaagtgggaaactttgaagtaatttcaaatgaaagagctatgggggaaagtttggatctcttggaggagaaaagagatgtcgcccaaatgagattggtagtgtaccaacagagggcgacatgatactataatttaagatttcaggtacaagcctttaggaatgaggatttagtgctcaagaaggtcgtcccc

SEQ ID NO: 21042 - DNA, 2580 bp, Cannabis sativa
tttgtttggacaaattaatgcattattatgaccaaagaggctgctataatgctaaacgaatttctccctcttcgattggaaggaaactcacacgtttctgaaaaaattgtaaacatttgtatcagcactactcaagatatgaagagatcaatgaagagaaaaaaaaaacgatatatataaagtctagctgttctgtatttattccaaattacaataacaaaaaaacattaaatgaaaagacatatattatttgcgatatttagcattctactatttaattaaattagttcttatgccactcacaaaaaaggaaaaaaaaaattaatacttattatgcatacccatgatattccctacatatacatcattttatgtttttaatataataagttgtctcctagtggtcatttagtagataaacatgcagtgtcaactatatgacgtggcatgcataggtgatgtttcttttaatttaccaattaattatagatagttgagttttgctaattactgaagaaatgtcctcataattcaacacttcaacatattgaaccagcttcatataaaaaaatggagactatttgaccaaagcaaatatacccatacatcaatgttatctgcacaccttattaaatacgtaccaacatttgaataattctgccacatcatcatcttaagcaataactttaccatcacaaaaaataataataccaataagaataataataaaaattatgcaattactagcacaaaaccaacttttattttcaattgtatattattattatcattattattatgccaaaaacagaaataataaggattagaaggaaaaaaacagaggtcgaaccgttaggggctgaagacattgactttggctttgtcaaacatgctagcacttaattttttttaatttttcctttttaggccaagtcacttacttgtagttaacaatacaaaaatacaggcgatttttccgggaatccatgaccaaaattttgataatagcctctaaatattataattgagagtcaatagcctctataaattgacccaattgaccaaatccagtaggtaaatccattcaactaacatttctacataacaacatttttttttgagaagtacataacatttgttatcgtctactttatcttctttttcctcaaaagaatatatatttatacgcttaatttctcagttcgttatcaagtaacaaattatgaattaattaacataaatatatatatatatatatattccaattcttttagtagcaaaataaataaataaaaaaaaaacaaattgcaggcctagagacatggtaatggttacctttcggacccattaaagcagagcaattagtccacttatccaactattggtgatctataacaattattggtgaccaaacacttctctaaaatgtatatgaaaacgctcccagcaggcctacaacgccttattaataatgttaggaaaatggtcacactcttttctctctctctctccttttcttcggtattatattatatatataatatatatgtatataatggtctatgtcatcacttattcttttgctatttctttggctacgagaaaaggcagttggcattgttaatggtttgattgtcacatttgaactttttttgttctccgagtgagtggcactatattaatataggttataggtttatatgaatatattgatgcatgagtatgtaattctaacaataataaatcatataaagttgcatcacacaacaaaccattgctactagctagctttgactctttaactaacccatctcgtatacaaaatagaaaatcatattaatttccggtaactaatatacatcattagtcaacacaatgttttttcataggttggtaactaaattagagtggtgaaaaagactaatatttgtgatcattggggtcattgcatataacgtatcacttaccacaggtctcttttgtcaaacctatactttttctgatctcctaccctattattaggtttcatttcaaaatctcaacctctaaaagactaaaaaccatatataatatgtatacatatatttatattgttaatgatatattaatatttagttatcaaacaaaaatgttagccaataaaatctcactctagtgtttgtcaattttgacatataacttattttattttcgagaaagaaacatataaactatttgagtattaaaacaaaatggtgaagatagaattttagtagttggataaatattagtgtaattaaatcaataaaaaaaaaagagtattaaaacaaaatctctatttctcaagatatagttataaatattcaaacgtgtttactacaaatcaaaaactctgtcaaccatgtgaattgaagtttaaatatgtataatttagtttagatataacattctaatgatacttcaaaaatactaatcataaaatattatttttaagttgttcatgcataacaccaattaattcaaactaacttattcttaaagtgatttacgaaccaacacatcacatgaaaactgggaaatggtttgaaataataataataa

SEQ ID NO: 21043 - DNA, 4412 bp, Cannabis sativa
  modified_base (4366)..(4367): a, c, t, g, unknown or other
aaagtttaaattacccgtgtttatcgttctagtaatctcgtttaggggattagggtttcttaatcaccttgggtaacgtgcttaattgttagggcgttacagctattgctatgggagtccatccaaaaagcaagctatggaacaacatgctcaagagatagctagaaaacttggaggaattctatgaaagagctaagaaatactttcaggttgaagacgggcatgagaatctcacaatagggaagagtgatctagatagattggaaaacccccacgcgcataaggaacctcagaagaatagggaatttgatgggggaagaaatgatcgagaataagaatattaggagggaggaggagccccaacatagagaattcacttattataccagacttgcatgttcaagggagcacatcttcttgacaaatgaacatcaggtaccattcaaaaaaccacctcctatgaggaaggacaggtcgaagagagatcctattaggttttgcaagttccacagagatattggtcacacaacagaagaatgctctcatcttaagatagaaattgaagacctgatacaaaggggatacttaggaggatactataagcaagattgatgccccgaagaatggaggcaagaagatctaaggaaatgaaccccaaacgaggctccaaaggtgttgagagatgtaaggacaatctttgggtaaccaggagtaagaggttatacctataagagaagggatatgtatgcacgggaggggagactacctccaatggtcatgatcttagaacaaaggccactaaagaacttcaaaggggaagaactctatgacgttcattgaggaagacacacgaggagttcactttccccacaatgaccctcttgtgttggagatacaattagctaatgcccgtgttcaccgagtgttagtggacaatgaaagtttggttgacatcctctatcaaaacgcgcttgagcaaatggggttaggcttgaaggatttgatttcttgcacgacacccatatatggattcattaaggactcaatacatcccctagggatgattgaactcctactcactataggggaatatcctcagcaagtgacggtaacgattacattcatcttggtagactgcccaacatcctttaatggagtactcaaaagaccatccatctaccacttaagggttgttatgtcaacctatcacttagccatgatgttcccaacttcgggtggggtggccatggtaaaaggagaatagaaggaagcaagagaatgttacaacacatcccttgggattcccacaaagcttcatgagtccacagtgatgactgtgtgcaacaggaacacccccttgcaaagagtagaagcaaacttacacctgagggtgaaggatgacgcccgtgcagaacttgatgaagaaattgaagaagtggtgatgttggaacatcccttgaaggtactcaagattggaagaggactctacaaagccctcaaaaataagttgaaataatatctcaaagggacgttggacgtctttggatggggagatgaagatatagtgggaacaactcacacattgatgtctcatcattttaatgtggaccctcaagcaaggctcgtaaggaaaaaatgatgagctctcaattctgtaagatacataacactaaaggaagaagtggataacctcaacttattttgatttatccaagaagccttttacctggtctgcgtatctaagcctgtcctagtcccaaagctgaatgggaaataaagagtttgtgtagacttcaccaacttaaataaagcatgcctaaaggatagcttcttgctccctcagatagactagctggtgaacgccaaagtagggcatgagtgattatgtttcatggatgcatacttgggatacaatcagatcactatgaactcgggggacaaggaacacatatccttcatcacatgcaaagggctttattgttaccgagtcatgctgttaggactcaaaaatgtcagtgtcacctattagaggtttgtcaacaatatatttggtgaccaagtaggacgtaattgttagggtttaagccctgaaaagtccgtaatttttttgattattaaataatgagttgaacatgtgatatatatatatatatatatatgaatgttaagttattaatatattattgtataatttatattaaatatcagaaaattcctcattcataaatgaggttgtggcttgtagctgtacaaagaactttgtgcaattaagctatgaattaaacagtcaataacatattaaatttggggagtctttaatcaacagtttgctaggacgattcactgatgcccgttcattggtgcaagtaatctcagttcggattacggatgtagtatgacatcaaagtgaaggtattttatataatagagattatatatgacaaggaccaatatgaataaatttgtatttattaacatgtcgtttatcataaaaacctaattcgtatcataataaagatcaatagtagattggcctcaatcctgagttatcatgaactcttattcatgtgattattttctttgatttactcgttaaagtttcttagagaagatgattcttacaacttctgttttgggaatctaataatgtgcatagctaggaacatgatttacaattatggaatcttgactttcctaatagatcaaatgctggttccctttaagtgttaattctggaactgaaatattgtgcacaactttagatgggattctaattatacttccactaatgaattaatggtacaaaaggataaagaaataattagaaaagtaaaacgataaattgaccaaaaaaaattatgaaccaacacatggagggctaatcactggaattaattatatcaatggacactgcagtttaagagttcaattctatatttatatttgaagtaatcatggaattaataaacattgattatttgattgatgagactgaataaataatgtagtttattggatcttagaattgtaagtccatggtcccctaatcgtcacattgaaacactatcaagggtaggaataaagagttctataaagatgtttggaaaaatctattttgaattggaaatatagtaattatttaattttttaataaataaattatttttcaaattaattaaataggaaaaatacaaaaattgttaagacaaaatttgttgagacaaaatttgtcaagataaaagacaccaaccttgtccaaaatagacaagggtagacgcctactgttgttcctgttcctatggagtttgtcttttaagttaattaattaatcaaatatgtaaatatttaatttgaaaagtttctatagatatttcaaggttgttgagatattctctcaagtattttagagattccctcataaatatctgtaatccaattcggtttaaatatttatttatttaaacaattaaatatgatttaattaaaaagatttaaccaatataaatagaagcctgatttaaaaaaatcagaacacacttttcacttctcaaaacacttaaatcttcaaaatttaaaaagaaaaaggaaattgatttttctctcaattgttcttactcatttattgagaactcaacaagaacaaagttatacactttatcctaatagcccacactatttcttatgtgtggtggaacgatttagaagacattggtgtgagtctagttgcatcatcctcatcatctggattaagggatacaacatacgagaagttttgagaataccttgataggctccaagaggtatattctaaacttactatgtttgttttttatttatatatggagatccattaggatataatataatgataatcaataatacgaaactcttccgttgcgtatctaatttagtacgataaaaccaacaattggcatcaagagcagttttaagaatgtttatacattaaatgttgtgtggattttatgaatatatatatgtgtgatatgtatgtgaatggatggtaattttattgtaaatatatgagagttgatgaattgctcactatatggtgtaattatgtgtaggttttattcttattattttttaaaaaataatgtgagccaatttagggaagagaaatttttatgtaatttatttcacataaaaattgaaccaatgtgatgctcacatcatgaagctcagattcaatttgaataccaaccatgactgacaaagataagcccatgcatgaagctcgagtccctatggactttgttgtcaaaatttttgtaagcttgacacgtggattctaatccaagaaggcacaatgataatcgaacggtcaatataatcagatttacttatnnataaagatcagaaataacatttagtgttgcatggttcacatgatt

SEQ ID NO: 21044 - DNA, 1765 bp, Cannabis sativa
gaatgagaagatgttagaaagctaaagttaattatccaaggttataattgtagtttcatcatcaaaattttaagtgataggccattttgctaaatatttataaaaatggacatttactcacttagttttcatatttatgtctattttgaatctcatccttaaaaatagtgtactgatacactttttttttttaatatattttggtatttagaagaaatttttagtctaatttttttttcctaaaaagtactgttcaaataatctatttcacacgtatataaaataaaagaatcacacatataagagacttttgaaccctatttttagcatgtcaaatttcttcaaaggtctcaaaattttaaaagatatcttaaataactataacgtacacgattatgaacaaaattaacctaaaaaatttctcccaaataccgaaatagatagaggtgcatcggtgcattccttttagggtgcattgtaaaattttccaattttttttcttttcttgcagaatttaaaattatttttctaaaaagtaaaaaaaaaaaaaatcagaatttcaaagtttataattgtttgttactatatgtaccaaaagtaaacgctcatcaaaatggttatttctttatttattttacattttttttatcttttattaaaataagtagcaattgtattattttaaggaattataaatagcgtttttttttgggacctttcaaagaaaaaaaaaatagggcttggtaggtggaggtgtacatactaataaaaaagagaagtaatctattgtaatcatagaggagtccacttaaatatcttaatcatcttgagtaataaaattttcagacgacagagtcctccatgattggaagttacattaattaattacttgtggatatttttttatatttttgttgaatgaataagttgtaattttttattattattttatgttatgtatatctatacaggtaatttataaccaatttttatccaaatttaaaaattattattttacattgttatcgaaagaatttaaacaacaataaaattcgtgtaaatatttaatgctattaagaatactcagataaaacttgctgagtactcacttagagtagtgagtactcaaaggattgactactaacaaatagaacaaaaagcaaaaaataacaagaacacaatggtttagtcaaaacttggtctgcttagtccactgttacaaaaatttcagcttagtttatttaattcgaatcactcttttatatcgaaagcaaatgacctttaggatttacataactgatcaattttagaatcgtttacaataaataacagtattaaatcagaatacacgtttggagaataaatgaagaacagtttaatccgtctttgtattaagtgtgtcaaagtatgtaactagctgagcgagagttgtctattcgtattctcgcacaagcttgcaagcttttggtgcattttgtattctctaggtggctcatggacatatcgtttggatgtctgcattcacctaagattgcataaatggacacctcttgtgttgacaacatgggacatgtgggtcgctgacgagtcatcgaatacaatcagtcattcgaacctctttatgtaatgaatcgttctttactaattgcaggggaggtccacctagtcgtctcacatattctgatatatacgcgacttgtattaaatcctcttggtcatgcttgtctttgactatgcaaggtgtaacatgcgcgccaagataaca

SEQ ID NO: 21045 - DNA, 2624 bp, Cannabis sativa
ctctctctctctctctccttattttcttttgcttctttttcttattcttaatctgtttcgtttttaattggcttatatcagttgaatcgcttcacattaggttttaaaggaagaaaactatgaagcttttgatttaactattgatgtagttagcaatttaatttagttatttgtgagcatttaaactattatttgatttagatttataataacaatttttagcgactcatcattatgcactattttataatttatcataaatatggtaaatcatttaatttccattcatatcatattcatgcacctactagtgcaaatcgcaagaacaataaagttgttgcaagaggagaaacttgagtgaagaggttagtaatagatctaatgaacaatatattttttttctcttaatactgagaattttaaacaatttttattgcaatttgtaggtatatacaatattgtctcaacttatttttattttctgttctatatttgttatttgtgaaatgtatgtgcttacaaagtatttttctcgaacagtagagtgcactagtgattaagaaagtaaacaatgcttttactaattttttgatccgattataaatgaattacttttgccacataggcacttaacattagacaaaagctctcttgcaagatggttgtgataatagttttaaacttttaagtcattagaggcctcatctaatacatcaactaacgaataaccaaggaggactggaagtagaggtatgcctttcaccttattgtataatattttaatatttttcaaatgagcagggagataaattaagtgctgctttaatattttacttttataaatatgagattaaattgattattacttgttgtatgtttatgcctttgcaatttagcctgagtttgtcactttctatttctgtcataggatatttagttaactaactgtgttagttaatctagttgtgtcctaattaatgtactaggggtattctacgtataaatacctctaatcatttctcattcaagtagtgtaataatgtactaaacattgccaagtaaataaagttacagttttatatttattctctctcaagctactgttcttgtttgtgtgtatgaattttttggtttcgaacttggactgaatatgatcaacttgcattgatctccaacaagtggtatcagagcttggagtccaagaatcaaaggagagaggttgcaagattcaaggagattgatccaagaaaatggagaatgcaaagtttgatcttgaaaagtttatagggaataatgattttgggttatggcaattcaagatgcgtgctctactggttcagcagggattgcaagatgcattgttgggaaaattgaagcttcctactactctgtgtgataaggaaagaacagagatactcaagaaggcacacagtgccataattctcaacttgggagatcgggtactaagggaggtttccaaggagactacaactattggaatttggctcaagttagagaatttgtacatggtgaaatctcttgctaaccgattgttcttgaagcaaaaattgtatgcttttaaaatgattttaggcaaaacagttgaagatcatttagatgatttcaataaaataattcttgatatagagaatatagggatcaagatagaagatgaggaccaggcaataattttactgaattctttgcctacagagagctatgagcactttgtagataccatgatgtatggtagggagtccttgacattagaagaagttcaaagtgcattaatgtctaagaagatgaaaaggaaatcagaacaaccagatgtgaatggtggagatggattgctggttcgaggaacatttacaaggaaagaaagcaaggataagaataattcaggcaagggaaaagggagaaccaagtttaaaagaaagtgtttcttgtgcaacaagacctaacaagagattgtccaattcttaaatgctatcatcagaagaaggagggaaatacagatgtggtctcagattgtgatgacattgatggctatgaaagggcaagtgttcttgcaatatctaaatcaaagtctgagaatgtttggatcattgactctagatgttcctttcacatttgtccagacaagagtcacttttttgagtacaaggaaataaatcatggatctgtaagacttggagataacagatcatgcaaaattgttggaattgggacaataaaattgcagctagatggaggaagtaacactgagttaaggcaggtttgacatgtaccagaaatcaagagaaatttgatctctatggccattcttgatagaaatggatgtactgttaaagttgacgaaggcatgttaatggttctgagtggagaaagtcttgtcatgaaggcaataattgtgaatggaatctatgaactacaagggaagactgttaaggcacaggcatatgcatctatctcaggtgatgataaaaaaactatgatctggcatagaagggtgggacatattagttatggtggtctcaaagttttgagcaagaatggtgcttttggcaaagacaaaatcgatgcaatggggctatgtgagcattgtgtactttggaaggtaacca

SEQ ID NO: 21046 - DNA, 4819 bp, Cannabis sativa
  modified_base (1361)..(1370): a, c, t, g, unknown or other
  modified_base (1418)..(1421): a, c, t, g, unknown or other
  modified_base (1503)..(1506): a, c, t, g, unknown or other
  modified_base (1920)..(1920): a, c, t, g, unknown or other
  modified_base (1976)..(1976): a, c, t, g, unknown or other
  modified_base (2201)..(2218): a, c, t, g, unknown or other
  modified_base (2282)..(2293): a, c, t, g, unknown or other
  modified_base (4329)..(4331): a, c, t, g, unknown or other
  modified_base (4390)..(4395): a, c, t, g, unknown or other
aaaaaataaaaaccgccataaataaaacaataaaagctctgttacttacctaatagatttcccatcagcttggaatgtatcaggcttggatcccaacttcataaacttcatttttaaaccctgaatatattcttctgaaatgaccaggatgcttcacaaactaaaacctcttttactttttcttctaagaagcacaggctgccagtaaccagcacagcagtagtagagtaccaaaggttcacgctttcaaaacggcgcgttctgtgacttcgtcttcttcactgtccccttccaactcaaacagacaaaagataaaccagaaaccgagaccataaatggtggttcctccctcaaatgagacttatctcctctttctctactatctttttctctctctctctctctttctaaaacacgcaaccaccgaacgaaccattaaagtggtaataatctcattgaatatcgagttcccttaatcttataccaccgcctcgattttcacgttgttcgcagagatttcgagcttttatgatgacattgatgacgctctagaaatcacaattcactactacccctccaaccagcagggtaaaagaaagaaaaaatattaaaaagagaaaagaaagaatagaaaaatggcgcaataggcgaacactgttttgagacacagaatggcagaaatttggcgtaataagaagaaaaagaaagagagagagagagagagagagagagagaaagtaaatgtaattgaattcaatgtgattcagctgcttctctctccaataaaaaagcacataataaattatcgccgcctttgcttttaatcatcctgatccgctgagatttggagggttttgctgtgtgagcgcgaatctcaatgaaccattccctctctctctctctatctatctctaattgacgatatctgatcgggtgttgtctctgacgaagttgtcccttcttctttcctctctctgaatattttccaggaaaatttaatgagagaaagagaaaagcaaaggaaagttagagatagagagagaaagtagttgtgtagtgtgtttactactctgttggaataggggttagtaggggactgtgttacagggtggcgcagaggactttttaaggagctttcttttttatttatgccgttaaaccacgccacctcccttttatcaccattttacccttactcttttctttttttttactcccgctacccctctcgcgctctagcttcacttccttacaaaatatttaggctaattagtttttttatacccgaacgttcacttataccaaatcatgttttttaaatttttctagtcgttaataattgagattgttggatttaaggnnnnnnnnnnaatttcattcaattttaatatttcagtaattatttatgtactaaatcnnnntccccagactttgatatctatcaaattatgcttctcgaactttgacatgtactaaatcatgccctctgaactttcatccatnnnngactttttttactaaaattggataagagtccttaaattcaacaatctcaatagttcatgaagcatttttaacgaccttaaaaattcaaaggacatgatttagtacatgtcaaagttcaggaggtaaaaatcctcattagtcaaatatttatatataattaaataagggataattattataaggtaaatatcattttagacctattttgcaaaagttaccaattggatcatctgttttgttaaatgacaaaatgaaccttatatttttcaaaagaataaaaataagatcttgagttcaattttcaacaattttttttaatataatcaactttaagtcaatttttaacacgaacagataataaaatgtaactagttttgttataacatctctaaatcagattattattaaattttnttttaacaaaaaatcagttcagaacttcagaatcctatttgtacaattttagaaantacagggtccattttgtcatttaacaaaataaaggatccaattggtaacttttgtaaaacacagggtccaaaatagtatttacccataattatataaggcaccatttttttttgtaaaaaaattacatttttacatttaaagaattttttttaatatttttacagtttttaataaagacaacatgaaaattatataaaagtaatatcaaaataacaacaaaaaannnnnnnnnnnnnnnnnnaaatcaacaacaaattaataagagtataacataaaatagccgtattttttgtaaataaaattannnnnnnnnnnnaaatatttaaaattctgtaaaactatatttttgtaattttttattattattattgtgtatttgtgaaataatcccattaaataatttagtagacactcaaaatattttttctcaaaactttttatttattttgaaatttaaaaaaaaatattttattttatttttttataataatatatgttatagttaaattatttctaattttttcaaaaaattaaatagtttatagtataaaaaaataaattttaaatagttacttaccataaaaaataattgtacgtgtaataaaatacataaatcttattttttagtattgtaaactacttaaaaaattttaaaatttacataatcctatatatataactataacatatactatcacgaaaaaaataaattaaaaaactttcacaaatgtcgaaagtaatctgccaaaattactagtggtgtcaattatttaaaggttcactataagtttatccaataaatttcttttatgaataataatacatgaatgaatattactagtggtgtcactattctatgattgattaacgatacattttaaaaattatctatggattgttctttcgttaaagcttgtcggaatagatctatggttagtatttctaattggtcagatgttagttttggctgttggtttcaatctctttcggtagggatcaaccttcaagcgttggaggaagcagccatggtcgcttggggtatttggaaggcccgtaacaaggttgtatggcaacaaaaatctcttactgttgaatcagttgttctgtcagcacgatcactctttgatcaatttctttttgcacaatcacagacgatgacttcgttgtctaacagttcggtgggactgctttcgcgtgtgcaatagattacaccagccgctaatcagatcaaggtcaatgttgatgggactctgtttaatgatgccaactgttttggaatgggttgtttggcctgaaaccatgtcgatcaagttcttgaagccttcactaatagcaaatggggaattattcgactagagattgcagaaatcatttgtattaaagaagctttaagttggattcagcgacataattggctaaaggttttattggaatatgatagcttggtatgtgttcaggctatctattgtaatttgcatatgccatctgagtttggtttgttggtgaatgattgtcggattattttatcatctttgagtcatgttgttattcagtttgttgaacgatctgtggataaaatcgcctattatttagcaggtagctattgtttttctccaaattatgttttttaagattatcaattacctcctaaattaggttctattgtaatagttaattcttcttgttaatgaaagtttaccatttattcaaaaaattatctaataaaattaataataatataacacaccccaaaaaaaaaataccaatggccaatcacttttaatttctataaatgaaaagaggagtgagagatgtgattgtgattacacgcgctcctcatattggtacggtaactaaaattccatgttatttaccgcgtttgacgcgtggctttaatctttttgacttttatacaaaatcttgtttagaaaaaaaaaaaggaaaattgaaaagggcttgccattgccaacgttgtaaattactctatttcagaagcttgtttttggccacgcgtctctctctttttcactttctttaaattaaaaaaaatgtcaattgtcgtgactcgtgatgctcgtgtcgttttttcttatgaaccttttattattattattattaggaataatttcaaaaactaaaagaaaaatattaagatatggtatgtataaaatttttaatatttttatagttttttaaattttatttacataatatatataggctaattagtatttttttctcccgaactttgacatatactaaatcatgctccctgaacttttttagccgttaaaaattcccctgaactattaagattgttaaattaaaggacttttgtctaattttaataannnaattctaacatggatgaaagtttagggggcatgatttagtacatatcaaaatttgaggnnnnnnatttggtagatatcaaaatctaaggagtatgatttagtgcacaaacaatcactaaaacagtaaaattgaataaaattagacaaaattccttaaatttaacaatctcaatagttcatgggaaatttttaacggcaaaaaaagttcagagggcatgatttagtatatgtcaaagtttggggagaaaaattgctaattagccatatacatatatttgggaaattctacaatccactcccttaaaatggatacattgatgcacccttatctgttttagcacccgaaataattttttagtcaaattttttctcaagggcatgtacgttatagttatttaaaacatcctgcaaaattttaagaaatttggaaaagtttaacacgccgaaaaatacgttcaaacagtgcgttgcacgcgtgactattttat

SEQ ID NO: 21047 - DNA, 3345 bp, Cannabis sativa
  modified_base (1408)..(1430): a, c, t, g, unknown or other
  modified_base (3182)..(3195): a, c, t, g, unknown or other
tcccactcatctgctactaatcttattgaaactttcagaattcgttaaaatgcttttcttttctcctggacatatttatcttcaatatccaacccaaattagtgaagcaaacaatgcccttgtaattggtttaaatgccttcaactccaaaaatagaaacactcttttaactctaacaaaaatataactggagtgggaacaaggaagctttcctatagttagttatatgggataaacatttcaaggcctaccgccttcaaccaaatctaaaatcattgaaacttcactcctaggcaacataacaaaactatatgaaagctacacaagttatctaagctatggaagtgtgaatatggcaccaaatcacctgaattcttcaaggagttgttaacattgacaatgtatatagcacatcactactttagatctagtctctatttaagatgttagtttgcaaagaaacctaattaaacgcattgtattgcttgttctaagcctaacaaaaccggccaatttttcctataccagaagaacgctttaaattttaagtcggtagagcataagtgagaaattcatactctgaagcaagaatttgctcgaaaagttccttgaccatttggagaccacgcttgattctcaacaaattcctggtatgactaccggcattcctaacgcacttcgcttcaatatcaccatcgatcaaagcctgtaaagtcacgttcgacttcgacgctgtcgcgagatcattcacctgatcataaaaactactattaatttcgatttcgatttttttttttttttgaatcctgaatcagattgaggaattttatcataccttgttgacgtagtccatctcggcgaacttgaaagccatacctaagcacccgaagaggggcgagacaaaagagcaggctcgagagaatggcgctacctccacatccgctgctccggaattcaacgtagcggcgagatcattgaacgcctcttctattttgctgagctgcttttcttccgccattgatgaaccagagaagcttgctatctcttttctctctgattgtatatgtctctgtcaattatgaacagtcagtttctctagaatcgtattatttttattcctttcttaacgcggtaattgaaactgtttggttctcgggatatatctactctccctgtttaattagtatatccccggactaccctaatccggatgtggagtatttggggtagtcgggaaatttgcgtcataaatctcttaattattgctttggaggagggtcggtcctaagttaaaatggattatagataaaaaaaaaaaaaaaaattacccttaatataaagataaatggtatttttaaaaattattaaaaaatatatatatctttaaaaagaaaacttacaaaaatannnnnnnnnnnnnnnnnnnnnnnaaaaatactgtcacacggaaattttttcaaaaatattgtgtttttatgaaacaccagtagaacacaaatagaataactcaaaacaacagtaaaacaactaaaaaacaccagtagaacaacagtgaaaacttaacgcagtatactgcagtataaaacttataaaaaaaatatgatataaaagtaaaaaataccgtctgacagtatttttgtaaaaaaaatgacaaaaattagtataccatgtaaatttcccttttttaaaatgtactttttttatttgggcccctaaaatgagtgggccctaggcacaggcctaacccgcctaaacctaggatcgaccctagtttggggcatagctttaaacaagggtaaagctaaaataaaaattaaggtaggatatccttaaacttttaaatctttaccaaataaccttacttaacattacattcttttgattagaacaatatttgtataaggcctaaaaaattatttgaatttcagctccaaatagcttaggatcgatcgtaattttatgcgagatgattgtcccacttaatttatgtttaccgaaattttaagaaaccaataatatgtaataaagcttaaaaaaagttatagacaaataataaaattagagtttttatgtagttggggcgttaacgagccttaacactaaagtaatgagattctaaccctgtgcatgaacgggttttcttataattaaaattatttaaatttcagctccaaataacttaggatcaatcttaattttactcgagatgactgtctcagttagtttatgtttactaaaattttaagaaactaataatatgtaataaaacttaaaaaaatattatagacaaataataaaattagagtttttatgtagttggggcgttaacgagccttagcactcaagtaatgagattttaactctttgcatgaatgggttttcttataattatagtactagggttcttacccactgatgggataaatataaataatattataatatttgagtcgatttggtgaggtccagcctgtgaggctttgatcttctgctgacgtggaggctacatcatgttgatagtgttagggtttatatcattgtttatcgagtttttcgaaaaccgaatattttgagaacgtaaagaagataacaatcaacagataataaacagatagatttttacatggttcagacgttaatgattcttagtctacgagtctatataattagcctatttgggcagatgttttgagattacaaggcattacaatgtggaatgctttgtgaaagagagtttttctatggattttagcagggtgacggtaggtggaaaaattgttctccccttgcctcaagaagaatgagattatttataagcacactttttacctacctagggtttcgtaccccatacaccaccaagattcgtattgcgagagaacgatctgaccttcggttggttggaacaaaggtctctcatttgtaaaatagtctctaactaggttgtttggccaaaaagtatactagagggtgcatacgcgcactaccatgctatggtacatgtctattctcttcaaaacccttaccgccctccgggttctttaccgaaggaagttattcctggggggcatcgcctccccttcccttccaggtccgggagccatccttcttggttgccttgggtgatttatgtaatggtcgtatccttccttttgattatgctgttggatattattttaccnnnnnnnnnnnnnnactcacaagtatgttatttaacacccttttttttaaaataagcgtgaatgtctcattaataaatagagttagacctctcggtcattacataaaaggttctccggaaccgaagaaaccggaataatcccatacaacttgttaataaaagcc

SEQ ID NO: 21048 - DNA, 2458 bp, Cannabis sativa
aggatgttaatcaacatacttgtgggtagatctaagatcctggtaaaataatttcaaacatggttctcccctaatcactttagagtagctatcaaacttgcaaacataagttaacaattctagtttttcttaagttcttaatcagaacatccctgaatctagtatttgtgtgtactaagtatacacctatgttacaaaacaataagaaatatataaacaattattattacacacttataaatattaagagactagttgctagaagaagaaaaaatatcacaaatggtattaaaaaaactaaacattataaatatgagggaaaaatacaataaaaatgtaaaaattaaaaattacattataaaaaatttcataaaagaaattggaactttataagaaaaaaaaactatatttgatgtgatttgctcttttgtcaccttttttaattattaggcatatgtaatgtaaaattttattaataatcagcagcaagctcagaaggtttttcaaattgaatatagatgctgtgatgaatcaaaagatagaagaaattgcttacaaggtgtggtggaagattgccacggttgccaaaattgcaggtttgccaattcctacatcatgaataacaaactctactcatgttgaagccttggtcttaaagtaaaccttgcaatggtacaagccacaaagtgctagttaataagattaatggtaacattagagataaatcagctttatcagatactatcatggcaatatattttacactttatcttacttccccaaagtcacttttaggtatgttgctagacaaaataatattgatgctctgttttagctaaaaaggctttagggtgaggtaaagagttggtgtgaaatggtatttgtgcaccctttcatggtttgtaacttgattgttttttattattgaaagttacagcttcaaaaagaaaagaaaaaagttggtaaaataattacaaataatatgggatctttgaaattaatgtcaacgtacggatcacagccatgttccttctacattttgctgtaaatacatctaatacaaataatattatttatttattttctatattgaatgaagacaactttttgttatcatgatctgggttaaaatatataaccacaatatatatattacattcatcaaaaaaaaaaacaatatatatattacaaaggtgtcggtagaacaattgctatacagcaactcttctctctctattcaatcacacatatatatatatatatatatatatatatatatatcaaggcatcgtttagccctttccatgacatattcagcatccaacaactgctattatttttatctatactaacttgatactgtttatcttcctttgttaaattgtatattttataacatcatataatagatattaaatatgtggaacattgaagtttcaatatttgaattaatcatttacgtttcttatataaatattgttcaaaacaattattgccaaactcaatcaagactatttattgtttacgaaacaaacaacatttttctcataatcaatgaaatgacttgtatatattatcatttagcataagaccataacgattccctttattgaattttgaatcaatatataagaaataaaatcaagccaaaaagcataatacaaaaaagttgtgaaaagtgattctatatatactgggtgtaaattaaaaagaaaacaaatatggtaccacaaaaactgcagttaaaaggtgaaaattgaatcaaatattagagagagaaaaaagaaacaatacatttactgatatatttaggaataattataatctcatttcttgttttcattaagacattaaccaattaggcatattgtttttaattaatttttttaggggatcaaatcaacaactttttggtagcacatactttcacacaaccaacacagaattattatagttcataatattattagctaaatagtatagcgtatcattgtcactactcatgcataatttgattctgtccatatctataattatgcttattctgctccttattcatcagtgctgtctttctcatatccatatgaacaaggtaacgtaaccgcgcattattataatttattgaaaaaataaaataatttaagttatgattttatgattatttaagtatatatattaagatatgttcaaaaagaaaaaaagtatatatattaagagagaaatttattctctgaacaattttttaatttttaaaatgaaaataaaaattttgaaaaaaaatcacttttaaattttatttaacatattcactttcataaatatttttgacctcgaccacatcttcggaccttagatcccatattttcattaatatgagaattgagggtataatttacttttttatggcataaataattaacaatatagggttatggattttttttttttttacatttat

SEQ ID NO: 21049 - DNA, 3194 bp, Cannabis sativa
ttaaaggttgtaagtacacttggctgaacaagagatttaacgggggcttaattcgagagcgaattgatagagtcattgttaacactgagtggctctccgggtgtcccaatggtggagttcacaatctgcctattgtggcctcagaccatgggcctctaattctcgatacgaaaatgaaaaagggcagaggatcgcgggttttccacttttacgaggcatggttgcgtgaaagttcctgtaaggaggtgatcatggatacttggaagttgagtgagaagggcggagggagaaattctttggtgacgcagcttaaaggtgtcaaaggtgccctccagaggtggaaaaagaagtcgtttggtgataacgaagccaacctgaagatcttggaaaatagattggcctggattcagtcgcacgatgaatttgaaaatttctatcaagaagaacagatgataaaagagaagatttctgaagaatggacaaggaatgaaatggtgtggaaatagaggtccagagaactatggttgaagcatggtgatcggaacaataaattctttcatgcctccaccatggtgcgacgcaaacgaaaccatatttgggcgctctatgacaatgggaacaagagaagagagagggacagagagaagggtgacattcttaatgaattttttgggaatctttttaagtcttcaaatccgtgtcttcccgaggatcttgaggatctgatctccccttcggtctctgtggaggaaaacattatgatgtgcggtatcccttcaagtgaagaaatctatgatcatgtatctcaaatgcatcctctaaaagctcctgggctggatgggatgtcaggtattttctttcgaaattgttgggatacggttggaactgaggtgattgaatgtgttcaagagttttttcgttcggccactttggaccatcacttaaatttcaactatatctgcttgatacccaaggtttcgaacgcggagagggtggaattgtttagaccgattagtctttgcaattttgtttacaaactcatttctcggatcctatctcaaaggttaaaagggattatggatagagttatctcgccattccaagcacccttcatcccgggccgttggatagcggatgcaactctgttgggtcaagaagtggtgaattcggtgaggaagaagaagagcagtggaggtcttatggctatcaaaatggacatgcataaagcttatgaccggattgaatggaacttcttgagaaaagtcctgggagctcacggtttctctattgagactattgatcgaatcatgacctgtgtcactactgcctcctatgcggtcttgctcaatggaaaacctctcaagaagtgtagaccctcgcggggtctgcggcaaggtgacccgatatccccattcttattcctgttttgtcatgatgttctatctagattgttgcagaaagcggaattggcttgaattattaagggcatttccattgccagaggagcgactctgatttcacatctcatgtttgccgacgacactatggtgtgtgtgagggcaagcaagaaagcggttgtttgtatcaaagattgctgacataagtatgagcgttggtcgggccagctttgtagcacacagaagtcgggcatcttattttcgaaaaggtgttctagtggcagaaaaaaggaaattgaagagattcttcaaatgaaaagttcggaggcaggaggtttttatttgggaaacccgatggttctgtctaagaatcgttctagtgactttggttatattgtggaaaagttaaggaaccgtcttgaagggtggagactaaagactttgtcttatgctgggagaatgaccgcgatcaaggcagtcgctttggcaatgcctgtgtattctatgtcaactttcactatccctctaaatgtttgtaggaagatggatgctcttgtaaggagattttggtagactaagggtttgacaaagacacactttctagcctccagaagctgggactccctgtgccagccaaaagctaggggagggctgggttttcaaaaatttgaagacattaatcaagccttagttactaaactagcttgggaaatggcttcaaatgatgagaagctgtgggttaagattttttaggagaaattttgtttttggaattctttctgggcggtggaaaaaacggtgggtgatccaagtacagggaagtctattctagatgcaaggaagactatctacgaaggggcgtgcactattattgccaatgggagagacattgatatatggcgacaaccttggatcccgtggatgggctatgaggaattccgactgactatggaggaagtaaggatgaaaactccaaatctgagaaatgtctctaatctgattctgagcggtcaaggaaaatggaacaggggatatgtgaacttcctttttgggcaaacggtgggtagccaaattaatgttattgatattgttgaagggcttggtaaagatagggtggtttggaagagatcccccaagggaaatttctatgttaaggaggcttactggttgaagaatgagtataagttcggagattctcatgacttgtggaatttgatatggtccaaggagctgcacccgagagctagcctgtttctatggaggatgtgcagtggggctttgcctaccagagataagttaggaattgagaaccatttggattgcttgctttgtgatgggaaggtcgaaaatcctcttcatgtcttttttgagtgcaatttggctaaaactctgtggttcagagcccccttaccagtcagaatagagctgatcgagggagaggatgtaaagacaaggatcttgaacctgtgtttcaatctcagtaaggatgatttagtgaaaatcttgttatgtggctatgttgtctgggatacattatggcactgtagaaactcctccttgcatgggggaagaaaccgtgacatccctggacttctgaaggatatccacagtcagtttgcagagctggctgctggtttgtgtggcctgtcgactcctcctcggatggtgcatcaggtctcttttggggcccccttcaattcaaaggttataattactgatggttccttcaaagaaggtcgatgtggtatggctgcaattgccttgggtatgaatacccgggagtggcatgggatctgt

SEQ ID NO: 21050 - DNA, 2009 bp, Cannabis sativa
ctatcaccatatcgtttttgctcttatatatttagctggaaaataatctttgaatgaaaaattaattggaagggtctgaacacacgttaagaaaaaaataacagagtaacacatatttataagtgttatgagatagcctaattctaataggaatataagtatagacgtgattaattataatatctacaacaaattacccatttcacaacagaagattatagcatttttcaaaaagtattataattatctaagacttaataaaaccggtaaattaggatttttaaaaaggataggcgtgcctaaaaaattttaagcagcaacttaaaaaaataaatgtgatattttctcgtaagcagtaaattctcattctattctttttttccgtaatgactctcctccatttctatcgcttcttttgattttaatatcgctcttttcctaaacatttaaatatggtacatgtacggtgctagtttgtaatatcgtctgttgttatgctaggcaccacctcctcttctcctctccgttcctcgtttcctcgccaactaacctctcgatttctccgatcctctgctaaagcttcctcctccaattccgcaaactttttctccgatgaatcttccggcttgttcccttggtccgatggcgactccgaaacaaactcatgactttgtgtccaattaaatttaagctctctacacgcttgtcatctctctccggcatcgcgccgtcccgatctttcgccatttatctcattgcgagaacgaaacttagttcaaagagacgcaaaggacgaggagttttcccggggtgtttcttcactcgactgggtacaaatctgggaaagagtttagggagaagaagattttggttgttggatctggtaattctggtatggagatttctcttgttcttgctaatcatggtgctaagacttctcttatcattcgaagcccgtgggtgcttgcgatggtcggacttaattatcagataagtctctctattttttattgactaatattaccttcatttgaattgatttgttttagtaatatttgtctgtttgcagtgacagaaaattgatctctttttggctgccaattctctagaagtggaattaatgatgtgcttttgctttctgaaaaagcttcatgatgataagtttcactattgataagttttctcattttatttatattctgttgattttttatatggtttaggatttgaataaacatatttgtctgttaataaattgtgcattgtatttaaatttctttgttcattatgtttaaaattttctttgctttcaagaatttttgtattttctatgttcagcagtagccatggccattcttacggccgtttttaggggttaattgtgagatattgggatagcagttattttggtggttttgaagatgtctctttttttattttatttttttatgttatatttgtttttttatttatttatttagaatttaaatttaaaattactaatatcatcatttatatatagtttaaaattgttaacggttatttgatttttgagcagttattgttattattagtattgctttagttttttcaatttttttaaaatacacaatttttgaattaatagtatttaagttattgtatggttatatataataattatttagattggctttatcgaactcatctatttgttgtctcatctattttttttgctacttcttcttgcctaagattttaatgtaaggttatataagatcacacttggagaaataggatcacactatatatgattgatatttatatttacattttttggaataattttatatgttggtagaattttatgagataagtattgttagttattaaggtaaatatattattttaggtaacattttttatttctttttgatttattattttaaaatattgttatttttttttagttattagatttttttagttttcgtttttcttattacacttttacaatttttcatttatgt

SEQ ID NO: 21051 - DNA, 4646 bp, Cannabis sativa
actttgcgttgggcaggcagtttcggacaacaaaatatttagtagtgaaaagagcaactccaacatccttgtaatctcggtcaaagtcataaatctgtattagggaaaaaaagaaaactatgtcaaactaacttttaaatgctacctcagaaagggaaataaaataaagagaaagaaaccatcaaagaagagtcaattacagccccataaagacaaaaaattaagcaaataaaggaaaaacatatgcaaccaaatgaagccataaaaacaaaaagaaagttagcttaccaagtcatttatctcagcttcagcaaaagatttaccatcaacaagcatgctccaaaccactttgttaattcgcagagatatacgcatagcatatgatggacttttgttcttctctttctccataagtcgtagttgagcagctttctgtagagccatcctcaatgatgcagatgcttccttcctagatttcttggcattaataagctctttctttagtccttgcacctggagttagtgaaagaaaactcattatatttgtggtccgttttgcattgaataaaagagagaaaacatatctacgaaatggtatatcaaatttactgaaaacggaaaattatgccttaaaagaagaaaacggaaagataccagaatggaccttgcaccagtaatccaccaaaggtccccctcctctaggtataggtctccagaattctcagacaatttcctaatgtcattgagtatcaacttttgctctcgctctttctcctcaagatgaactcttgcaagctccacctcttcaacaccatcaggaaccacctcatctgcttcctcctcaacatcttcatcatcttcaacgggaaatgaaaggctacttttacgaggcctaaaaattttgctcagaaaattagaattcttggaaaatacacatcaaatgtcacatcacatcaaaagtatcaatgtaaagttccatatctacttgataatataatgacattttttaatttgtcacaaaaccccagttaataactaagacaattacataaaacaatagaatcgctaaacaagtaacaaaaagaaagaaaggaaaagacgtgacactctttaaccaaatagcaacccataatttaattctttcccatcaggtgcttctgatcaaacgatgggtattcgttctattttttgtaataacacttcctacagagatgatcgtatgatgaaacttgcggatggttcttttactcttattgcttattttggcactgtttagcttacaatgacattctctttgtctaatgtgctacacatgcctctttccatcagcaagatgaatgctgacctgaagtgcgtagttactttctcagttcgtttttgtttctttcaggaccaactattggttggacgattaggagttctaaggttgtccacaaccagtggctatggaattttccttggtatgaccagtgaggtcatgatgcacgctcctcacctttcatgaccctcctagccatggaatcttatgaaatgcatcaactcactcggtactctctcaaagaagagaaagcatttatcaatgcggtaatccaaactagtaaaatgaaatactgtcaaaatgtagcatactacacacacaaacaaaaaaaaaaaaacaagaagaagacaccttacatacaaaaacgaaacatggagaataaacagagaaataaaaagtgatgtaacgtcttacttaggtaaacgggcaaaaagaagatttgtcaagacatccaccataacttgaaattgacgtgaagtcattgaggccgtgatattatgagaattaaaagtgagctctttcaagggcttcacctgtacaacagagaaaacattaaatgtaaaaatgagtaagaaaggaaaatcatgttcaagagacattaaatctacggaaaacattcaaagagaaaaaaacaaattctttcttttttttttttacaaaagacacattaattaataggattcaacaacacgcccaaacaaaaaggtcttgagactttacctttaattctggagtcccacctttgtgccttgtgtaccgaaaatacatatcgcaaggcataaatactctctcaagaagagcaccagtacgttttactttgggagaccttctaagaacaatgggaagccactgcaatccagccccagggtcaacatcagtaggagccacatgagcctgaacatgctccaacatcactgataattccgtgcgcttccatgtcatttcgggttcacactctggaatagggagatttccactaccaagtgcttgctcaatcatctcaaagccaacttgaagcactgaatgaaatgaccgggctaaaacacgaccactgacagctgcaagcagaaatcttccctgttttacatgtagatgaaacctaaaggtgtcagtacttgcagttatgcgcctataaatggaagcaaacaggtcaatggtaaaacttacattggcctcttctgagtgaaggttaaactgtggctcaaaaacattcaccatgaaatgacgagttccatcttcttcagaaccattaagctttccatctttaactaaaagaatgccaaacaaaaatctctcttagcagaatataacaggtcatggtactaaaatttgattatcgccactagaaagtcaaaatctgataatccatgtcacaaaacctagagtaaataaatgaatgataaaatccctaggtttaaaagtaaccgaaagtctctaattaaagttgttgaataaaaattgaaggagatcaaggaataccaattgcaacagatgacaagttctccattttaagtgcaggcaatgagttttctactttgactgaatgtgacggagatgaaactgatcccgatgtctctgtatgttggttaggaacacttacaccttggctggtagtaaggggctttaagatcccatcttgctgtgtatcagatccatcacgtacttggttctcctcaagcaattttctctgtgcaaactgtcgagatggagaaggtttcgggggttcaaatgctttggatataccaccaacccaagaccagacaacatctctattctctattgtccacaaaagcttgagaccaaaaacaaaaacacgctggcaattgtcagctattaccacattgtacccatcatcataacttggatcagatcttgtatgctcatcactctcactatcattttcatactcagacctcacatatgttatctcgtcatttctttttccagcttcttgccaagctaacaacgtagcagggtcagccttaggagcttgccttctgattgtgaaataatcagatgataacaaaaatccatcatcactatgcttctctgagaagttgttcgtgttgttacctttttcaccaggaactttctcacttgatgcaggttgtgtgtttttccttatcatttgaaccatttttgcaatactggtactttggtttttatttagaaatgccttaagcacatgaaggtcaagaccctggtaaacaagatcaagagggtcacgcttgcattcaaaagtgtacttttgcttccctcgactataacagagttcatattttagctgatccatattgaatgtcagtcctttggctggatcatcatcatctagtggcatatgctttatacaagtaggagtagcatctatacggagcatgaattcagtcataactttgtctaaggacaagttgcctgaccttggaactcttggaattccaaaacgaggccaacgagagaaggaacgcagtttgtgaggaggaatataattcatgttccagaaccttagcatccatgctaggtcatgagctccaaaattcactgttggaggatcatgaacagttccatctacatcagcagtgtctctcatggtagaagattgcttttcacaagaagaaggtagagaaaagttccagcgcagagacaacgaagtagatcggaagggatcgtagacttttatgcgaggttccccttcatgtggaagtgcatataaataatgattcaaaggagtgccagattcacattcccaatccattgtaacttcaagggtaaactccggtgcttcaataagtgcaattgacacagctctaggaagttttacaccacgactgcttgctaaactctctaaactgctaactaaaatcttaaaatccttggcggaaacataaacacggccatctgactgttgaatctccataaaactagagataatttgaagtttgtcaagcttctcataaggatcaacagttccaagaacattccatatggtttcagaaaactttaaggtgatacttccatgaatgtaatttcttacttcatcccaccaaggtaaacttcgctccttttttaaaggctgtgtttgtgaaatggatgtaccagaagaatctctcacacttaaattagccctacgaagagccacagtaaaagcatagctaatatcagcaaaagctggctcatatcccactccaaatgacacttctgctttctgaaaatgaagaggcagatctgaatatgttttcattggtggagttgtaccactagcagatcgaagcatgcgcacttttctccatttcccaatgaagacatcttggtaaatttgaggttgaaaaca

SEQ ID NO: 21052 - DNA, 3401 bp, Cannabis sativa
aaaaaagaaaaaaaaaaaaaggttgtacgtttacaatgtaacaaattctattaaataaattaattgatttaaatttattattgtaaaaataatagaattactctatatattatttttttttaatttttgtgatttaggttgttcggttaattaatgtagagatttttatctggaattccgtaaaaataataaaaaaatatatattttgaagtgtaaaaataaaaaaattaaaataaaaatttgatccaaaagtttttctttttatcaaaaatatagttaaaattaaatgcacattaacgtgtattttaatttttatttttaaattaatttaatgtaatagtattttatttttttttttctaaaatgatagtattgtatatgttgtataatatgtgtacagtgtactttttttttttttgaaaattttttcatattattataattgaaagtcatttataataatagagaaaataggataaggtatttctcctatccaagatacatcttcatccaactctagagcgtactttgctaagccatgggcagcctgattagcttgcctacgagcatgagtaacagtaactccaggaaaaaaggataaaagacaatgagcatcatcaataagatcaaaaaaacaagataaatccctatgagaagaatttaaagcagaagagattctttgggcatcagtttccacatgtgcaattgacaattgatgttgagtagcccaattaagactgtgaaaaagcgccttaacctccatttcatcgcttctgaaacaaccttgagctggtttagaaaacccagcaattacttatcctttgtagttgcgcactactgctccaattcctaatttcttgtcttgaaaattagtagcaacatcgatattcattttaaagagattaccttcaggtggcatccaagctatctcattcctaatatggatgatgtgccatattggttatttactgatgtggagggatgcgattgctggtgtgcagcttgccacgaagagtgattctcaagctggtttacatgatgtgcagcccttgtatgagtgtccaaacattgctggtgttggcgggcattcatccggcaggggttatgagaatcaacattaccaaaatgtcctctctgctggtgtgaaaatcttggctgatgtgcactgtgattctgggacagtcctgatgcagttgaactctgttgctaatttttgcagctgttgaccttggcagaacggtagttttccaagtagctgaatgcatatgctactagagaagatgggtcacgttgtgagccaccatgtaggactttattcctatcattctagttacaccataacacacatattaagagttctacttcagctttatgcattgtttgtgccaagtgtattaggtagtccccatttaacataccatgagcgtgttgataatcaattgtaaaatgggtcttttttcaaactgatttggcaaatttacacgagaacaatgcatgtccaatcgattcccaagcattcttacacctcaaacatgacgtagagtcaatgattttccttttatgcaaagccgaggctacaggcaaagaatgttgaatgacttttcaagcaaagattttcacttttggaggtagctgtaaagcccaaaaaaatttccaccagcttttgaaatcatcagaagatgattcctgattcttctcagagatagagtttgcaagatgaaagcccgtcttcactgtatatacctcagtcgtgttgtggtgccaaattagccgatcttgtgattggtaaaagctaaagggaattgtgacaatacgatctatgtcaatttgagcaaaactatcctgaagaagaggtaaattccattccatagtgtcaagaataaaagtggagaccggaaaggatggtggcccggtatcgctaattggtttgaactcgtcatgtcccggaatccaaggatctaacccacttctaacttgataacaattaccaattttaaatcccattccctttagtagcaattctctaccctaatgaattccttgccaagttaatgaaggagaatgtccaagctgtgcttcaaggaaggagtttcatgagaagtacttatgcttcaagagtcggcctagtagggagtctggattttcaaataatctccatgcctgtttcgctagcatagcttgattgaaaacgacaaatgaacgaaaacccattccaccctcaaactttgatttgcataggaatttccatcttttccagtgaatctttgaaccatctttgtttgtaccccacccgaaattagccatcatggattctatttggttagaaaacccaacaggcaatctgaaacaactcatagcatatgtagggatagactgaaccaccgcttttaaaagaacttctttacctcctatggaaaagagtttttcattccaagcatgaaggagtttccaaattctttccttgacattactgaacaattcttgcttgttatgagaggagtaggcagggagaccaaggtatgtttcatgacactcacttatcggcattcccaaagtttggttaaagaaatcatttgcatcatttgaattgttcggagagaatgacatgatcgatttgtgagtattaagaaactggccagatgtactcttttgattgccaaggctgagctattatttgcttgacaaaataagagactatcatcagcaaatagtaaatgagagaccgacggggcacgccttgtgagctttaatcctaacaagttacccctttgttcctcttggtgtagtagccttgaaagcccttcaaaacaaattaagaataggtaaggagacaaaggatctccctagcgaagacctctagttggccacacattccctacaatctctccatttatttgaaaggagaaactattggaagatagacaccgcattatgagagagatccattgatgtgcaaaccccattttttccatgatagcggataagtaatcccattcaactctgtcaaatgccttattcatgtctagttttagtgttgagtatcccttattaccttgtgtcttgtgtttgagatgatgtacaagctcaaaagcaaccagtatgttgtcgatgataaggcgatttggaagaaaagtgctttgagtttccgatatgactgaaggcaatacatccttgaagcgcataactaacactttagaaatcagtttgtaaataacattacaaaggctgattggtctgtaatcccccatagcttttggcttcttcacttttgggatgagagttatgattgacttgtttaagttgctcatgtcatggccttcgtttaacactcctaaaacaacttttgtcacatctgaaccaacatgttcctagtagttttgataaaacatggctgacattcc

SEQ ID NO: 21053 - DNA, 4036 bp, Cannabis sativa
  modified_base (1251)..(1255): a, c, t, g, unknown or other
tggagcaatgatgtttataaaagtgtggaacaccgagttgtgacaaatgcgcatgtagaacgtttctctaccgcgtatttcctttgtccatcgtacgacaccgttttagacagtggtctcgagccttcggtctatacaaaattcagctttagggaatatcgaaggcaggtccaagacgatgttactaatttgggttttaaaataggactccgtagatttcttaatgctacctcataatgtattatatatacgacttgctgttattagatagctagtatgcctgcagctatataatatatttatacaagcttattcataaatatatgaatattaattatacatgtatggaagttattagaagactaatgttggaacatttaattcaagtacttcaatattaatattagatatatagagaggatactcatagtactacttttgctctcggacatttttataatcttttattttggatttgatggttttggtttgtaatttgcttataataaggtttgttgcattgaatttatcctacttcaactatacatgtgtacttatttgtaatataatgagagctttatttatatcctacttaggcacaccctattttaataatttttatcttatataaacaatatatagttttaattttattaaaaactgctacacatttttacaatactcaattaagtctaaaattttctacacatttttagaaaaacctactctaaattttttagatataattgtagaatattttagaattttttagacatgtgaaaaatacaatgaaacataaatatttctagaaaactttattcaagaattttctagttatgcatgcttaagagatatttagaaatgtatgaataaaacccttgaaatagaaagatctagagcaaaaaattgtagcctcaaatgcttgaaggctaacatccatgaatacccatcaattgtttcaatttgtaaacaacaccctaaagctgaagctacaaactttcaataagaacttactactttacatacaattctttcttctaagccaaactattttatatactaaatcatcaactactcatcaacatcactacattaccataacaagcatttaacacttttctcgtatccacctattcaaaactaaattaatacaattaattcttaaaccatcagtggtatcagagttttgtttgatcatcactgggcataattttttccacttatcaacatgagtttggagtccaaccgctnnnnnctacctcttctaattttttatggaaacaattataatttttggtccatcaaaatgaggatctattttcgatcataaaatctatgaataattattgaaggagtgatcattcttgaagacgttgtaacatctctttcgaaagaataaaagaaggcattggaggataatcaacaaacacattctcatgcactatactacttgcagcaagctatggcagacgatcttttttcgcaaattatgggcgccaacggtaaaagaagcatgggacatgttgcaggaggagtttcaaaaaatagttaaggtacgcgcaattagactacaaaagtttagaagagattttaaaaatattagaatgaaggatattgagaccgcaaaagattgctattctagaattaaagaaatagtaaatcaaatgggagcctttggagaaataatttctgagaagaatatagtacaaaagatactaatttcttgtacaagaaaaatatgattcaatagtttccgtgatagaggaaacaaaagctttagaaattctatcaccaactgaactaatgagctcttttgaagatatgaaagtagacgagaaaggcacataaggaaagtgaagttgaaactgccttttagtctaaaatcaatccacagtctcaaaaactaaaagctgatgggaaaaagagacaagaaaaataaaaagaaaataatgataagtatcctccatgtggttattaaaatatttcctggtcagtagtgatgaacatgaaaaatatttcatcatgtcgagcaatgctagacatcaaaaaggttaggggatgtaaaatgttatattttaaaattttgttcttgtgtcctcatgtctaactttgttagagagtacttagggctaataaaatgttttcgctcacggtcaagttagtgagttgaactcggctttggcaaggtggactatagatcctgaagcggtaaatcattttttgaacccactaccatggtcaccacaccaaccatcacttcctccaccgtcatactgatgtagttgtaaagtaagttttcttcactttacttgggtgacacattggggacaatctgtcaattaagtttggggagtgaacttattcttttagttagtcttagtgtttagtttcttgttagagatttggggatttgtatgtttgatttagttatttaccttccatatatggtggtattttacttgaaaatgactatgactatgatggacgattgtgtctcgatttgtcagtctattggccttgttgccgtttgctcgagatttgtaatagactttgtcctttggtttttatttgaatgtaaaacttagatctttccctaaaaaaattattatatttggttattttactattttttgtaaaaaaaaaaatacttacttttggtaatacttttttaattagttatctgtttttttaattagaaaagtgaaaatattttctaaaaacatgttctatcaaattgttttcacgtacttttaaattttttaattgagaatcaaaatttgaacattttgaaaacaaaaaaaaaatattttcaaaatgtttttaaagaagtttttaagatgtgtttggtaacactttttttaattagttttctatttttttaattaaaaaagtgaaaatattttttaaaaatatgtttataaaattgctttcactcttaaattttttaagtgagaacaaaaaattctcatatatattttttttcctgttacccttttctccattgtgcatttactttattctcttcccgcttaatttatagggttacacaaagtgcaaattctcataaaatcatgaaagcttactgtaagctctcattgaaacagtgagatcttcattttgtttgagttctttatttctatccctaattatggaatccaaatgtttaatgttctgtatttttttatgatgtggctgaatctagtaattactaattaccttcatccctctctatatctacatactagtctctcatgtgaatgtatgctaaccttcattcactcatgtgtatactaacctctgcatatatatctgcatactagtctcatgtgtatgtaataacacaatgaaagagaagaaaatactcattgataatttgcctgagtcatttcttcgttgaaattcaaggcagttaggattgccaacaacgagagtttcatttatttgagcttctgatgtatgaaaataataaaattgactcttttttttcttcttagatgttttttaacactgctcgttactatcgtgcgtattatggttacaagacggtaagctattttgtgctgtctttttttttttttcttaaattaagcatgtagataactgagctcaatttaattatgtatatttttttccaacgctgtctggctttctaccttacaggatcacgtgctgtctgttgtgcaagaaccaatattaaaccagcaataaaaccagagaaagaacgctgagacaagaattcaatgagcaatcttaatgaacatgacattaaagaaagacaggaagaaagttaaggagaattgaaccaagcaagggaaaattagcaacacaagaacttagctgaataattggcaaactttattgatgaataattggccaatgataagatcacaaccagaatcgattacaatcaagccttgcaaatagtacaatgtaattacaaattgatctcacatgggggaagctatttcaagaataggcaatccccttttacatccctccattcacacaaaagctaggcttaattctaggtgatctt

SEQ ID NO: 21054 - DNA, 2114 bp, Cannabis sativa
tattttagacttgatttttgagaagataaaaacagtgagagattctttgatatttggtactatttgtgttaagtggtaccaaatatttatgcataatcgaagtaagttagtcaaattgattcgtcatttggaaccaaagctcttatttcccatcgaaagcgaagctcacaattcttggagtgtgtgtagcataaactcagaacacaagaatgtctttgggtcggatttgctactcccttcctataataaaccgttttcagggtcatcggaaggatggttggccactctggatgataattttggatttacattatttaagccatttatgagaaatggggaaagaagtactgttcaccttcctccattgtttcctccaagtgatgcattagttgtgaagaagttattggcttatcgtgaatactatgtcatgaagttcacaacatttacaccagatccggtattgaatccaaacgattttattatggtagcaatatatggaccttcgtgtgaattggcttatattagaacttctaaagatgctgcgtggactcatataccttctttacttgatacatactttagtgacgttctttactacaatgacacattttatgctctatatgacaagggcgggcttgttgcttttgacattttagaagattcgtctcaggctcaaccaattatgaagctgattgttagaaatagaatgactccagcagagaaaaatcgttatgtttgtagaagatatttggtggagtcgtataaaggagaacttttgcaagttcagaggtatcgtgaaagtcgtgttgctcatgtcacaaaagaatttaaagttttcaaacttagttttgatcagtctcagtgggttgaaattaactatttagaagatgaagctttatttattggtgatagtacatcggtgtctgttgatacatcatcaacttctacacaatgccagagtaattgtatatacttcgtcgatgacaaagatacaattggttttgatgttggacctttagattgcggggtgtacaatcttaaaactcgtagtgttttccgtcttttcagtattgatgtgagactcttcccaaaaatgagtgaaagaataccgttttgggttgcacctaccgtattcagtagagggagtgaagctcagaaaggaacaagttcacatcatcgtcaacaaggtcagcaaaagttgtttatctcttaacaaagtgttctcacattgttaatattcagtagagagaaacactgtttgtcaatattctatttgttctttttttgttttgtgttttgaatagtgagatgtgacttagattttatcactggtgttaatatatatgacatgagagtacctttgttaatgattaataatagttaatggttgtttagatttcataatttcccttcaaaccttctgccatgaaaatagttaatatactaatttcaatatggaatattatggtatgaaaagaaaaaataaatttggaaacacattgtgaaagtccaagaaatcctgaaaaatcatttctccttcactgttatgaatgttatgaggcagaagacttttagcaactatgttgtatcaaactctgaaagatggcgatgaaagtttgtttcggtactgtctaatttggtcttgactgagcttgcataagcatcgatttatgtcatggctagctgtgcttgggagtcttaaaactcgggatagattgctttcgttggtgctgaatattttagctattattaatgagtcgtatactatatttttaaaacccaaaatgcggtttattgggatcatacatattaccatatagagtgttggactgtgagtgtaaaagaccaaaactggtttaggggaatggtgttgtgagtgattgaggtcgtttgttttggttgtttgtaaagttctctatttgatcaatggattatttatttactaaaaaaaaagatacatcaatggtttatttataactttttttttgaaaaaaagtttatttgtaacttggtggtaatattagtcttggtaaaacttattggggttgcttgttttaatatcaattattattattgagcttgaatttcttgtatctggttgattaagagaattt

SEQ ID NO: 21055 - DNA, 2993 bp, Cannabis sativa
tcctggtaaaatatttccagcaggaccttcattcaatgcgtgattttctattcaggttaaccaacacacttgagtttaaaaataaggtaggattagtatagaacatgtatatgtatatgtgtatgtgtattatatccatgctgatattgtgattcaaatgctactagcactagtacgatagcaatacacagtgcattggtacaatattttatgttcaaggggtacgatttggtgttaccaaaactagtatggttaagtatgtagtgcatgtggtataatgctcaggggtactcagggtacaattcagccctaccaacactagtacactagcagtactcagtgcatgtggtacaaaggtttaagagcattcttgatcatctgtttagccttgtagataggtgtatgggtacctaaagtcaagccggtaatataatatatgttatgtaattttcttattgagttcgttgactcacatattatctttatgtgaaggtaaaagaaaggctaatgctgaacaggagtgagtctagaggccaaggatgattgtacatgtgaagatggtgcgacctagagagtttgatcttgggacgacttgggcttcattatatagtcgctatgcgacatgtttgtaaagtttattttgaaaatgaatataaatttttaaagcgggatcccaactttttgtatggatatgtatacatttataaaagtttaaagttaaatgaaaagcataaatttgtcacgacttttgaaaaaaatcttttgattagcaaaggtatacattgtaattagaaattcactttagtgtgcctaatcattaaagtgttacagtggttaatgacccaactcgggcagagatggcggcgacggcgagcatgtttttttttttttttgctgaatatggttggggtattttgtaaaacatattttaatttgttaattattagtttcttttatttgagtgtcatgaaattattgtatttcaattttaatgtaattaattaattattgaaattaaaaaattattgatttatttttattaattttatttaaatattaaattaagaaattattaatttgttatttgttaaatttatatatatatatataaaataatatacatttaaattatttattatttgttttataaaatatgaaatcaagtccaagaaagttggactagaaattcaatattttgtgagccctatttttacgtctagcaatgttggattaatttttttttctagtccaatattgttggacatgaaaaatattacttttatgtccctcaacattatgttcaacacaaaaatggactagaaaaacttatctagtcaaactttaattgacataaaaagtattttttgtagtagtgtactgatggggtaattacaagaaacatatggacttggacttaattggtgatgcccgacccatgaggtgcttggtgtaagttgatgcggtttccacatcatgttgatatttgccgaaaatcatgtctatcatcgtggataattaaagacacatttaatgcttatttctaattactttctttccatattaagaaagatataatcttcgaatgaggtccttgaaaagtaattattgatatcttcagatctcataattaatgagaatgcttcacaactggattttcggatacttgttgtttgcatctcccagatgcggtgtctaacatcttttagaagtatgctataacggattgctcactcgcctgaacaagtcttttacttattcgaaaggactgactgcttgtaggtccagtctaatattttatttgggcttgctgttggccaggtgtatatttcattctaaataagttttgtcatcaagcgagaaaagtatatttcttacaacattatttttaagtactagtgatacctatcataaacactagatagtgatttattgaatagttaattatatttcataaaaattattacattaaataatataacatcccatacttgtactaagacaacgagtgcattataccatttctaactttcactatggctccttcaaaattcatttatatgtaatatatgaataaatagcacttttctccctgaacatttggcactacctgattttgtcccctaaaatataaggcttgtttataaatttcccctaaaatataacaattacataattatgtcccttctgttaggttttgtttctattaccgttaaaaattaatatttttactcctagaactttgaccaatacaaaattttacccccttttattaaaaaaattaatttttaaaattataatattctattaattttgaaaaataattaaaaatagtaaaaaaaaactaataaaaatattaaattaattcaaaaaaaattaatttttctttaaaaaatataaattatttctaaaaaacattttcaaactttattttctttattaacaagatatattaaaaaatcaattaaaattattgaaaattcagtaagtaatttaaacagaataataaagattttttgacaaaaaaatcgaacttatttatatttatgaactcttatcttaataaataaagaaaaataattaaaatttcaataaaaatataaaattatttttaaaaaaattagaaatcaaactaaaaaaatattatgtttacttaaacaaatctacattttttgaaaaaaataaaataaactcaagtttattcccgtaaaatttagcttttacaaaaattaattttttaatatctaaatgaattttttgataataatttttttaaaatcgcttaattagtttaaaattttaatttcttttttaattttctttaatcattgtaaatgattttttttaagatctaaatgaatattttttaagatttactaaaaaatattaaatctttctcattttagttgtcaatgtttagggagaaaagttactaatttacaaagacacatcattatttaaacaaaataatgagacagaacctaatagaatgacta

SEQ ID NO: 21056 - DNA, 1658 bp, Cannabis sativa
  modified_base (1332)..(1337): a, c, t, g, unknown or other
tttttatgagagggatttctttataatatttgttacaataatagatgagtacttctccatattagagactggcatgactaggcctgattcaagaaggaaaccgtcctcttcatcacgtcccgagctttctcactttctggttttatcaagtgaaaatcatggccctccccttcaatctccataatctccaccaatccactccacccactttttttcaacgcctcgtagtaagcccagcctctgtccttcaaactatcattctcagcaacaaaaaccaccaccttgctgcatcccagtttcgccagattcgggtcagatagcgggttcaccagcaggtcaccaggtccactataagatgggaaaatgtagttcagcaacttgttccgttcttcatcaccatcgaaaaacgggaaatacaggatcagtcccacggttctcggaccatcaacggcggctcgaagtacaatattattggccaaagtcccacccgcactatctccgcccacgaaaaccctctcgagatcggcgtattggttgatccactcttccgacccatgtccacggtaatgggccgctacccactgaatcgcttcccatgcgtcctcgaaagcggctggtaggggattctctggagcccttcggtagttcactgacaaagcgatgacgtttgcttcggcggctacagaagcgacgaaggcgctgaatatgggagagaatggcgatccaataacgaatgcaccgccgtggtagtatagtaggagaggtagcttttgggttggatcagatatttttgggaggaaaagcctggcggagagtccggaagctggtgagatgacgatgtccttggatcgtactccgttttcggtgtaaggggaggggagaacggttatgtctccgtcgaagcggtcaactgtgccgtctttgtagagtcggaaggaagggaactcgacagccacctctttggaggagtaatccatattttgtacaaaattggaatggaatacataataataattgttggttatattgatattggatggtgtgtcattttttttaaatattttatttgtttattttgtctttttatatatgtttttactttttgtagagtataattgtgaggagcgtgggaggtgggttcttaggcgatctccaatgctggcaacgggtaatgttatttttctcggccactaactatttttttatacaatttaaacataatttatttaatatataaaaataataataataaaaaaaaaagagtattattattgggctgtgcgtagcacttttaagacgtgtcgctctacgattagctagcgatactccctnnnnnntattatattaaattatatgagataggatacttagttagactaatagcgatattaaattaaattatataagattcgatacttaattagactaatagtgatattgacacgtaggaaggtgtttgacactagtgatatcttttagcatttatctaaaaaaaaaaaagaatatgttgctgtagcatttatctaacaaaaaaaaaaaaaaagagtatgttgctgtttggccacggtactaatatatttgttgaaaaattattgaaaagttaaggtgtcgtttggtaacaattttttaatcagttttttgttattaaaattagaaaa

SEQ ID NO: 21057 - DNA, 7448 bp, Cannabis sativa
  modified_base (5899)..(5903): a, c, t, g, unknown or other
  modified_base (6018)..(6027): a, c, t, g, unknown or other
ataattgtcacaaatatttatatatataatttaaattacattaattaatatacaagccctctcaaattaggagagtgtactctctattatatatatttatatgttttctgtgttgtaataaacttacaattaccttttttttttacagctagtgccagcaagtattaagatttacgttgggttttgtaacctaagatcgattagtgcttcattttaacctataaatttcatttcattcatttctgattattatatgtataatatatataatatgtatgtacactatgtgaagttgtttttggtatagtagtgtatgtatcttgtttccttttttatttaagacttattcgatattactttgtcccaaaattaagctacaaaaaatagattactagtataagtcaaaataaataaataaataaataaatagcatttggacatgtttggtacgtgagactggactggattgggtaggtaaatttgtctaatcttgtatttgtatgtgctgaaaatctaaataattaatccaactaatcccatgtatctgaaattatttatgcaaccagcagtgtgggatatataatctgatgcgagtgagattttttttatcatttttttattttgttaatatattttaaatttaataagaattttaatgaaagaattattattattattattattatattttaattttaatttaagatttttaaaaattaaaataaataaaataatacagtctattcttaaatcaaatatgggattactttcagcataatctaatcttgtccagtccagtccagtctaatccaatccaatccaatcttttccaatctaatcttgagctctaaacaggttctaaaagaatgttaataaatatcgaatatgctaaaatatagaagaatatgtaaattaagtaaatgtttaaaagttgtgctaaatttaatataaaataaaaatttgtaccaaatttaacataaaatattacatattaatgtatgcaatttaaatagttattattatttttttttgtatttatttttacttttatgattatgatatgatttattatttcttgtatctaattaattattggcactatatgtgaaagttcattttttgttataaacattaataaatatgttaaatttttttatttattaccattaattgtaaataatattttctttttcttaatttcttaatatttgactctcatatgtgtataaatagaatattagctaacaaaataaaatactaaaaaagacttcatatcttctctattttctttctctaaattataatattttataataacaaggtataattgtgtttgttatatctgatctcgaattgtttcaaagtcataatacgctaaatatataagcatatatatatatattcatctgactgaaacacatttgagctagttatttttttttttatttttttattttgttatgaatcaatatttatacaatatatgtatgtctaggcctatatatatctatatagatacatatatattttatatatatgttgatttgtttatcatattatatattatttaattttgttttcttattctacgttttagtattttactttctatgtgttatattttgttgtacttttattttctttccagagcttatgtatatatgtctactactttacactttatatttaatatagtcctcttcatgaaaaatcttgcaaaactcaactttgtcgaacttaattgatatttttgaaagaaattatttatcatagattcttgatgctgaaatccatttagatgctatgagtattggaaacatcgtcaaagattaaaatactaaaaaaaagtgtctttcgaatgaatcacttcaaaggatctacttcgggtccacctctagggttctttaatccctcttttgctaacttacatctctatggtcaaggtaatatgatcatgtatagaggtagtagacttccctcagcatctacaaacaataaaaaataatgtcatttgtgcttaaaaataggacatactattcaatcccgtttgtataaatttgacaagacttttaaaggtttagcaagaaatccacaagtataagatgtttctatttaataatgctgctactcagactaacttggttgctatgggacaaggaactgatgaaaaatattggtatctagattctagagcttccaaccattgtcaatttcaccagttatgatggccaagagagaatgtatgttagagatgggtcaagtttttctattactcagtcaatctcaattctcaaccaattatattgatagacctcttgtcctaaataactattttaccagttatgatggccaagagagaatatatgttagagatggctcaagtttttctattactcagttaatctcaattctcaaccagttatattgatagactcttgtcctaaataaccttttacatgtgccataaataataaaaaatatgctaaatgtttctaaatttgatcttgataataatgtttactttcaattttattatgacatgtgttatattaaggacgagttgaatacatttttgatggggtggtacaagaaaaactatatacttttgactagtcttaactcaagcttttatgtgaagctactccaaagacacaagtgaacaatcccattctattagatcaatctgttacaaccaaatactaaatttaatataacactatttattcatcatgtaatgaaactaaatttacagatttttacaataagttaggccatccttcagaaagaactgtgacaaaaggttttttctcttgtaacctacctatgataaataaaaatatctctttttgttcaattttgttgacttgaaaaaatccattaatttccttttccaaaagcttccaccactgtttacgtgaaccactttagcttgttgttgctgacttatgaagaccatcacatactgtatcctatagtgcttatagctattatattacttatgtgaatgtctacatttacttggatctacatgctaaagaaaaaaaaaattgatgccttaaaattgtttttgcaattcaaagcagaagttgaattacagctaggaaaagagcttaaaatgataaaaactgatttggggtacggaatttaaatcattcacaagtcctttacattaaattagagttattcatagaaattcatgtcctataactcatcaaaaaaatgggttaattgagaaaaaacacatgcacattattgaacttggcatcacccttctagcccaagcttcaatgagacttttagaatcactctgtacctttataacaaacttatctcacatgttatacacaacaattcactcatagaagtgatttttggtacatctcaagattactcaacacttagagcttttggatgcacttgttaccccaatattaaagcatacaacaagcataaacttctgttcaagtcttcagcttgcacgattataaggtaaagtttgaaccataaagggtataattagtgccttgattctaggtagaatgtacatctatagagatgttgtgtttgacgaacacatttttccctaccccaagaaaaccaatctttgatgttccttaagtacaccatctactcctctaacataagcttcagatcctctatcctcctcacatacatcacatattcattatatagatcaacatgttgtgatagataactttttgacactgatgctcctatcaattatggtagttatgttcttactaataatgtaggcacctcacaagtttccaccaccaatatcaatgatgtttgtcaactaatgatgttgatccatctcatcctgttgttgtttttgatgtatgtcaagtccctaaatctcgtacaccagcttctccatctggagtacctattctcactgaccagatgtctcctgacacttccttgccaattatagcagacttccccctggtccttgcaacagttaaagaagccttactacatcctcaattgattggtgccatgtcagatgaagtgttagctttggcaagaaatcactcatggacccttgttcttcttccaccaggtaggacaacatgcatttggtttgcaagtgggtgtacaatataaaggagaatcctgatggtatagtcaacaaatataaaggtagatttgtgactaaagagtttcatcaacaaccgagttttgattttactgagacttttagtccattggtaaaacttgtcacgataagaattcttctcactcttgcattatctcatggattgtgcattagacagcttgatgtcaataatacatttttaaacggtgatcttgaagaagaagtttatatgctgcaaccttttggtttagaggttcccagatcaagtcacttagtttttaggttgcataaggctctctatggccttaaagcaagctcttacagattggtttgacaagttaaaatttagtctccagactcttgggtctgtctttactaagtcagatcactctctttttgtacatcatatttttacatctactcgtctaacattggtttatgttgatggcattttggtcactgatagtgatcctgtgttgtttctcaacttatcacttcccctcatactcaattctctctccaagaccttggcagtttgagctatttttggcactcccgaatcactggaatttgaaagatagattcttcttggtgatcgttgttgtggttaatatgtatgagtaattcttctccttataagtaaatttttcatgttgtatctcttgtgcaagttgagtgaaagacacttagtctcgcaataagtttggtcttcctcttttcgtcaataatactttctatcttgttatatgtgagatgatcgttattaatgttatatgcatctagcttacaacttttgtcatgttgataattctcgagaaggttccggtaaatattttgttgtgatcagaatgccttttgttagtacacatatcgtgtagatagactcattcatttattgttcgaaatactagcaattagttagcttctaaactactttttttttttcaatttaagcgtttatatattacaaccatgtttaacttgggactcgaacccatgacctccaacacacacacacccacctatggccacttgagctagcctcaagtagtaaactctaaactactttgattgctgtatataaaacgtccaagtgttctttgagtttttctctttctctttctttaacctctctttcttctcctcttcttcttgctttgttagtctcaatttaatatgtcacaaaggttaaacatggaatgactaaatttaacttctggacatctagttattatatcatgatgatgccatgttttatgaccaaattcatggaccaaattcaagaaaagaaaagaaatctttattaaataaagtgtatattgatatatagttaataattttgactttcaaaatcataaagtactctaaacactcatttttttctttttttgaaacgaagtactctaaacactcatggttctaacatatataataacaatttgataaaggaaaatgcaattcaattgaccacttttcaagaaaatacttttctaggaagaagaatatatatgaatatataaatatatatatttaccagccttaatgcttggagtttgacgtaaagttctgctccaactattttttttagtgttatggtgtcctatcaaagaatatttgtttaaaaagactatcttttttctttgatctgtctttcttttgtaagtaaatttttcacttgcaatcagtgacttttctcataattcatcaagtttcagtatttttctttcaattattattaaatcaatagctattacttaacactacaaaaaatcttacttnnnnncacaacaaaacttatgactaaaagtgaaaaaattgtgattaattataaatgatgattctaatgttgtgactaaaaggtccgtgaataaaagtactagtcacaaaaattacaattnnnnnnnnnnaaatgtatttttagtcacaatatacttattgtgactaaattagtattgtgactaaattagtgacaacttataacttaatactatattttagtcacaagtaatatttagttgtgattaaaagtcatatttagttgcaaaaaaaatatttgtgattaaaaaattgttactaaaaatagcaattttttgtaatgaaataatatatatatatatttatataatgcaaaaataatataattaagctcaacaatatgtccattattcctccaaaatatttagtcggctgatagttgttgtgggttgttagcaaaatggataatttggggaatttatttttaattaatttttgttttaattcatttaaattatttgtccttgaactatatattcacatgttactaaagggtgagactaatgttatgtttcttttattatcttttaaatgcaaattagaaactttattaatttgctaaatgaccagtaaacaagactataaattaatagaacatgcatattgaaaagaaaaataagatgctctaacaaacttataagcaatcatattaataaatttttaaacaaaatataaagaaaaattgtttaaactacgaaaaagcccacaacaatcttcaacaattagtagactgtaaaagttttgcttcaaatcgcctaaacagtaatgagacaatctgactcaagctctactgtgccacaagctttaatcttattaatctagcttaatgtttctttcatgccaactacgttatcaagctcacgcaccactaattagtgtgacaactagaatagcttccactagctcaccccttgagtatcttgcaacgaatccaaacccaaactatgtcctcttcccaaaaatttcaacattaaccttggttgaatttctccaataactcatgttgacctaacaatctcatttatttaaaaatagaataaaatttaatttgaaatattttcgtatttgaggttgtcatgctcatattcataaacagaaaacaactgggaaacttattcccaagattaaagtgtgtatgcttgtaggatattcgaatagaaaacttgaagcaattaaaaatgagcatatttctgaaccaacgatttcagcactattagttaaacgaccgacaacggttaccacgattcctgaaaaggaaaccccggtacatcgtcgtagtaggaggattgtgagacaacctgtctactatgaacatgaaacactgcatgttcttgtgttctgatacaaacaaagagaatccattgacttaccagtaaccagggccggccctgaaatttagtgggccatagaaaaaaaattaattttgggcccttatttagaaaaaaatgtggtatttttcaaaatcagtaaaaaaaattatataatttccaaaagagaaatattttttttgggc

SEQ ID NO: 21058 - DNA, 3293 bp, Cannabis sativa
agtctcaattctagaatttctaacaggtaagtggttagaattttcacgtggaaggaattttatatcagaagccattctattcattggaggtttgaattaggagccataacttatattaaagtagtaaactgtaaaagataataataaaacaaacaaggtatagagtcaacagagttgttagttttgtcaagtaagagttatcatcttatgtcaataaacaaggaagagacagatttttcaataaacagcttggccaactggcaaagataaatctatggcatccaaagtttacaaattctatatgacaaaagaaaagattcacaaacattaatggaaaaaataaaaaaggacaaaccaaagacagagagcatctggaatcagcgtggtacaatgaagaagagaaaagatttagtcaaggtttgaaactaaatccagaccatcttcttgttccctcttttttcctcccttgaatgctggaaccaagaagattttccagcgatttcgcctttctgttgcgagaccttcccacttcacgtaaaagctgagttagccttttcttttcatcatcaacatctggatttgctgttcccagcttgtcttccctcaccctcaaaatatactccaatatctcaattgcatcttctaccctgcaacaacaaaaaagaaatcatgtttagctgattcggaacaagaaaacccagtaacaatcagccagtgctaactgctgctaagatcatattttcacagaaaatgaagaaggcaaaaaaacacaaaacattgaaatgttcaaacttgccttcccatggcatcataagttgctgcaagattgctatatactcctagtgtatccaagtgacatggtccacactcctgctctaatatctctcttgcttcttcaaacagttttgtggcctcctttattttgtacagctgcactgaagctaaccccatctggttcaacacaattccaaagaatgctgatttcctctccccgctcgcacgaagcttagctatagcactctcaaatgaatttcgagactctgaaaaccttccaaccatgtagaacatcacacccatctgagcttctaatcctgcaattgtgccacggtgagcaggcttatcctccaataactttattgccttctgcaagagtctcagaccctcctcgggctcattcacagcttcatagatggccgcaatttcagtcaaaccagtggcaatttcctcagatgtaaatccaggcgaaggttttgtatatattctcaacgcattctcacagtatgatttggactctctcaactttccggtcctgtaatacaagtcagcaaggcgaacaaagattgaggccacagaagagtgattttcaccccttatggatttgaataccgtaagagctttctggtaagcaaaaacagcctcctcaaagcgacagagggacaagtaaatgttgccaatgctgacatcaatagttgcaacctcgttgtcttgtccgttggctatcattaccatgctagaaagaacaagatgctcaagggcagtttcataatctcccttagcctcacagacaagagccataagcctgcgatcagccgcttcttcaagggatgccggttcactgtgcaacctatgaatttcaagtgtctttttgcagaagttctctgcctcttcaaattgcattgcttgcatatgtgcttcagcaaggtaccttccattccaaagaaaaaaaccaatgaaaaaccaacactacacagtgatcatcaaaagacaaatactgctaaaaaaactttaacctgaacagtaatttgcaacttaaatcaaaaggcaaaagggattatttttgttgtctaaatctttgatgccaacattctaaaaatggcgagcaaagatattatgacacaacacttttttcaaaatatggtaaaaggaataaacatttacgaactagtatttacacttatcaatcccaataaatattcataaagagttgtgctgggaacatgcggacccactaccaaggaacaatttttctacccaaataacaataactaccaagaacagaacataaatgtttagctgcgccaattaacgacacccaccttatctaatcccgaccagattcgaaacacgcccaaattagtattagacatcggccactaaaaacactgcaaattaattaaaaaaaaaatcaaagaactttacctgtaagtctctgcaactcggggatccgactcacccaaagcttccaattggattttaagacccgattcgtaacaggaaatagactgctcaagctgacccatgattgaatacgtgtccccaagctgcatgtatcccgagaacttggccaatgcatggtctaacccgctttctatatttgggacctcaattgaccgttccagaaccggaatcgcctcctctaatcgtcccaaactactgtaaatcgccgccacaacgtgcaagctcatagccaactcaagactctgaactacagggctccgctcgaaagacttggaagctctaatcgcgtaatccaaagccttgttcggactctccccggaagaaatcgtgtctcgggctagcttcaataaaaacggcccgagatccggattgtcgagtgaggattcgtccacgggtagcttttcagaggtggtttttctggtagtgggtcgggtccgtaattgattggaagaaggagacgctgacttgagatagccattggttccattcaaagactcggtcttcttagttgggtctggggttcccgatataaaaatgggagatgggttcgacgaaattaagcccggcatggctgcaaattgtgagctcagcctcagcaatcactctactcagtaatggtaagaatatataacaaaatacaaaacgaaaagaagaaagatgagatttttatttttggtgtagtgaatgaatggggttgttgttaataataagaaaaagtttaatgatggtggtggtgatggtgatggtggtagtggtggtgaggatgatgaagggttgcgtggaagagactcctcatcatcaaagagttagggtactttaagttgatgacgagctttagaatgaaaaagggaagcaacagtgataagaaatccatattctctttctctcccactcagctctcagctcagctaaactctctttctttctacttctttttgctttctctgcaattttttcacctcagctttggtagtggtagaggagcgtgaccattacacttggtttcgctctcttatgttttcgacccttagaaccccttataattacatctttaa

SEQ ID NO: 21059 - DNA, 2697 bp, Cannabis sativa
  modified_base (48)..(63): a, c, t, g, unknown or other
  modified_base (2643)..(2664): a, c, t, g, unknown or other
tttagaaagttcatatttagggcgtttaaacaacatacttgtgagtannnnnnnnnnnnnnnnaaaataatttccaacagtttccacattcatgtgtgttgattgtcttgaatggaaattcacacgctgaatgaaggccctatgtcacaatcacgtaaataggtaaacaatttgctaaaaccttctcgaggacctaaactcaaaagtagaagttttcctattgatagatagcatggcaataaccttaatattttttttgaaacacaaatactaaggctcctaaaactactaacgctggtaaactggatttcaaaaacggtaaaccttttactagggttctgcctgggaaaacgattaaccgttttttgcaaaaaaaacccaagagctttgaaacttgcttaaaacatcccaaaacttagcctaaccttctagaatacctaattcaacatccataagcatattccaagaaataatagcagctcaagtacacaggaacataaaatgccattgttgagtcaggtttgaattcttaaacacaaacttgttgaataactaaactcaccaccgagtccaactcaaataagctacaaacaactcaatacctacccaaaaaactaatgccaagctcaattaatttgagcagaacctaatccccatatattgatgttcaatcctaaccaaaacttccaaaactcaagtgaaatgagtgataaagcttgcctttgatttctagcttccaacttcccttagaaacttgctaaagaaatgagatttgatgagcaaaacccttgactctcccctggtttacttctgccaaaggaaagaaagagagaggatgaagaggtgagttgttatttttgtcttttgttttctagcttagtggaggataaagatatgtttttattaatttaattataattcaaataatcaacttaaagtatatcaatctactaaattctaccaaaataattgaactaacataggcaaaaatccaaaaaattccaataatgccctttttacttaatgcttaagtaactttgcggctaagggataaaatggtcaaataacatactccgcgtgaacccaatattccaaatatccacatatataaatcccactagataaaaggttctaaactaacaaatgtgactctaacaaccatccgtcgcattttctatcgttaccaaataaaaataataaaaaagacaaatttcacatatgacataaaatacacctagagtttattaaaatctccaaaattgagaaattataactctaatgcctatttttctaaaaataagccccacaacacatatattcatatatataatcataaaataaaagtaattaatgctaattaccctactaatcaatattttaagtatgtggtcgttacacttttgatattttggttcaagattgtctcattcgaggatattactcttatggatcatctactgttaacttcgcctatcatttaacaaaatcttcttctttcgtttctttttcctcttatcctgcttatattaaatcttggtggaaagtcgtttggtccctttgaatgcctcccaaaatcacgcatttcatttggaaagtctattttcatatcaatcttgttggtttaaatctctttaataagaaagtattgtctgatcctatgtgatcggtgtgctgtaaaggaattgagacagtttctcatgcactcattgagtgttctgaagctaaaagggtttgaaaatgcacaagttttaccattttcataatgcaaataagtatctcgacattaaagatttcttgttattacaagggtttgataaatatgataagaaagatcttcgtttgtttctttgaattatttggatgatatggaagaggagaaattttatcttgattaataattctgacaagcttaactgtcatgttgtagaatgttgggtctcttcttattttcatgattatttcaatgctctttcaaagtcttccactgttctaacacatgatggtgaagatgttcataccagaagctcaacaaatgaggttgtcattgatgcaactattttactcaagttaggaactttcaaattgaatgtggatgcctttgttgatcatatatctaagagaattagatttgggacacttgttagcaactcagatggaagattagtagttgggtgttactcctcaaggcagagtgtattattccctcttcttgttgaagctctcacttttcatgaagctttaacatggtgtgatgtagttaaactatcaatttttagtgttgaatctgattgtaaagtcttacttgataaagttaacaattaatgtaggaatcaatactacaaaaatatgttttttctgtcggttttgatgtcattaaaattacaaattgacacaaaaaattaatgggcaaaatttgcgtcgattgagaacagacgatgagtttgtgtcagattttgcactaatttgcgtcggttgtgtgctgacactaacttgcgtcagtgctcaactgacgcaaacaatgcatttatgaaaaaaaaataaaaccaattatgggcttcagcccaatacacttaaaaccctaataaccctaactctcacatagtgtccccccttcattccacaaactctctctctctctctctnnnnnnnnnnnnnnnnnnnnnnctctctctctctctctcacacacccaccattgc

SEQ ID NO: 21060 - DNA, 3967 bp, Cannabis sativa
ttttttactaaaattaaaaaaaaagtgcttaaatctaacaatctcaatagttcaggagcattttcaataaccttaaaagttcagggggcaaaaatcctaattagcaatacttaaaagataaaaaaaaaaaattagttgctttctctcttgcttttctaattaggttattctgattttacaagtattaaaatttaatgaataaagttcttcttattaaaaataaaaaattattgaaggtgtaatactgtaagcattaatttgtacttattattagtgttctaatgaaaggaaaatgatggtggttcccacgactttacagacacgtgtaactacaatcacctgttgcgcggtctatatatttacaccttatcttatcacaacactacaattatatatttgttataaaaaaataacactacaatttaatataacaaaaaaaaaacgtacttaataaaaaaaatgtctaacataattaaaatttatactttttattttaaaaaataacttattctatcccttcaattaagaattattttctctttttcaaagctcgctctctctaccatctatactagctacggttgcgccaccaccattgttgtcttgccattgatgtcgccatctccaattaacatttaaacacgaattcgttatttttttcttatgttttaatgattaaaaatcaaatccaaaactaactttaaaaatattcacttaaaacattgatttaaggtttgaaactcgattgtatatatgatttaacatttaacgatgtttgacgatgttgttgcgatagtggcaattaaaatgttttttagtatatatttatataatatatataaacacatgattaataatggtgtcataaaaacttaattttatattctatatactaatttatagttatacatacattctagatgtgtagatacatttttttagaaagatattacctcaaatccattcaagaaaaaataaaataaatattagctcaaattgacatcctggtaaataatagttatgcatcactaaagttctaaccagatttcatcccaaaactatcattagcatcgctttttgccaaagaatcaattttttatggaagcatcatccattacacttgagggaaaaaaatagtacacaaacaaatgtatttatatattacaagattcgatgcatgagaagaataagaagatgattacaactcaaaaagcaagaacaaataataagaagagaagtactctcaataggctcaaacaagatttaaagtcctttgtcctgaaaacatttcctcagttacatgaacactagagaaactcaaaaaatgctcattaattaagatttatgaagttcttagtgcgtaaagataagcatacccttacaaaattttctatgtttttcagcatcatatcaagtgtacagcaagttaacaatattgtcattgtttagagtttttcactcttatttgaactaactgccaacaacaaattagatgttaatgacttaaatgcacaaaatatgaaccaaaccattcaactcagcaaacccaactcattttttgtagtaaagggttgtgttaagagtaggccatgcccaaccgtaattacggcagctttggggcctggagtcaaacccacctcatgtccggggccatgctattactctaggactacttcattgattttttagtttttgttggccttgcgccttaccaactcattcctcaagcttatcgtctgctttcaggcttgtacattttttatgttgccaagagctgggccccacctagtctggctgaaattctttatttttaagaacttctatccgtccccaagaaagggggcaaacttaaggatagttttttcaaattccaggcccatccagctacgagggcccggtaccttataattttcaaaagaatgttaaggagtatcgtcatcgatttttcttctcctccggcttcaaagccattgagcgcccggagctgctcactgagtgggttagagtccctcccatacactgcaccgcaccgcccctactcaactctttcttcaacacgccaaagtcttctccacctacgataaagatgggttgaacgtaggggacttagtcatgactgtaaattgcaggagggctaagttaatttcagagggctagtcggtagatgacttcaatttatccaaggttctctgccccaacatttgcaatcctgagtccgagaaagcgttctgggaagatatcattgcctccgcggaggataggtacaagaagtacctcttcaagagggaacaagagtcagcctatatcaaggcccaagatgcctcagggagggttctttagatagaagctggaaaagaacaagcgacctcccggcccaagctcccgttcccagttcctaatgctggggctcctgatgccagcacttctagagctggtaagtccccactgattgttcatcacattccttctgttcaggattattctacttataggctggtggaatttgacgaccgacttcataagtttaggctgcccccttttcgatggggtgatcatgccaagagtttttatttttccaaccttagtcctttcctaggccggtcccggatgggttccggtcctcccgtacccatccccttggatcactctgcctttatatcctccagttggttcctcccctcggacagctttttagggaacgacgacaccagtcttttaatacatacttttgctagggcagaattagatcgctagggtaggattagttttattacagtactgttgtatgcatgattttttgataatgttctaacacttttacttgtttatttccttaagtagcgaagccgattgatgacctcttggacgttcttacccaaatttacagtcttgagcctggcctgcctcagtcacgcgacccggtggtgacccccgggagatcttctactagaatgccccaagaccaagtcattttaatcaacaaggaagaagaagaagaagaagagaagagtacctactaagctgtcacacacatttttctcaatgtgcattacatcgagattatgtcataaggacaaattcttccagtactcaagttcaaaaaatatactcttttttgaccaatttagctcttcagcagaacgctttcatttcacacccttgaactgtttgtgttttccaagcaaacgaaattgaatttggtccaattgagataaaatatcatcccccgtttacacaggagtgtgctctcttcttaggcttaccatcgtatattttgcttctccttcttggatctttcatttcgagaaaacgtttgtggccaacgtatccaatcttactatttaggccaatggaaggagtatgttcattgcaagtgggacacaccgtatacccttttgtgctctaaccagacattagagcctaagcagaaaaatcacttattgtccacaacactgtcgcacgcattcaaaatacagttctgttgtacgcatctcgggacacccgtctcccacaactattcagttcatcaattaacggtctcataaacacatccatgtcttttccaagagatgatggacctggaattaataaggccaacaacaatgatttagaattcatgcacttcctgggtggaaaattatatgggacacaaataactggccacaagctataagagttgctcatgttccccaatggattaaaactgtcagtagccaatccgagcctgacatttctaggttcaacgacgaaatatggatgaagccgttcaaaccacttcaattctttggcatccgcaagatacctaagcacactgtcttctttcagtctctgtgagtaatgccagcgcatatcctcagcagtgtctcttgagcaacataatcgttttagtctcggtgtgagtgggaagtaccgcataactttgtgaggaacttttttccccttaccttttttttcacccatcgtgatt

SEQ ID NO: 21061 - DNA, 7069 bp, Cannabis sativa
ttacaagcagtattgtctcaattaatatggggaccatgggtgtaacgccctaacaaaaggcacgctacccaatgtgattaagaaaccctaatcccctaaataggagcactaagcagataagcgtgggaactttaactttaaacaaaaacagaatgaaaaaaacttgtaataatttaactttataattaaaaattacatgtttcgagatcccaaaattattttataaaatattacaagtctttccattagccgaccttagcggcaaaatcaaagatacaaaagttcatcagtggtagaccctaacccgctaggtctagtgtggcccgaacatgtacatacatcgctcagctttcgcaatcatggctgatcagagaaagatttaccctttcctgcacaatagagcacacgtgagccaagccttgcaagacaatattaaatatcgataatcaattaaaacatcatataaatattaattccatttcacatttgtctgtatgacaaagacttgcatgttacgctcatatgcctatttacgtttatgtggcatagacctatgtgttacactcacacgtctatatacaataaggccttagaatagttcatctcggttctatttaccgagtctaacctgattatgccttgaacgcaaaaccctaaatcttcacatacattataatctcatgggataataattacatattaataattgactagggtaataatgctaggccattaaaccgctcatgttagggtaataatcctaatcccggtttctgtttactcacatatgtcattttcaatataagcggtaccgcgcctaactctacgtgctaaactactgtcatacctgatgtcccgcaaacgtggagattccaaatccttgggtgctcttgaccaaatgccggtaatcctagtcacaaattctaggatttacaagtctagggttaatccctaattccactttcacaaaatataaaattggcatgtgaatcacatatattcacataaagctcagaacaagctttccaacgatatatagaactctcgaaatggagtccgaatcacaaagttatgaatattcgaatatcacattcaaatatgcccagacacaagcggcgggccgcgacacatggtttcgattcctaggccacaaacaagaagagcgccgcggcgctgaaggagctgggccgcggcccttaggttccaaacccagaaaacctaaaaactagcttcaaaaaacatggccaaatcacactcaattcaacccaaaccaaaaccaaaactcaaaatcataatccataattataactcatcaacacagagagttaaaacacaaattcatgcattaaaaccccacaatataaaccctcaaagttcaaatttaaacaacatacaacataggttccaaactagagcaagatacaccaagaacccaacttcaagagcttaaatacttcacctaaattctcagctcccaataacaacaaagttcacaactgtataatcaattaaaaacacaatagaatccctaaaattctctcaaaacacagtgattgatgtgccatcaacattcaatacaatgataggtcagccagccctgaacgacttaaaggcagtgacgtcaatttacaacctatgcctaaagttcccaacaaggcatagggtagtgtgcctaaggaaagattaacaaacttcctggcactgctacaacatgggtttgaccaaagccaagaaggaaaaaaatcctacaaagagcattgatgaacagtacgacaaaggttaatgaagctcaactgaaagcaaggagacagacatagtttctcaatatggggatcctatagaaagctttggaccggtacaggagttagaagaagtagatattggccgcaatcttttgaccaaaagattaaagatcaaaatgggtttagcgatagaaaaaaatcataaataataaaatttctaagggcaaacctcaatgtcttttcctagtcgcatgagaactatggtggggatcgatccatcaatagtctctcatgccctgaacatagatcaaaacttccgacctatatagaaaaaatgaggttactagataaagagcaagcacaagctctaaaagatgaagtcgaaaggctgagtgccaaaaactcatcattgaagctttctacccgctctcggtatcaaatccaattgtgatgcccaagccaaaaacatgtgaaaagtatgcatagattttaccaacttgaataagacgtgtccaaaacacttcttcccactttcaaggatagaccagctggtagatgctacaactgatcatgagatcctaagcttcatggagcctactcaggttaaaataaaattaaaatgtatcaaccagattaagaatatacatgttttacgatggacgtgggtctgtactgctacaaagtcttgccttttggactgaaaaaatctagaggccacttatgagagacttgtaaataagatgttaaaagatcttattggccgtaacatggaagtctatgtgggcaacattccgttcaagtctaaaaaggctgggggcacataaaggatctaaatgactgcttcaagatcccctccaagagagtacaatatgaagcttaacccctcaaatgttctttcggagtaagctcatgcaagttcattggcttcattgtgaatgccaggggaatcgaagcaaaacctgagaagatccaagcccttttctacatgaagtcgcccataatgataaaagaagtacagagcttgacttgacgtattgcagaactaagaagatttgtgtcaaattccatggaggagtgtgagacgacattctaagagctaaagaaacaactagctcaacctcctatcttatcaaagcctctaggtaataaggaattcgacatatacttcgttgttatagaatatgttgtaagtgtagttctaattagagaagaagacatagtttaacacccaatgtactatgttagcaagagacttatggtcgctgaaagtcaatacccacttattgacctcaaaaagtgatcaaccgatggcaaggttgtatggatctgatgcttgccacatgttacacagatagaatagaaaagtaatgaacacatagatttgttatagaggttttctccccttacttagcacctactcccctttttgttgtattgacatatagagataatactattcagatcgctataggtgggatctgatatagctctctataagaatactaaacatgaatcaataggaaaatctctaatgagagagtgagattgccttagaggcatgtgagagatgaagagaggagagaggccttgggggcctgtagcaaaaagagagaaagagaggctagggcttcttatttaaaatgatttagaggcttagtgacttaggtttctaggctagggttaaggcctttctattgacggccttaaccctgtattatagtttcaatccctagatatttgcataggttgttagataaatataaaagactaaagtgcccttgaatctagataatattcgatcattctactaggcttttagggcccaattcgcagcccataacttcctatccacactttgggttgtacatagagtcctgccaggttaaaccttaccgcccatagacctttaggggaggtctggccgcccaaggcctgtaggatctgacaggtcaaggtctgcagcatcttacatgtcaacgcttgtaggacctggcaggattctatgtacagcccaaaatgtagacagcaagtcatggactgcaaattgggccctaaaagcccaatagaatggctaaataatatctaggttcaatggcactttagtcttttgtaattatctaaaaacctatgcaaatatataggaatttaaattgtaatctagggtttaggcctcctatataaggccttaaccctaagtcactaagcctccaaatcactctaagtaaaaacccctagcctctctttctctctctctactagacacccccaagggctctctcctctgttcgtctctcacacgcctctaagaaaatctcactctctcattagggatctacctattgattgatgttttgtatccttatagagagctatatcagatcctacctataacaaatctatgtgtttattattactagtctattctatttgttgtaacacatgtcaagcatcagacccatacgactctactgtcagttgatcactttttgaggtcaatagtttgatactttcattaatagtgtggatatcatatctcatcaaacaccatggttaacatagctcaacaaagtctcttaatttagtgattcttttgttatatattaaattaattatcatttaaaatttatgtatcaattaattttttaaataaaaaagaaaataataaagtttcatactagaattaaataaacttgcattttttacacaattaaacttcacatggtgctatatattatctagaaacatataatatacaaaattttataaagattaggtccaaaaattgaactcccacctctaataaagtaccaagcgtaaaagaccaaccactacggtaataagggttctcataaacatagctagctaaccgaaacttgaataatttagaagaaaaaacataatgacaacagtacacaatgcaaattctatggagtttaattaaatatggtgtattgctttcaaaaagataaataaataaataaaattaaatgtggtgtatctaattaagtattacatatcctaaaataaaaaaagttatgttttatatatcctttgaaaaataaaaatgtaaaagtaagtattatatattatcataatagtttcacgagggattcccgcaataatgtggcctacaggttcccttccaaccaaacaaatatgtattaactttgatactgctggacatcaataatatctctacctaagccagtagtgctattatgatcatgatgaactttatattttctgttcattacctttctttctttttaattattttttaaaaaaataataagaaatggacgtaccaataaatttgacactataatgaagcctatgcttgtagatcgtaggcccaataatccacttgtaatattgagccagttgagacgacaaccggcaccaggacagtccgtgttgcaaatataactaaatatactattttaaaattttaaatatatttagagattggcaccattagtctctaattttaagtatgatattgtaaaggataatgtctcaatgcaaaaaaaaaaaaaaaattgcaatttaattaagtttctgattcttaacattattagttgcaaagttctttatccttaaagattattaatgtaaaaattaggaaacttaattaagttgcgtatgttactcttgatccttaacaacgcctgggtaaacctaattatagttgcatagcagggcaaaaaattaaaactgcctaactattcaattaatttaaaaatagaatgtaaaagtcctatgacaagtccgtagtgttcttgcaatactccaatttttgttgttcttagccaatttcatcgccaccactacccattatagctacctgttaaattcactaaaaagaaatttctcttttagtaacaataaaattattagctataaataataaaatatatgtggctaaaataaattctatcttacttacttataatcattaaaaagtttgtatgttactaaaagttaatgttagtctcaattattataatttattttactagacaataaagtttttgattaatttttgtaacagaatatagttgtatagaagtctctctctctctagagtgtattgcatgtccctccactgtgagtgctttgtgattggttgattttggttcctgtgatccgatagcctcatcgtacgtccctgcatcatggcttccagtagcacgcgcttgaaggagattgaagaaggctggaaaaatatccagcttgaagaggaagaagaagatgaaaccttctatgaagaagcagaggccgacgatgagcagcacatcgacagtcaatggtgtcttgttgggcggcttttaacatggaagatctctgattttttggatctttcagaacattatggcagatttgtggaaacccggcaaaggtatgtacgccaaacaacttgatcaaaatcaatttttattttaactctatcatgagatcgacattcagcgagttatcaaaggcagtccgtggacttacaatcgaaaacaaatcattatcgagcgtctcagtgaaggcggctaccctcgggctgtgccgcttaacacactcgatttatgggttcaagttcacgacctacagtccggtttctcgactatgaaagtggccaaggatgcttgtaattacgttggtatatttctcgaattcgatccaaacaacttcacgagtgtttggcatgagttcttgcggatccgtgtctctctttctcttgactgccctttgaaaaggcctatgaaattcaagaaacgtgatggcagttcgttttacgccaattttcggtatgaaaatgttccaaccttctgctttatttgtggtctcatggggcattcggaacgtttctgcccacggcttttcgatatgccggagcatctcatcgttaagccatatagtctgcacatgaaagctacacctcggccacaccagaacttcaaagaatcaccttacctacgatcgggcaaagttggcagcagctccttccctggtgtgaacgcaaacaggtctgccaactcctcccctggtgtgaacacgaacggtctaggcagtaatggcatggataccaaccgagctaatttcatgggattggcttcccctaaattttctcaatcacgtaactagaataaaggtgttattgcttatagtaatcaaggtgatgatgttgatgaggtggcagtatctgatttaaaaaggaagagatttgctagtattttaaataaagaggcccaagctcctaatgtgggccagacagtcaccatgggccagcttcatattgacccaaaaaacttgcattcggtgggttctggtttccaggc

SEQ ID NO: 21062 - DNA, 2275 bp, Cannabis sativa
agcgccaaaaatgaaaagccacgttgcaagataaaaacagatgctcaacggattcattccccaaaccacacaaagggcagctggtgtcctctatatgaaacctctttcctatctctgctctaaccgggagtgcattagaaaggatacaccaccacataaccttgtgtctctccagagttttactattccatagtttattccaaagtttcggagcaacttcacagtgaggagctctagccagagcctgaaccagataagccgatttggatgagaaacaacccttgctgtctagcgtccaaatccatctatcggtgccaatcccagaaggatggccacctttaagaatgtccgagacagtttctcggtcaaataagtgacgaagtttctgaaggtcccactgcccgttgcttaacataaggtcagccacacagttagcattagaagatgtacccccacttggtttcggacagaagcctttacgatgcggaatccagggatcctcccagatcttagtgttctctccattagctaccagtctatggacttttactcagtctatggacttttatactcttatatcacccttagtatttggctagaaatgacagcggtacaatacactttttttttaatagaattttttttattcaagtggtaaaatatattcatctcttataatagaaagtagttcagttagaattggagtgttatgctcattaattttacaatttgacatgaaacaagatcgtcttacaatataatgagtgatcctatttatggattgtttgacaaaaaaaaattaaaatattttttaaaaaagaaagcagcacacgacaatcttgcaccaacattccaaattgaaaaagcatttgaaccgcactattgattttataaagcatattattaattttataattaaaatattcaacttcatattattaaatggaaattttactgtttcttaaattcatgaatttacaatttttcttaaagtaatttcaattctttatcacccaaacacgacataagagaaagcctttaccgaagaaatagatgcaaataaaagtgacttcaatgttgttagaagttgatttcaaaaaaaaaaaaaaaatgttgttagaagctgaaaagaagcaatgagtcactactacaaaaaaatctttttccatcaatcaactcttagaatcgacagtaataactttttctatcgtttctacaaattcataaactatgaaccattgaaaaaataatacaatcctaaccttaactctaaccttaaccctaatattttttacatgtatagccacaccactcaacattggcaccactctacaaattatatatatactggtctcgcactttacaacgacaccactcttctatatcttttttgggtcgaattcactcacggagagcaaaagacaagaaccatccgtcatccaagtagatcctcctgaaaatgactaatcttttgtaattctagcaaaataacaaacttcagaattgattaaagatgacacgttccgtagtgtaaatcccattgccacatgacttattcctaaactgccaagtattttgggagaaattctaggcaatcctgatggtgtttatcatgcctaatgctaatccaattacatcttacacatacaattctcgagatatatttgcatacaactcatttaatacatgcataaatatagaaactttagggtaataaaactcacatttctatccaattatccacataatatatataagtgcgttattgcactatactcaaagtgcatggtttgctttcttacctagattctaaagtgaggagagttccaatccataggtgatctcgaacaagtatcggtaaccctatacaatctcaagtttaaaacacaataagtttaatctccaatatcatattataattattcacatttaggactccaactttgaaccaaataatagagatcgtaacgaattttctaacgatataaaaaacatccaaaacgaagtttggagtaaaaagttatgaccaaaataaaatggaaaaaaaattaaactgtcgcctcaaggtcgctgcgaccaaaatatagagtctctctttaaaattcagaagtaaaacccttttttctcattttactataatttggtcaaaaaatcattttgcccctaagactaaaaatcatcctactcatcgtacaagggcagtttagtaattttaaaacacatgatattttcatataaatacatgtatcacatattattgtcttttttttttttt

SEQ ID NO: 21063 - DNA, 5803 bp, Cannabis sativa
  modified_base (1786)..(1801): a, c, t, g, unknown or other
taatctaaaattaatactaaaaataatctgacaatctaaagaggcctgtcttaactcaagagagaaggctattttctctttgatgacacatggggatgaggattggtctctgtttaagcaaccgaaaaaaattgcataacttaggtacttgattttgttgctacattaagaactgtccaagttataaaagctcataaccaaccctttaaagaagaagctaaggtgaccatggccatcatcagttgctgctacttggttgtcattgccttaccccaccgcaccgcgtgcctacgttgtcattgccttaccctttaagacatatttccttataaacccaattatctaaaaaaattatcatgccataagccactaatggacattcatctttaataattaccgtacttaacatttgtttaatattatctttcctcttaataatatcatcataactgaataattcagaattaaattgcacagataatgttgcatattatttgcagtaatgttggagattggtcccacaaaataactatattcatgatcgaattattctgcagtgtgacgagtcctacaagaagactgtgttaacattttgttacaataatagcaaatgtatggatgcattaaaatacacagtcaatttgatagacatgaatttgagttaccatttaaacaaaaaaaaaaatcatcaaagctactttatttatactttaaaagtgatttgaatgttgtcacaaccagcatgaattattatataatatacaaatcaaatatttattctttgttattgtaactatgtttgctctcacgttatctcttcttgaggcttaatattcttaaatttagaaagaataaaacaaaagaacacaaattccatacgttacaagggaacaaatatataagtcaattttagttgacttttttattttaatttatttaaaaagaaagaaaagaaaagacatgaaaggatgaaaaataaagagtgcctatttggttgacaagatgatgatgtggttggaaagattcagaaagcaatcgtgaccatggaattcattgaaatcgaaaagtgagatttgatcgaaggaaaggaagtgggacaggccatggtttcatgatttcgggttacacgcacggcaaaactatctaaatatttcatgttatgtttgttttgaggataaacatcagaccttggaagtagaaaaccagctctctacaaatttaattagtggattttcttgctccactagtccactcctccattcaattttagtgggaagattaaaggttggttacactcttttgaaaaatatgacaaatatgggaatttgggttcttgttacttgtgtcgagggtttgagctttaaaggcgggattgcttcacctcttttgcaggagtcatgagagggattgtttagaactatagagtattagggcaaccttccaccgtaatataaataataaaattttgacataagtggatcaataagcgtaatttattaatcacagagatttatttggaacatgtgagtataatgtgaattatttgtagaataaaaatatttttaaatttggcgacattggagacctgattggaggccaaaaatattataacatgtttagttagtagttttaatgagattattgagttaagttagttttagaattattggaatattttaggatattcaaggttgaccaaataccttagagtttagatttcttagtggcttaaaaatagtaaaataatcttttattaattaattatttaatattattattattattnnnnnnnnnnnnnnnnttattattatttatatatataaattgaagtttatatatataggataagcataaaatcaaacaaaccctctccttttccttcccctcgagcaagaaactaaagttttctttaatttctgctgtctaagaaccagcccctctacaccattagtagcagctagagataaaccacttgaagggggaagcctaaggtaagagtttagttctttttttcatgaaaaagcttaggttataaggggtgaattttggttctgttgttgctagggtataagtaagcttttggttttgtttctgagtgtttttaaattggttttgatgctcatttgggtgatttgctcgctaggagagagtcaagtttgagttttaagctcaaagtttgagctctcatggtaacttttgattaagagcataattttaatttctgttacgtaaaaattgttatttggatgttgtgtgattgttttgtgaagtttggaatcaattggttaggttttgagatgtttaaaactcggggttctcgtttcctacaaaaaatagtccaccgtttttagaaaaatggttgaacgtattccctaccaggaaaccctgacaatggcttaccatttttggtgatgtttagaacccctgcttttcaagatttcttaatgtttagggcattggtaccctagtgacttatagggggacttacggtgatgaattaaggacctagaacgagttaggttaagtgattaactgttctttttattgttgtgacatagggtccggaatcgttgatcattatccgtacaagttggctaacatacttgaatcaaaacttgaggtaagaaaggtacagccgtacgacatagcatgttaagttacgattattatcattatgactcgactatgatcgatgtaatagaacgatgatttctgttaagtggattaaagtcatgacgccaagtgaaaccgttgttaggtttcctactatcaactttcatattagacaatgacagagatatatggatgtcaagttagggcatcgacttgtcttatgaggcaatgagatatatggatgtcaagttaggacattgacttgccttattaggcaatgagatatatggatgccaagttagggcatcgccttgccgtattaggcaatgagatatatagagttcaagttagggcatcgacttgccttattaggtaatgagatatgtggatgccaggttagggcatcgacttaccttattaggcaatgagatatatggatgtcgggttagggcatcaatcttttcttattaggcagtgagatatgtgaatactagggagtggtatttaggttgttctggtgagacatccgtgataagtcatgattctaaactgaaatcgttgatgatgtgttcttatatgcatctatcatagttgacactagatagagagcgaggaatgacaaggtacataataaccatttgtataacatacattatcacatagattttgttgctcattgttatacagattatggtcattctcttttgtctcaattacaaccttcttttgttgtcactgagtaggttccaccgcccatggactagatcaaacttaactacgatgtggcggttagggaggggactatgatgcttacggtggtggcttgagatcatgtagagaaaggtttttgggttggtaccaataggctgtatttttccaatgctcttattagcgaagccacttcttgtttgttggcattggaactggcagcgaaaaaatggcttgtaatttgttattgtggaatgtgattctaacatagtgattaatgttgtcaaaggattaaacctgaggtggaaaattgataactttgtagctcattgtaaaagcctcatgaactctttttcgtgatgtaatttttttgaaagtttctagatcttttaactttgttgctcacaatttgactaaatgagcttttaattaaaatgtatctgataggatttaggcttccacaataccgaataacattatttattgatcacatttatataagggatgttggtggaaaaactatctaaactatacgatttgtgacacttatccccacaaactgatattttggtggcaaaactaccaaaacctcacttttgctatgctttttaccctcccgttagtgaattgctattaaatgccaaggagaattgtctatgtgtatccaagtgcacacatgttatattttgatttgtctacctaatttttaatttttaaatataattaaaataaattttttaaataattaaaaaagtaaaaataaataaaaaaaattacatttttttttcatttttgcccaattttttcttttctatttttctttattttactttttctcttctagaaccattcccctggcttcttcttcttcttcttcttcttcttgctcttcttcttctggaaccacccccctccttaactttctttacattagcaatgtgagactatttctaatacattttgacctgaaaaactgtgggtataacaaacgacctttaagagaccacatgaacaaacatgaatgaaagaatcccataaggccaaatcagaaaatttgtgggtatacacgttgagaaattgtagatttttgaaacaagttaaagatcccaacagtaaaaactggcacacattggtagcaaggtcccaaatagaggtaaaatgtggagacaacaaaaaattctaattgctctaataccattttagaatttaggatgaaggtgcatggagtttcatctcaaaaccaattgacaatgagaggagtagcccattcatcttatgtatggtattttctttctacacattaacaatgtgagactctttcttatacaccctcctcacatttgagcctagaaagtataggtgtaatgaacgatctttaagagaccacaggcccaaacttgacattcaaaagaatcccgcaaggacaaattggaaaatttgtgggtgtacacgtggagaaatttgtgactttttttttaaacaggttaaagactccaatagtagaaagtggcacacattggtcaaaaggtcccaaatagagattaaaggtggataagtagaagcttttttaattgctctgataccatattagaatttaagataaggtcatggcctgccataatggtgtgcaaggtgggctactgcacaacatccccaaaaaataaaaaagcccaatatatattttttatatgcccatagttttttttaatgaacctaacttttgaaggggccaacaatttgtcattagtcacttttatcccactttccaaagcccattttttaattctatgaatgcttttaagcaaaaaaataaaaatctattactgttatttataatttttttcaaactttttatattttcttttcttatcatttttttgttgtattagaatcaataacaatttttataaatagttggagtttttttgatattttataaaatatataactgaaatataatatttaaaaatattatttataatttgtacttttttaggggcccaagttttaaattagaacaaggcctccaaaatgtttaagacgaccctggataagttgcaagaggttctatctcaaaactaattgacaccctaccacccataagaagcctagcagaagcttttttaattgatctaataacgtgttagaaattaggatacggtgcatgaggtttcatgtcataatcaattggcaccctacaacccgtaagaagcctattcatttcataacgcttcgtcaaggctgaaaaacctttggcacacaccaaaaataaatgaggtgataaatgatcaccttgacgaatgccacattgaggataataggtcccattcgtcttctatcgtgaacaacatgataccaaacaaaattcacactacaaagaataaaatcaacccatctttcatggaatcccatcctcattataatcacacccaagaatgactgctctactcaatcatacgcttcactcatgttaaacttaaga

SEQ ID NO: 21064 - DNA, 3707 bp, Cannabis sativa
aaaatccgaaaaataatacgtaaaaggaagtacgatacttatcatgcactagagacaatcatatcagaaatatcattaagattaggatcagaaactacaacgttctaaaatgctcgtaacaaagctcctctctacttagtttctataccattatgttacattacgaaatttagaacacatttcaacgagctcatacacgaatcaaattgcttaattaaactcatgctaatattcagatctaaatctacacgagtttcaaatagcttaaactcaaacaaaatgcgaaagaaagtaatgcgtaaaacatcgtcatactactactcttacgaaatcaaacaaaattcaaagatcaaaacagttgatctctaatctaaatctaatcaagcttaacctgtactagatctatcgcatttctgaatcaaactacaaacatacgaaatgacattcagatctgaaaataacaaaagaaatagttaaaaagctcaccaaagaaaacgattgcgagtacgatcagagacccgcgagctctgcaagagccagccatggagacgaacagtaacctcctccggtgcttaactgcttcttcttcgtagattagtgtttgggtttttgagctctttcttcttcaatggagctttcgagagatttcagattgagagttcgatttcgttagtccgtgccttttatagtattgaagccttacgtttattataatgcacgtctcttcaccagaacaaagcttttcgagggaacatgtcatccgatgtgacgtggaccaatcagatttcgaggacgcattcttccagccaatgaaattagagctcttgttgggatgatcttagccgttgattttctaaattttgaccacgtgctcgatttatgttgctttgcacggtcataataaaatttttatttatttttttttttttttgcaaacgcgtcgttcacggttactccattagtttccaatgaatttcgaatatattattaaccaaaaattgaatttttcttattattattattatttcgaaaatattttcctcaaaaaattaaaaataaatgtgaaaagtaatcttatgtattttttttgttttttttgaatcaaatgtgtactcatttctcatgtgtaagatagagaatttagttataaatggtcacaagaactaattgatacaactaagtaaaattaatctaccaccataaaaaataataataaaaaaaactaaaatcaatcatcccaataacaaaacaaaaaaaatgaaattttctaataactaactaaagacatttcggaacagaaacacttctcaaagattttatttggatattcaagtttttttttggcaacttttttgagcattttttttatgatataaatcgcaacgttaatattatgttgataaattagtttaatatgatcttaggatagatagtaaatttatttggattgaatataaaatctcttcactttgccttcatttttttctctaacttatatggttatccttaaaaaaaatactaaagatttcaaatacccaacacgaccccgaattcagaccgagacctgggacccgaacctagatttagacttaaatttgaacctgaacccagaccgagaccgagacttggattcggacccaggaccctgacttggacccaaacctgacccgttgatggtgttggggtagaatttattaaaaatatattctttttatacaatctattaatacatgttaatatcaaacatagtaataatactaatacaaaataaaaatggatataaaattataagttaatattaaaattcttttaaaaaaaaaagagtcgagtcgaatcagatctgatatgaataagttgggtcggatctgatccgatccgagtatctgatctagcggggcggggcaaatccttacataatctggatcagatcggatcatagccgaatcagatccgacccgaccaatttacactctaatttttttttgtatttttttttttttttttgaaatcactcaaataaaaattccccaaattcagtagtaattttgaaaacattgaggcccaattttctttagcccaaccttgaaagtaggcccattagttttgggttatccctgtgctgtgattgtgaattgagtcattattttctgttacagacaaactctactgtttaacactaatctctcatttcttcccagaaataaataaccccaaaaataaataatataaataaaaatatttatttatttttaattttttctatttttatttatttatttattttcttcaaaccctaaaaactccatcaatggcgatcgcatctccatctgctccgaccttctcagcttccttctgctgcacacgcacggagtcgccggcaaccgccttctcacgattcccttccattgctttaactaactcccaacgcaatcgaactctccgattaactcgtcgactcgccgtatcttcgcgtttcaattcctcgactccgtccggtgccggtggctccgtttccccagacaacggcgatttacagtacgagttttttcatggattctcgcctcagcgccggagaagaggatcgccggttttcgtcacgcttccggtggatgccgtgggtcccgccgggcaagtccggcgacggaaagcgatggcgcagtcgtttagggctttagctgcggctggagttgagggtgtggttatggaggtgtggtggggtctagtggagagggatcggcctagggtttataattggcaagggtatttggaaattattgctttggctcgaaggtgtggattgaaagttcgagctgttatggcttttcatcaatgtggcactggtccaggggaccctcattggttagtataatttcgttaaccctttacaaatttagtattattggaataattttcatggtgttattattggattagtgagctgaaatttttgtttttggtgttagttatttgaataatgttgcatgtatattattccttaatgcaaaaattagagatatgaagaaaagggtagttagttgaattgttgccttttatatttgtgtgttttgtaaaattagtctttacgaaaaaatttattagcaaaataataacgtttgattgctcgaacaaccaaaaattagactgttcgatcataaaacgaccatttctaattgtgtaaattcaatgtggttattttgtaaattttactatttcaagttgttagtttggaaaatttccctttgtgtcttttcatgtgtttatttacacaattatgaacaaattttggtgagctctaatagattaaacatcatataattcattctcatgattttcgccctccctattgtttactcttacagattagtaaacattgttttaagttgattagtttgttgaaatgtttgctcttggtaacaagttatttgaataatgttgtatgtatactatgccataatgcgaaaattggaaatgtgagaaaagggtattactcaaatggttgccttttatatgtgagtgttttgttaaaatagtctttatgaaaatttgtattagtaagataactttccgaagttttttattagtaaaataaccacgttgatgcacgagcgactaaaaattactatgcgaccgatggttcttttgcgagttttacaatttcatgctgttaattcggaaaatttccttttgttattttcatgtgtttattt

SEQ ID NO: 21065 - DNA, 3144 bp, Cannabis sativa
gaattaaacgttttagttatgttggatgaaataattaaataccctcttcaagcctttattcttctctccacaaagatttaatggattatttcaaggttgtttttgcttgtttggttttttttttcttttttaatcaaataaagcaccatgagaggaagcaaacaaatattataaacctctaagattaaatataaaccgctgaatttattatcattatctttatgttgtgtgttaaaaagaagaaggaaaactgtttattttttattttttgaaaaacgttgtaatatttgtaaagaaaacaatttatgattaatataaatattctttagtttgattatatatataataactagaacattatcacatggtcgagtaggacttgggagaagcttttggagaactaatgtcactttgatccctacttgtttattcgataatggtattattcgtattttttgatatattatgaaagtcactcctaatattctatacctataatataatattattatctatttgtatcactctcacccctctctttacaagacatttggaaacaaactacattttgagatacacacaatagttttttttcttacaaaaatgcaatagtggtgcaatattgagatttacatattttagtttggggaatttttaaaatatatttttttttatgttttatttataattttacggcctaaaatttttaattacaaaaatatacttgtaaatttttaaacttacaaaaatacactttgctcagcaaacagtaaaaaaaatgactaaaaaataacgagaaattaacctcacgataactataaataaactataaaataacctcctaataattataaataaattatcaaaaaaatattaacaacgttttattatttttactgaagaggtatttttctaaataattaagttcaaagagtaaaaataaattttctccatgttgttgtatttttgtaatttttttataagtttttagtttttgatgtaaatttttctttcaagtgattttaaaatatttttatgtaaattctctatcacgtataagatagtattaggtactatggtgcctaattgaaatgttcttacacacattcattttttagtgagaaacttcaattttaaaagtaattaacaaaagatctttctacgtaggagcccattcaacccatggaaactacaaggcctagcccaaggaagataaatggcccatttatagcatttctagagagcccaacagtctaattgggctctaaagtgtgtttctaggctctcaacaacatgacccaacttttgggtctgactgattcaattcttctttctatatgttgagtaaacaccacactttcataacttcattgataataatgttcacgtagtggttcattttatattataattaagtgtacttgcttgtccatgagcagcattacctaattgaatatacaaacaaataaaatgatgcaatttaaattaatgatattcaccaaccaaaccataatcttactccataacaaatgaccatatgaatatgatcccaacaatttcactcatttttatcctatcctccatcaaccttatctttgtctagttcttaagtcctcacttggtgagcatgagatacattacaatgcactcattatttggaattaatttgggggaaaatattagagaatttttacatagtatctaaaatcggttttttacaaattttttaattgtattttcagaaaacaacattgttttaagttgctttcatggagttgcaacgtcaaaataatattactttaaaaacaacataatagaaaaaattaaatctgtaaaaatattaaaaaaatgtaagatctatatttttgtaaataatttgtcatttttagtattaatgaaaatatctcaaatattagttcggcaacttacaagcctatctactatgaaaaatgagaaatttatatgtggacacgtgtttgtgtatttaatcccaataatacttagtttttctaattattaatattactgttactttataccggttttaaaatttaattcatttctgttgctttttgaacacgctgaagagagggatgacgtcaacgatagttggatgggacgtgcgtcaagaggcggagagcgcgtgatcacggtttttcaaattttctataatttttttaatacctcctttgtaaacatattttgtaaaattgcttcttataaaacatggtacccattgcatttatttttatttttctgtaatttcttagtaatgatgaaaatacgttcgtcacattctccctctatatcttctaaggcgataaatcataagagaaaaatgaaggaaacaatgtttgaggatagtggtagtggggaatcggatgtttcaaggaagaggaagaagaatgtaaatggatctaattaagaaaggagaattgtagatcgagcttcgaaaatgatgaagcaagtggtggaggaagatgaagctgagtatgttaatagtgatgaagagattgtagttccaagtagcattaaggtatttataagtttgtttttttataatttttttggtttatttttatttggatatgtgtattgatggttcgattgtttaggatttgctatgtgtttgaattcttgtaagcgtttaggttaaggtagtgttattttttttataatttttttggtttatttttgtttggatcggtgtataattagtaataccagaagttgaaaacctagactccaaattcttttttatatatataacagcattaaggtcactgattatacagaacttaccaaattatacagaacttaccagaaattttgtataatcagtgaccttgatgctgttatgtatatacatattaaaaaggatctggaatctaagtttctaacttctggtattactaattatacatagacagtactcatccatactaaatgtataaaaaaagaaatggtaatgtaataaacaattatatacaaatccatctttcaaaaatataacatatatatatatattaagcaaacttcacttgtggcagaaaaataccattaccaacatggaaaaaagaaaagaaaaaaaaaaccaaaattaataatatttcagataaagtttctttttcttacataaaaggt

SEQ ID NO: 21066 - DNA, 3407 bp, Cannabis sativa
aaaatataatttttacagtaatatagtcatcacatttttttcaattttatcacgaaataagtagaatgatcaatagtaatttataaatggatgcaaattaaatactcttctgcataataacataaaagactttattttttaaaataatttaaattttatttttaatttttaatcaccaaagtaaaaaaaagttaaaagtatttaatttgtatctatttatcaactaccatccaccacatcattcgttttacgaaaaaaatggataaaatgtgatggaaagaccatgtactataaaagctatatttcgaaaacaagccataaatcatacagggcacaacttagtaatgtagaaaattcaaggacaaaaatactaattattcgaaacattagtctctaaaaaattaagataaaatgttaattcatgaaatttggcaagaaatgagagtattactgaaaataaaataaaattgaaaattgaatgggaaccatagtatctgttttctgtttatttctacaagtgatgttacaaaaaatttaatcaatcaattgagatatttaactttccaagcaaaattttatagtactctctctgcatgtaactactaacaatcatattacatgatggtgatagtctgtgcatttgtattttcaaatctccaagaccaatttttgccatacctgtatttccagtttcaccttcactttcggagaaaaacaaaaagtccttccatctgctaaaaccgagctaaacattgaatcgaaacagcatcacatctccttcttgtacaatgtaatctttaccctccgatctcaactgccaccatcaaagtagagccaacattcagagctgtttttaatgatacatatgcattctctaatttgataaccaaatctaagagacgcgaacaagtaaagaactgaatgtttctaaatgggattttgtggttagaccttatctttagtgcatattcatataatgaagatgaaagacctatgtttgttatctttttctatctttccaattgtatccaattttatgtgaaagtgagtaaaacatagtaaatctatgattatgttgagggtggtcaagcattgttagaatataaggttctatctcaaaactaattgacaatgagagaagtagctcatacaacttatatatggtattagattcccacacattatcaatggggaactctctaacaagcatggctactgaccaagcgaaatttaaaactaaagccaaaaacttacgactcctttctcccttgctgcagcaagtgacccagcagcaacaaaatcatcataagccacctgattaggagaaaaaaaaatcaatgagtaattggtcaaagatatgacctttcaaacaatacaagacacttgtaaaacaattttcaataatttttcatccgcgaatatatggcaaccatcgattgaattgactagtaggcaaactagaaaagaagtaagttgatgatgcaacattcacttcaaataaaattaatattattacttgaacaattgttgcatggccctaacaattttggttttccaaaaacaatgtgaatttgttttcttatcttctaatgagattttcctaattttcccatcattgtgttgccactgtaagcatcttgtacaaataaataggtaagccgaaacatagagcaaggcaccaaaacattgaatactcatcacattagtgtttcgtaattcaataatatacttccttttctattatttcacatgcatgctcttgaaaaagggggaagaaaagtaagaagttctataaatgtggcgtaccgtctcagcacggatgaaacctttctcaaagtcagagtgaatgactccagccgcttgaggtgcagtcatccctaatttcatcagcaccaaaagattagataacttagcatgatgaacaagtatccaaacagactttaacatccaattacataatttctctttttattttcagaaacatatagatttattaagtaaagaaaacaagtacaaacatgaagtgatgagaagttgtctagtagtatagaatttatgccaagcagaaacaaagctaacctgcaagtatggtccatgcttttgtttcctgtgagaagaaaacaaaaactatttaacagaggaaaaaaaatcaaatttcaaggagtgccatataaaatttcttccatcctcaccttctcgccagaagtgaaataagtgcgaagccctaaaaggctgtatgttgctctgataaggtttccaagaccactttcactgacaccaagagattgcaagtattctgttctttcttcagaaggaagctcagttagctcagactcaacctgaaatgaaattcatttaccaagtgtcacccaaagttgacagatttatccaaacaatgaaagtgaatccaacagatgagtaagaacatgctagtttgtaacctgtgcagaaacggtcactagtccagattgcaactctgatgcaagacccatcacttctttgacatgcggattacttccaggatcagctacttccgattctgcaacattagctacatatataataggtttcattgtaagcaagcaaagatgcttcacagcttctttctcaaaatctgttatggtaactgatcgtgctggtttgccatccagaagtgcaattttaatcttttccaaggcagatcgttctgcatcctcctgaaataaaagttttgtttaacatcaaaactagcctcggaattaatattaaaagagggtgttgggatcaagggttaggacaacaggagaaagatcacgctcatttaataacaaaaagtaaaaaaagtcggtataacacttgccttaactttagattgcgagtcccttcccttgctttttttcagcttatccagccttttctcaatctgcattcttgtagatggtaaaatttagttcatcagtttatttgatcctaataaactttgatagtaccaaaaaaagaatgtaaattgtcatttgtgataaattaattcaagaaatgtagcataaagttagaagttcttttgaggcattaagaatcttttgaagtttacaaccaccaatgattaactaatcaaggcattgcctataactttcacctatacaagaagaattttttgtagctgtgtcagaccatataaccgaaaaatcagtatatgtaaacgcagctcacagagtctatgcgctcaataacttctcgtgaaaagacataatgatagggaatatccattctttaaatcagattacacattatgagaaagagagatatagagaaatcatcaaagagacttacagccatattagattatgtactaaatttacaatatttgacagacaagaaactctaaaacgttagtaggaaggtgttaggccttagggaaataaaaaaaa

SEQ ID NO: 21067 - DNA, 2984 bp, Cannabis sativa
acttttagccacggaccttttagtgacaacataggaataataatttataattagtcgtgactaaaagtaagattttttatagtgtatatttttattatacgtttaaaaaaaatgtatataaatatataagtatatatatatatttttaatataattagattagatagattttttaattaaattttaatattaacatccaataattaatgtaatttaattaaaatctaaatttttacatgcaattgtaattaaatatctttttcaaaaaagattaattaaattggatggattccatttatttagattaaattaaaatgttatccacacttccataatgtatcaatattctcctacagctttcgtctagatttttatattatgatgtatataattgttgtaacgatctagaaaaagcaaaatatcaacttttcttaggagtggttgaatgaatgttctttatttttttgtctccataattaggaaaagccaatgtcactcttcaccatgtactactatactactcttccaattctttcaacttcctttgcttcaattgggtcccccacaatataaacgccttttatattccaaatattatataattgactggtaattaccaagatattaattatagtctaattattatataaaaattcagcaaaaatggaaacttagttcttctcactttttgttatttttatactgtttatttcgactaattacaatcccagtggtactggaagtaaaatgtagtgcaaatcagataaaattagcttaggaaaatgtgaaaatgaggaatatatctttgctctttactgtctgagaaagaagctggaaactgatcattatcagggaatgtggaaaaccaagaatttttttattgttccattttcaacttgatttgctgtcttcaattgactcaaaagttaaaatgggagatttaggtaaagtgaagacaatcgaatctcatttatagaacataaattacaaatattttatacatatgtactatatggatttttgttataatgctcagtgataacatttttcaatacatataattctaatttttatattaccactaataatatatatttttttttttgaacaaataccaattattattatggctcgtgaccatatgattggtagaatttaggaatgtatggttgaggtttatgagatttcattttaaaactaattgacaatgaaaaaaatagttcatgcatcttatatatggtgttatatttttacttcttaagtagtgaaatactaaaatatagctcatttaacaaaaagtgtgctccaatagtgtgccaaaaagtgatgtaaatttggcacataataatttttttgccaaatttggcacataataaattttgtaccaaatttggcacaatatttgtaatgatgtaaaatttacactacaataaatgcactactttttcatttacatttatgtcatttttattattttattaatatatttaactatcacattataaattatgaaaaatttatattattttttttattgtcttacatattaaaataataataaaattgattataaaattattagattttatcttttttaataaaacattaattagatattaaattttacttttaaattttgtaaattgtgcattgaaattttgtaatgtgcattggagcacaaagctaaaatttgatgtaaatttattacaaaacttctttttgtgctaaatataacacaatttttatatctcctattggagatggtcttagcaatgttggactctaacatcccctcaagatggtggctaagtttttacttactaatcttagatggctcgatcacaagtgacactattggctcacaaaagatcacaaacggttcttttttggctcgtttttttggaccggcaacactttgggctcttaacgcatcacaagcgactcttttatagctcgtcttaaagaccggcagcacttttggctcactatcctcgaatcacaagcaactcttttagctcatctttttggattggcggcactttttagctcactattcccgaatcataagcgactctttggcttgtatttttggaccaacgacactttgaactcacaacaaatcacaagaggttatttggcttgtcttggaacaattattggatttggatcgaatacttgttagaatttagtttagctccgatacgacattagaatttagaaagtatgtgattaaggtgcatggagttctatttcaaaactaattggcaatgaaaggagtagctcatgcatcttatatatggtattatatttttacatcttagtaacatgaaactctaacaatgattgtgggggtagttgccaaacgattccctttctctaaccccttatttgtaaagtcgctgctgtttgctttctgttgagatctcaataatatgggctacaattttgtggtagtggagagaacttagagatagtcattaatgcgcttagggggattactttaagatggaaacttaatagctatattagtaattattttaatttttctaaacttttagtgagctgtaattttattaggatttctcgattacgtaattttacacataatgcgaccaagtggacatttatccaaaatttaactttttcttcaacaccagtaaatacttcatgtaagggttccaattgaagttctttgaacttgtgctatggcttgtcggggtcgacctcaaaaaagtgatactcagggagagagagctggtgggaaagaaggaagatccgatttggaaggagaatggaagattctggctaagcgaaaacatccgtcttcctatggtgtagttttaaaaaccaaatccatgacatagatcttgagcgttgatgtcttatcggtgtcggaggaagattctaaggatgagacttgtaatttctttggggaaaactctgttggcgtgctcagaccattgagaatgtggctcaaattttat

SEQ ID NO: 21068 - DNA, 3893 bp, Cannabis sativa
tggttcttgattctgtcgagctctgttttcggcttgagatccaggggcatttgttctggtgttgttagctgcaagaatggtgttgttgttacctagagtagccatgttagcagtgagcggagggaactgctctgataccatgttaaaccggttagccattgatgagaacaaaagctaaacaaaagagaaagaaagagaaggaaggaagaaaagagtaatggataagaaaagaaaatctcaatcattattacagaaccaatagagtttatatacaaatgatctaagtaacaaaatgagaggaaaataactaactaacaactaacaataacaaccgaagacagaaataacagaaatcaattacattactaactaactttctgttctaacagtaagaaaataaagtgagggggcgattgggaaatgggatgagaccaaaattctaatctggatctcttgatattgagactcttaatcttaaattgtttatttttagtggagcagtaaaaatgtaaaaaagaatataaatgaagggaatgatttaagattgtcattttctaagttgaatgagtttaataaaaactccaataagaaattaaaactgaaatgatgtttattatgaaaactagaaaggggtgtgtagttggatactcatgatgccacataacataacatgcattttataagtgaaaaccaatatccaagaacatatacacaaaatgatatgagaaacatggtttacgtatccaaatcaaacaaacaaacaatcaaaagaaaataaaagttatttaagtgatcacacacaccaaaactaaactttgtttaggaatgatttttattattagattaggcagagaagcatgcaaagaatttcttaggtgaataaccagaagctctgaactttgctgcagtctcttcaaccttgagaaattcttcttgtctattggcttcaaccattgcccttttttcttctgctatcttgtgtaattccaccactttgttcttcattttctctgtgtattctgctctcttcttttccaacttttcctgttatacattattattgaattaagacaaaaatatgtctaaagttttgtactcccacatcagcgtgagataaaaatagtttgttgtttgttcaattatagactgttgtttaatccatggctaaagttagattacatgggatcagaaatatatttcttattataatttgtgtatgtaaaaacttctatttaaatgaacaaaaagaatcatcatgctaatcaaagtacatagtgtagttggattaacaaatattatttttacctcaatttgtttgagctcggcctccacagcagctctcttgctgttttcccatgattcaacagcagacaactttttgtatgccctataatgaaaacaaattataataggattaagattaaaataataaacaaaaaagttagtacttaatgtaaaattaacaacaatccatcaagtaaaattatcaattgattacaaaaataaagagtatgaaactcacataattgaattagcataatacttacttgttatctgcctttgtcttctcactctcttcccatgctttaattaaggccaatcttttctctgcttctactcgtgcaagcactgcatctacatgcagaaaagactaattttccatatgaccatgaaatatataaaattatatgtttttttatatacaaaacaacaacaaaagttgaaatgaatgaatgaatgcaagaaaagcaaagatcaaagatatacatacccctgtcaactgcaacctctgagtttttctcaacaaaaggatcaacaacttctggataaaggaaaaataagtgtcaatgaaaagcaaatcactcatccaatttttaagaacaagctttattgtatacactagaattaactttaatggctctgatattattgacaatgattttttttttatctcatgaggcatgttttaaacaagaaaagctctatctttcaagcataataaacttctaagcaatatttccagaaaaataaagaaaaaaagacccttctaattaacaacattatacttttcaaaaaaataataataaaaaaataacaacattacaagttcaagccaaaaaaaaaaaaaaaacaacattataataataataattattgaaaaacaactaaaagaaagaaaataagctaaaagaaaataagttatgacataattgagtacaatgtacaaccaaattactaaaactagtgatgcccatctttatctttgataaagtcactttagttctggtcaaataattacaaagaagccttattcagtgtgtgaattttgataaaatttatggtaagagatgagaaccctttttctttttccttagaattaacaacttttcttgtcctcacccaaaaataaataaaattcttatagtttttaattgtaagctgattcaccttatcataatttactctataattttagatagagcaaacaataataatacaaagtaatttattttgaaatttacttcaacacagttttaattttctctctagcttttcaccaaaataaaattcaaacaattataaagaaaacttcttaaaaagattcttccaccttttgcaaaacaacaacagtaaaataaacagcatagagttatatattattggaagaagaaaaaagtagcatggaaattcagcacaaaatttaaacaaacaaatgaacatatatagatgaagtaagagattttctgaaaatataaatataaaaagaaaagtgtactttgaacaattgcaggggcaggaagaggcttctctaatggaaccgggctcaaactcttctcatcagaagcacaaacatccttactgttctcaacttcttcttcttcttcttttgcttcctccttcacctgttccgccgctaccggtgatggattttcgggcggttgaggctcaaccctcttggcttcttcctctgccataacgtattcttttaatttagccacagctataaacactcaataaaaattaaagaaaaaaaaacggctttggtggtggctacacttctcaagtaggctagattagactagaccacactataagaaaattaattgtgaccaaaaattaaaactcaattggatttggaaccaaaattatgtgttggagaaatgaaatgagtgttgcaaggaattttcttttagtgaataggtgattatagaaagcttgaactagtaaagaaggtaatgttgttggtggtgggtataaaaggaaacagaaaagttggattgtgacaaaaagagaaaaatggaaacatattaaaatctgtgactactcaatttataatatatggtcctttttttggacgttttttttttaattcttttttttctatctcgtaaacagctaaagccaaaagtcggtcacttaatcagtttctttgaccttaaaaggatgattttaatatgatgggataagtaaattaaaaaaaaaaaattttgatcactttttctttctgttgtgttggtccaattataggttgttacttggcatttcatggttggagcttgctcacctcagccatgcttaggccatcttgtgatgagttgtcattttttgttatggtttgttagagcatctctgatcaaatttttattttttagtaaaaatagttaaaaaattaaaataaggagctatttttattatttttcttcaatcaatcctctaataatattttataatttaaatttattaaatataaattaatttaataaaataatgaaaaataataatacctttgattaaaatactattaaaaagatttagtaaaagaataaggagctcattacatttagatagctccctactagtaattccttattatagagagctatttttttata

SEQ ID NO: 21069 - DNA, 2026 bp, Cannabis sativa
  modified_base (38)..(47): a, c, t, g, unknown or other
  modified_base (199)..(200): a, c, t, g, unknown or other
  modified_base (280)..(281): a, c, t, g, unknown or other
  modified_base (321)..(322): a, c, t, g, unknown or other
ctcttgtcaatttaactattgccttcaacctagatgannnnnnnnnntccttagtgatttcagcctccttcattgttcttcatattcgaaaccttgagtgaatgtctgtcgtgcccacacatagcaagtcaagtactcaatcacagtgagtaagacggtggtaaccaaacccgcaggagagaaagagatccatgttcanntcttgataatgctctgtgacagaaatgaatcaagggctagagatcttgaacaaaaggattccgctgcaataaatataagnnggattccgctgcaataaatataaggttttcttaaaccctnntgtgtttattttattgttttagagaattcatatttaggatgttaatataacatacttgttagtaaatctagatcctggtaaaatattcctaggacaaacatcatcaaattcaagaacaacattattatgttttgtgaattgagagatgcttaacaagtttttagttagacttggcacatgaagaataccttacaacactaaaggatggttagaagaaaaagaatgaactaaaccctgactaattttatgaatggggagggaagagccattacctactattactttggacttccctttgtaatcagtagcagtgctgaactgttgagtgtatgtggccatgtgatgagtaggacctgtgtccaagaaacaatcttgagtttgaatggtagatgaattggtgtgagtgatgttggcttggggtgggtcttcatggtttgtggtgggtgatgaatttgattgatttttagtgaaattaatgtcgaatttgtggaagcattttattacagtgtgtccagccctaccacatagctgacagatgggcctatttccattattgctgcgacctcccctatagtttcctcttccccctcggttggagccacggtagccacgattggcctaagttcctctgccaccattgtaggtgttcatattagccaagttggcttggacattgattgaagattctactgcgagttgttgcagtctcatttcttgattctgcaacataaattgcacttcttgcaaggtgagttcttcaaatctggatgtgagattgatgacaacagcctcatactcagatctaattcctctaaagatgtaaagaatcaagtcatcgtcttttaagggttggccagctggtgtgagactatcaacaaattgtttcatcttcaagatgtagtcctcgaccgattgtgaccctttctttgtggactgtaaaaatcctcggagttgaaggattctggccttggatttggtagcaaacggttgtgcgaatgtggtccaaatctccgtcgaagatcgacaattgataacatgaccaagcatgttttcaaagacagaattcattagccagtgcatcaagaattgatcaaatctcatccattgttgaaaatctgggtttggaagattacctgcaagtgtattcggtggaggaggacgtaatccgaggatgtatccatcaagatcatagggacgggtagcagctaacaccagtgatctccagattgtatagttggtgcgatccaatctcagattgagaggaagcatattattgttggggaagaaagcttgaatgtttggttatcgaactcttttaggttcaggtgggatgggtctttgtgtgcctgacatgggtctgataccatgaaagactctgttaagaacaaagtatgaaaatagcaaaaagagaacaaggggatgataggaaaaatggatgctcaatactcaaatgattggcattagacttatcatttatataggaagagtttcagtactgaggatgaagtaaaagtcataacagaatacaatcaatagcccacttgacagttggagcaatataacaaccacaactcaactgtaactaaaaaataacaaacttaactgccgctaatactttaatactttgatatctatcaaattatgcccctcaaactttgatatgtactaaatcataccccttgaactttcattcatgttagaatt

SEQ ID NO: 21070 - DNA, 4373 bp, Cannabis sativa
aaaaacttaaatgtgaaaaaatgccatagaaaagtggcaaacctaaaaatgccatatttttctaactttgttatgaaatcccatattttatgtaattttcacaaaaaaaaatgtatttgttatgaaaatggggagaaccattctcttcgttttctccttaatttatgtgggccccatttcaaaatttagtaaatgaatgggaatcaatctcatacctagttgaaactgccctaaatgtttggggacatgaaaaaatgataataaatcttatcgttaattaatatttagttaagttaataaataataaaatgaaatataaattattaaaaagagaactttttttttttggtattattcctttaaaaagttttcgattttgtgggatttctcgatgaataaaatggcaagttctgttcattgccaaactaacaatttcaaattgtgaaatttttaaaataattatattgaatttgtggggaaaagtaaattattaaaatcgaaaatatcccttaaaaagaggtttggatttaacaagtcattaaaatggtaattaaagcagtaagaaaactaatgaaaatcaaattagttaaaattaataaataaaataaaaatatgacatttaacaactcacgaaaattaaggaagaaaattaccgaaattaaatactaaaatattcttaaaatatatgtaatccatttccaaaaaaaaaaatcctaaaatatatagtgtaacctattttaattagaaatatattaatttggtaatcatatattatttggaaactaataaaaaataatttgtttaagtatgtttttgttagtctcaattttcatgttgaggtctataaattggttaaattcatacatttcttattttaaaattgactttataattattaaagatagtattttttttttttatagaaaatttattgtattattaattaaaagtgcaaataaactaacaaaatagcatgaaaatcagtcgggacaaactcccattgaatggtcgaagcacgaaataacaaaattaaagatagtattaagtaaaaaattacttaaactattatttttttgtaaataaaattacacttttacttttacgttcaaagtttttttatatataattttacgctattcaataaaatcacagaaaagtaatacaaaagtaacatcaaaacaagtataagacaacatcaaaataacataaaattaatatataaataacaaaatattaacaacaaaataacaggagtacaacataaaaatatatatcacaagaccgtattttatgtaaataaaatcttaaaatcataaaaatatttaaaattccgtcaaatcgtattttttaatttttaatttttgttgtgaaactcctaacatgccttctctctccttaattttgtgaaaattgttatttttattataatatttttgatgaaaaataatcttagagaacaccactttgtgaacaatggtcaaagaaggagttgaggactaaaaattgaatgatgaatggcatcagccgaaatgtgatcatatataccacattggcaatataagaaattaattgttaataaaaatgtttattaagttgttagtttggattggcacaattttgtattcagtccttctttcctatcactataaaaatcgtttctttatttattttaaattagaaattaaaactattaatgcgatgtaaattatgaatttatttttaccttgttgtattatattatattatatagtaatattttaatatcccaatctccaaccctaaacccacccaaatcctactaaccctaaacttggcaccgcactttggatttggctcggaatcgtaccgaggccagatccttccaaactcagactacataatctaatgccaaacatttcttatgtattaaataaaacgtttcgtattttattaaaaattgtgattaacaattcttctatcaaaatataatgttctttttatttgtggtgcaaaaacttaagtttaactctcgtttatagataaatacctaagtttagtttttgaaagtaattataataaagttatatatttctagaacttctataagtacctgactactattaagtattaaatcaatagtcacatgtcaatcctaactcaatagttcaagtcattaaatgtttattttttatttaaaaattcatttaagtatacaaataaaaaaaataacatgcaaatattgacttaatacttaatgattaggtatttaagaaaattctaaaaatataatttaaatattattactacttttaaaaattaaaataattatttatctttaatcaagagttaaacttacatatttacttcacaaattactctctttaattcatatcacctcttattttgtcttccaaacaaaccctacatgtatatatgtatatacacattagattggctagctttttccaattaatttgttgcttaacacgtgatgaataattaatttttgttatgcaatcctaattattataaactatatattatatattataataatgtcaattccatacatattacatgatatatatattactatatatcatgctctagctaggaatatttatatattcaaattagatttacatccatggcaatggatgacatggtgcttaccaactataaggttaagatactaagtatagttcatcaagttttttaaaaaaattctaaaaactttatagtatggaaaataaaatttacagctaatatttttatacgcatataaaataatatgtatataacaaactatttgaattctattttcagtactataaattatttaaaaattttaaattttttttttttaaaaaaagcttactattactacaacaaacaccgtcataaaaaaaatgtcccgagatatattttgaaagaggatgatgtaccaagtgtgttatacaatgaaataacaaaattgactcatcatttaatgaatccaatcttccatcttctactttccaatttcttttttttcccattttatttactattaattttgctcctaaacatggttaattaacatttttaatatatattaaatacttatacatgtttttatattatttcttttggtgaagacataattactatatatattgattcattaattaatttttgatgacctatatatgttaataatgaaaggaagaaagataaggcactttgtttaattggtatatgtgttccttagacatcatcatattatgtgtgtaatcactataaccatatttattgtgactatatttattttttattatattaatatatatttctaaaaggtcaataattgtgtgtgtacacaaacaaaactatgtctatatatacatatataaacacttaacttaacacatttatcttcttcatttatatatatatatttaatattagttttttaaaaaaagtgtttatatttgttgcattgcttaaataagtagtgtgctttttatatgtactctttctactttaggtaattaataattgtatgtacacattgttattattattattaggaaaatatgtataccatattaaatgtataaaatagtgttgacaattttttattctcatactaaaattgactatagaaagtaacattttaattacaactaaaatttacaaagagtttatgtagatcattattgaaattaaatgatattatcctctagctatctttaaaattaaaggatattataattagaatatttataggtgaatatttataagcattcaataaaaataataataattaaaaaaagtggtgtaaatataggaacataaattacactagtttgctctgaaattttgtaaataaacattaatatcatcataactatttttgccaatagtttcaaaattttaagtttatcattaaaacaagtacttatgaaagttcaataattttttatagagaaagtactcaagggtggtaataatggtaaaatgtttgtaacaaaatggagacattcttaaacaatttaattaaattttgtaacaatttataatcttttatattatatgtaggtaccattttttacttatattaatttaattatttttcccataaggcaatttaaaatgcccaatatttttgtcccacatataatttttttagtaagtcatataaaatattgttatctaactatgttgatttataaatttatattaattatatattaattaatgtgagagagacagtcattcatatatgagtatatttaccaaaactattttataaattattattagcacatttagtgatttggttactaataatatttctataaatactattttgaattttatgttttgcaaaaattattgattaaactatttgt

SEQ ID NO: 21071 - DNA, 3458 bp, Cannabis sativa
  modified_base (27)..(37): a, c, t, g, unknown or other
  modified_base (1149)..(1149): a, c, t, g, unknown or other
gggattgcacagcttacccggtatttnnnnnnnnnnntcacgggactactgactgttacatttttacagtgttctataacaacaacacgaaaacaacaagaaataacatccaaataacatcaaaacaatataaaaaaataatatacaaataacaaaataacaaaagtacaacataaaaatatatcaaaaaattctctagaagtaaatccggctccaataattggagtacaaaataacaccaatgcgatgccacctctaaaaaaatcgagtcatttcgtaatagaaccctcgaagcatgtccaagataaggggaaagtcatagtgggtgacccccaaaagaaaacaaatctgtcgaggacaactcacaaaaactcctccctttccaaagggtatggtgaatcttactaggtcttcctaggaaaggacgggtagaccaagacttagggtgagctcacccgaagaatccacaagggaggccccgtagggcaataggccgcgagtccaagctcgaagacttaacgcccagggaagaaaacattaccctaatgcatctttttaaatatatcatcactatttaattttcataatatagacattatctagactcaaaatcataattacaattgtaaaacttattatttgttcatgttatttacaattaagattgattcttgttatttgttgctttatggtttatacaattggagttattgcttttgcactttaattttttttcattattattattcaattttttacttatatttaccaaaagaagtgtttaaaattagttaccctttacatttgttaatgctactttgaaagtaattattactttttaatctttgtttacctaaaatttaattaagccctaactaggctagatagtcctcaactttaagaaacaataatatttgtagcctaatattataactttaatgagaaatttttacatattatttttgctcctatttttaactcaagtatttgcttaaaggtctttatcatgaatacagaaaagtataacagaacaataaataattattaaaaaattggtcaattaaaaacccctattggtggccaacattatgtccaaactcattttacttttttctttcttaataataataataatatttattattattnttatttattattattattattgatcaatataatctttatatatacatatttttattatctattaatttaattatttaatatttggaaagagagggagagagataaataatgttgattaatttgaactaattaacattttattaaaataattacatttttattaatgtgaataatttacatatcaaatatgaaatgttataagttaaaattaatataggatattattgtagttaattaataatgatacattaattccatttgaggaaatgaagcaacatttagagacaaagtcattgagaagaaaattataaaaataatttcacaatctgtttattgtttttaaactatttcagtttttacaaatcaactccatcttaggcaaatctccaaaatatcattattaattttgagtgaccaactaacttaacttcttacacagtcaaaaaaagttcaataattataattaattattatatatgacattaattattattttactaattttaattattatcactaatcaaaattagcaaatatcattaatatttattatttatagattattttttttactaaaaatttgttgtattaataaatttgtaaatcttctaacaccactaaaaaatgggatttcaaaaataattggcacccaatggcatacccaatgaaaattaggcccttatttatgctcatttttttcttttcttaatataaaaaataataaaataaaaattaattttgtagaagaaaataggtttccgcccattttaaataaatatatatagttatttatatattgtattgtttcaatgtttattctgctcttccttgaataaaattctggatctgccagtgtacacacctgataattattaatataccttgcattttaaaatacatgaaggttctaaatgccattcttaaatgatggcttccagagctttaaattggtgattctaaattgtcggagattccaattaaaatacacattgtttcaatttttttaactgttttaaactgatgactattctcaacgattctttaaaatcaatgggtattctcaactataagcatctattttatacgctaaaaaaaaattctaatcgacaagaatagtactttttatagtataacaaaataacatatggagatgtatcgggacaaaacctcccactgaactgacgatttgaaaaagaacaaacagcacaagttaaaaaattgactaacttgttcgaggtcatttaacaaagacaatagaaaaaactgtttgaaaaagaaagtatatgtttacaatcagaaattattatcaactcaaatggtgaatttatttagagtgtaagatacattgtatgaacaactatttgacaatcaatttgagaatgattatgatgtttaattaagtcatcattaattaatatttactatataatattatatatagattaataattatatgttaaatatataataacttgtggaggaggatatgatgaggtaaggttaggaagagactctactctgtcgtttgactatatatatatacttaaaattaaattaattaatttttaattaattattttttatatatatatttgatatacatgtcattccctgcgaattaataactcatgtgtatatattagctagtaaaatcactatttaatttctatattatattatatacgagtaataattattatcattatttttttttctatatattatatgagtaatatatatatatttattcttcactatcactatcgtaaaaatcgaaagtaaatatatataaaataatatttgtttatatatattataattaatgattaattaataataattaataccatattagattttgttttgtataatgaactataattaatgatatattcagaatatcagttatactggggcaaaatatcaaattatataaattctataatgcacactgatgtacttttatttatggtatatttagatattagaattttttagttaattatttaagattatcttcaaaattttgagattttaagagaaacttaacaccctcaaaataaggtttaaacagttttgttacatgtgtgacttttgtatgttatatatgtgtgaaatagattgtttaatattttttatattgtaaattattctgaatttttttaaattttattaaatgtcttaaataattataacgtacacaattatataaaaaaaatatactaaaaaaattttctgaatgacaaaacgcatcaaaaatgcatgcaccttttttataagtgtaataaaagtacccatatatatatata

SEQ ID NO: 21072 - DNA, 2218 bp, Cannabis sativa
  modified_base (1047)..(1047): a, c, t, g, unknown or other
gaaaaattcaatcgaattttatttaaactgagagatgctatttggcaaagaattatcaaaactaagccaaaaatacaatgaactaaaaaaaaaagtcattttgacaattatttcatgtataatatataagagagagagagagagagagttaaggtagacttgaagcatataatttagaatatatagagagagaagtgctttgaatgaaagcaaagacacatgaatagaaatagatatatatgtgttacctaatagtattggtgaatttggtgaatacatggtgatcagatcactctaaattaaaaacttatcttacaatcaaactcatgacttcccaactcacaatttggtacaaaacactcatcacattttttttctttctctgcttccaattcacaccaccacaccaccaaataccaaattcataacataataataaaaatgtttctataataacacccccatatcccaattctttctcttcattatccaccatatttctctgcagccatggctggcctagatggtggtgctgctgctacagaggtacatataatacatttacatctatatatatataatatgtacgattaattattgatattaattgttttgataatgtatgtttttagatgagtcggagattgagtaagtgtggagtgtgtggtgatgagattggatacaaagagaatggagaggtgtttgtggcttgccatttctgtaatttccctgtttgtcgaccttgttacgattatgagaggagtgatggtaaccagtcttgtcctcaatgcaacactcgttataaacgtcacaaaggtatatttttatatatttataagtaatgaatcaagaaatttttaagaaatttagaataagtattatacatgtgtttgttttggattaaggctaattaaaatttttacttctcgaattttgatatgtaataaattatgctacttaaactttaaggttgttaaaaatgctcatgaactattaagattgttggatgtaaggacttttgtccaattttagtaaaaaaattctaanatggatgaaagttcaaggggcattatttagaaaattcttaaatttaataattacgatttagtacatcttaaagtgactaatcatttgaataactaataaagtggtgtactaatagtgtcaaacactttatttatatatagaataagtattatacatgttgtttgcatgttattgcactataatgtttttatgctctttttataaaatgtaaaagaagtaaatattagaatctaaaaaatgctaagttccaccaaacatacttattctaatatcatattcacatattttaatttagtatattgtatggtaaatggttaatcaattatcaataattatgaaaattggctaatcttatttgtttaataataacaagtattttccttaaaaaaaattatgaaaattcaggtaccaacaaaagatgacttgaatatgaacgtattattcatattaacagaataattcgaacaaatttgtatttatgtatgtataggttgtccaagagtggcgggtgatgacgatgaaagcttcgacggagaagatattgaagatgaattcaggaagaacatttataacactcatcatcaggatgattctgatgatcctaaacttgttaatcacttcgctaattcggtataattacacatataatcatattttgataatcaagatatatgtatatataatgcaattgacacatatatgtttgaattttgcaggataatgaagataatatcaacaatgagaaaaagcaatggacagctcaagctttgtctgttgcaggaagtggtaattaatataattaattaattatttaattgttcttaatgtaaactaatttgatttttaattataattataatttatagtgattggtggtgggaaggaatttgatcaagtagagaaagaaggttacagtaacgatgagtggaaagacagagtagaaaaatggaaggttaagcaagaaagaagagggaatcttctcaataatgatgatgctaacaatgatcaagaggttgatgatgattatctgtaagtatatatacatacaaatttgtatatacattgtatatttctgtatagatatattataacatatatatgtatgtatttgcagattggccgaagctcgacaacctttatggagaaaaattccagtttcatcaagcttaat

SEQ ID NO: 21073 - DNA, 6189 bp, Cannabis sativa
gcccaaccacatttaccatgctttcgagagttgatagcctgaataacctcttgagcaatcaaaatattatcaaagatgactctcccagccacaacagcactttgaaaaggagagataattttatcaagcaccatttaaagtccattggcgaacactttagaaaggaccttataagaggttgtgcaaagacttatatgggcctataatctttaagagtgttggccctttgctttttagggataaggaaaattagagtggaattgacctcagagaaatcagcctcattgttcaaatagtctaaaatagcatggacaaaattagtaccaacagtatctcagttcttttggaaaagtaagcattaaggccatcaagacccatggctttaccaccagagagctggaaaatagcctaccggacttcatcagaagtaaaaggctgacctaagaaatcaacctcagaatcctcaagagggggactcaaatagtcaagaatatgtgattgactgcctcagtattgcaaccattgcaatggaaaagatcctcaaactaagaggtaattaaagcactcatatcatcagggttgctaaagacagtaccattatcatccctaagaaacttaatagtattatttctcttcctttaagaagcaaaacgatgaaagaaggttgtgtgtctatccccagccctaagccaatgaaccctagccctttgtctccaataaacttcctccttatataagagagcattaagttgggtctggagatgtttaacatgtgagataatattcctatcactagaaagagtggattgaagcctattaatttcctgttgaagagttgtaatcctagacttaaaaatatgcctaattgaattaccctaggatttaagagaagaaatgcaagtattatgacaagaaatgaacctagagtaatctcctgaattatgcatcccatgagtacccatgtcccaagaactaataattgtggtgtaaaaatcagggttctctaaccagatgttttcaaagtggaaccgtttattggtgaaagggatacaactatcactatggtgattaatcatgaccttaagagctctatgatcagagccataaaatggcaaatgatagagaaccacataaggaaaaagattacaccaagcatcagactcaatagcccaatctaatcttttagaaacattattattttttgaagtatatttatgacctataaaaggaaggggaaatagttgaaacttattcaaaaagctagaaaaactatccatactatttttataaatataactacttctaattttattactatgaagaagataactattaaaatcccccataatgagccaagggagattaggagtgttgtaaaaaactttatcaagaagattccaagtaaaaacacgttgagaagcagttggagaaccataaaaccagtataatgaaatatttcattatcatcaaaagtgatattacagtctatatgattacatgaaaaagttaaagtattaacatctacacaatcctttcacaaaagcttaagtcccccaccaaaatacttccttgggacttcaaaagcatgatcaaagccaaggttgacactgagcttgtccgcagcatggataggaggtcaagctttccatcaaaaaaagtagaggtttatgatcttttaccaaaaggagagtcgtctgaatgcacgtgtactccctaaaccacgtaaattccagcttaataaactcattttttatgggcaggtgtgctcctcatcacccgccgtttaggttccaaagttgttgcagaggggccaccctctctatcaccaccacgagctcccatgagggtagacctcaagaagccaccaacaacagcttgatggctttgaaaggaagggcgtttaacccctaaagctgaggcaatacccttgcctcgcacaaatggatccggctgacctgtaagagcaccaacttctaggtctatagtattgctaccaagagctagacctccacggcttagggcaggggtattgatttggttggggaaaggcttcaatcatagactcagagcaagcaaggtttgttctatcaataaccaaaatagaatcagtagaataggaggtgaaagcagaagggtttgaggaagaaccaatacccgacctactgaaagttagaattttcccacgagcattggggttaaaggttgtagggatcaagacatcagtagattggtgggaaggggtacaatggaaaccagaagtgacctggttagtaaggaaggaaggaaatctaatggttggtcccagagaacccctcgcaggtatattaatgtgaacaagaggaatatcaagcaaagttatgacaggtggttatggatattggaaaggcacactcttatcagagattttctccttacccctcaataaaatggtaaaaggacaaagaggttcagagagagtttcatcgcatttttgtaagaaagcatggcaatacctcttagtgtgatcaagccgaccacaatagaagcaaaaatcaagaagccgttcatatttaaaatcaagccacttgataaactccctccccattttgataaagcgaatattcataccccttctaataggcagattaacatctaagaggatcctaagcatcagataaggtcctgtaccctccctaactgtatccctgtcaacttcaatgagatccccaattttagaggcaataaacctagctaacttgtgggatttgcacataaaaggaatgccatacacttgtattcagaaagggacataatgaagattatcaggggttataggaaaagagctctaaggagcagtaaagatagtaatgctttaagtaaagtgccaaggttggccttctagaattctacccttatccccttcacacccaaatataaccacgaacaaaccatcgacatgtttagagacacgaacaggaaacctacactgtgatgaccagatacccaagagggttttcatgagggaaagcctattaaagggtttgacagtgtgaagtttgagaagcaaactaataggggctggagtatcatttgagggattagtatcataggtaaatatagtgttttcatcagtagcaaggacaagagagcttgaaatactactcagaaattcatccatattaaaaaaagacagaatagacagcaaagaaaacaaagaaaacaaaggaaaagaacaagtaagagaagagaaaatagtgaagtaccttaatcttactttatagaggtagaaccaataaccccgtaggatgactctcaaagatcccttaatcataaccctaaacttagccggagtagccccaatgatgaaaaaaacctgatcagcttcaagatatcctactactgccttcatcttacgacttccaagggcaaaagagaaggtgaagggatggtttttaatgcaaagatttgaagaagtggaagagaaatgatagatttgattaagtagaagaagaagacgaaccaaaatgcaataaatgcacggagtaggaaaaatgaaattggaaagagaaggagtataatactcatagtaattaatgctctcatttattagaggaaagccttaattacacatgaaatcaaagagaaaaccaccacagaaataatctgggtggaccaaaactcccattacagggaccagattcacaccaggagaagagcgtgttcgcatacttactagagggttctagagagaataatgttccatcttttaatagttttaatgaaaatttataccagaacagtttgggaattattttcctcctgaatagaatgaacccatatcaaattacaagaaattaaactaatatcaacttagatagaaaattaattaagtgaaaaaattagttgcttgaatgtttataatgtttcccccaaattaaaatgcaacacactaatccaaccaagtaaaagaaaagcgaatgatgtgtaagacaaatcagcgaccacaatcactaccttcttctcaaaattccctacttcttcttccaaacaaaagctcaacaattctactcataaatctaatctcaagcccagttcttctgatcaaaagctcaccaattaaatttttatgattttgatgcgagatttgagaagtgagtgtcgattatgctataatgaaatagaactaaatttcgatataggacgagagtacctatatggtttagataacttatagaatttctgtgtttaatgcatgttacatgtttaatttatcacgagagtagaaaatttacatgtaattgagatttatatatatgagaagactataaattaccttagtaaatctaatattgcatagacattgatattaggaaaataatcatattaggacataatcaatagatacaattaaaatcgaaatccctaacttttatttattaattttcctattaatttacttacttcctgatttttattgttcttattgttttcgagtttcaattttatctcaaattttatttagccaagtagaagtaagagtttattttaaaatacttaacttcaattcctgtgggattgacctcactctttgtgagtaatacttgttcaaacgatacgtatacttgcgtattgcaaaataccacaacacttgtcgctggagggtgctgagcttgggacttgttgtgcgttggtgttaaggttggttctcatgtgtgtgtgttttaggaaaaaataaaaaaaaaaaaagttaagaaaacaaaataaaataatatgaaaggagagagtaaaacaaataaaagagaatatgatttattattatttttatttttgaaaaattaatttttataatatttcaataattaattttgtgtggaccaatataattcgtccatctgtatgctgatgtctatgtcagcagtccacttggtaattaacagaatattttggatggtagtgaaaaaacaaaaatgaaatggaggtctggagggttttaccacaaaaaaaaaaaaacatatttgtgtgattatgtgtcacaaatcgcatagtttaggtagttttgccgtaaatatccctaaaatttaagactttatatttgtaattttataatcaatatttgaatttttaataccatttttgtttgttttaaatagagtaaattaattcaataagcacttacactcaggggtgaccttaatttttaccgtttgaattataaatttatgaggttgtgcggttcaaattacttttctctaaataaataaataaaatatactcatactatataatacttacaaatttgctcattcagttgtattttaattttataagagaggcacaagttattaatgtgtagaaagataataccatacataagatgcatggactgcttctctcattgccagttggttttgagatgaattccatcaaccttaccacacaactctaaattctaacatggtattagagccaaataaaactctaacaagtatatgatccaaatttaagaaccggtccaaaaagacgagccaaaaagagtcgtttgtgattcgggatagtgagccaaaaagtgtcacgaatagctatcatcttgagagagaatgttagacagtctcgcattactaattggaaagaaaccaccatgtataagatgcatggttattcctatcattgtcaattggttttgagatagaaccccatgtatcttaccatacaatctcagattctaaacatctacaaacaacttatcgatataagattgatttagggctaatttattgtaatttacgagttgaggtgtaatgccctaatgccaaggcacgctacagtactttttcaattacagtgctaccttttctaatcaaagatttttctcgaaaaacgtgtcaaattaaaactatttaaaataaatattaaactttataatttacataattatttacaaacaccgggatcctgtttctaaatgtctatacaaaacatgaaaaaataaaatatccaggtgcacagcgaatacaaaataaaaccccatatgtccctagaccgaacactccaggtcacgctgccacgacatgtacagtctaatctcagcccaggctcactactgttcagccttcgcctttcctttacctacacatggaagcagaactgagagtcgacagactcagtaaaaaaagcatataacatatcatataataacgacttgtatctagg

SEQ ID NO: 21074 - DNA, 1985 bp, Cannabis sativa
ctaagagcaggccacataaactagttgaacataaaaaattatggagtgactaatgagaaagtaagtgtttaatttacgtgattggctttaatagctggaaaattcaccacgtggagtggagtgggagacctgatcgtggggcccaccattgttgttgttaattaaatagtgtattgacagccgtccgatgatttggcgaatcgcattagaattgttttgaaagtcatcagattttattacatgcagacaaacacatacccattataaattcatatcctgttttgatggattttgactaacacaagaaatggtctcaatcaaccaaatacatgatcagatacatgggcattatcttttatgtttggcccttcaccacaattttacacacacattacatgctctgttcttttttcaaagatttgcccaaaaatatcttagcttttataagtttgttaatgtaaattgtaaattaaaaaaaaaattaagagagagactcacctagattttaggtcgaatataggaggagatatttttaagattttccctaaaaagaatatgtaaaaatatgtcttaaatttgggaaaaaaatgtaaatgttatatttagcaccatttttttattgtgctccgatctaagataaaaattgacattaaaaaaataattattattaatgataagtaataacttaaatatacattattaaaaataattataataagtgtttcaataaaatgatataatattataatttattaaaaagtggtcatagacataatttggtttcacacttagcttcccaaatgttataaaaaaatgtgtatcaaaattatttattagtaatgctcaatgacaatattataaataaaaaatatgtattaattttgtgtcaaatttaataaaatgatatatcttaacttttagcttgtgaaaaattctacagaaatttagcatagtattagagaaacatttttaacaaaaatactaatatataattttacacatcttatttaacatctctacattgaaaatgctttatgaggtaacaactaacaacttccattactacaaataacaactaccattaaaaaaattaatgcaaacaactaaaccttaacacattattgtgttagtttttaattattagaatatttgtttactaatcatatattagtatcaaacataataaagatctgaaatcatacaaaaagattgctgatctaacttactccaattcatttaaagatcattgacttctagggttgtttttattggctagatttattaattatcctctctcttttaaaaaactaattcatttatcatccccttattgtcaaatagttcctaaaataaacactgcgaaaatgatattaatactaaactatccacttgaagaagaataaataaatcataaactaaattcttttgatctaaactcatctctcaacatcattcttattcttcttaacaaaaaaaaaaagttttcttaagagttcttctttctttttaagatgacgtggcaagggacaagaatatttgagaattgaataagatagatgtattgttataagtcatcggtaatacacaaaaatactttgaggtggtatttgcaattagttaacaatattttttaaaagttattatgttaagaaacaccttatatcatactattatttgtataatttaatatcaaatcttacatattttaatttaataaataatataaaaaaatactataaccacttaaaaatacggtgttaggcaagcttgaatgcttttaatatttcttatagagaaatgttaaaaggcacctatacttttgtaatgcacatggagcgggggattggttgggagtgctgtgctcccccgtccacatccccgttagggattttaatctccatccccgcttattctctatcgaggacaggacgggaaatcccctaataaaaaaataaaatttataatgtacaaaaatattaaactac

SEQ ID NO: 21075 - DNA, 3100 bp, Cannabis sativa
  modified_base (26)..(42): a, c, t, g, unknown or other
aaaagagggtaaaaataaaagaggannnnnnnnnnnnnnnnnagagtgtaatttcctctttatttaagaaatatcattaatcaatcgtagggccccacctctagaaggtgctaggcaccactgatgtccaataacaatgctctaataaatagagaaatgctaaaagacaccacgggtgcctagcactttctcagtgtcatatcgatattggtataattaagtatcaggtctcatataacttaagaaaataactttaaagaaatatcgctaatcaatcgtaaagtgccacatataaaaggtgttggccaccactggtgcttaatagcaatgctcaataaaataaaaggaattagcagcgaaattttaattttatacacttaattttttcatttgttttgtggcaatacacctttaagtttatttttgtttaaaattttgagatgataattaaattttattattaaatatcaatagaaattgtcactgtgaatacctatgtacacatgataataaaaatattaccaatacacagatatataccttgacaattcaattaaaatatttaacaataaaatttaattagtgactcaattttaaaaataaaatattaccacaaaaaaatcaagaaattaaaagtaagaaattaaaacataaggaattttgctctcaattaccttaaaataaataaactgaaaaagtaagtcagcatatttaccaaagacacattgataagtaaggtgagcaagtgaatggaccaaaaaatttactattttgttaaaatgcacaaaagaataataataaaaatcttactcaaacatgctacatcttctaaaactatcccaaaaattgacttttacatttctatttgatggcattgcatactaattcaacatgtaaaattcttttaaaaaaatttaaataatttatagcattaaaaataaaattcaaacaattatttactgtatgtgtaaaaaataataattatacgtgtaataaactatttaaaccttaattttagtgttataaactatttgaaattttaaaaaaaaatataaatgatcctatttaattataaaagccaatatcataaagaaataaaaataaaactaacaaattttaactaaatgctaaatcagataaaaattttactaaaagatctatttaaataatatactataattatccctaattttgagattgagtgaatcatatgcaaataattcattgaatataattttttaatttaatattttacttaattttgtaaaatgtcacatgcatgtggcttgttgtactttattatctatagcttaaaatatctaaggtgaaacaaacaaatatacataaaagaatcttacaataagacatacactttactgtccaaaaaacaaataatataataataacaaaaacattattatattgattttttttttttttaattttgaacgaacattaattatttaataattggcctattgggtgtccacataaacatataatattactatttataacaaccctatttaggttttttttttatttatgcatgattgtgctttttaaatttttcagcaattagttcattttgttacatatttaccaaataaaatgatcacatataatttaaattattagtcaacgtcaattaatttaaaaaataatttaatttttttaaaaaatcattaattaattttttgcttaagaatttctaaaaaatacacatttttttctcttaattttaaattagacatagtgttaatcattttacaatattgtaaataattaagaaactattttttataggttaaaaaattcaaaaaaacaatataatacttaagtgataatgaacaaaaatcctaaataaccttagaataataataataatataataatattaaaaaaaaaaaccaaacataacagaaatttcctattacttattctcctctttcctctcctttatgctttcctttcttaaccaaatatataaatcaatgtcttcttcttcttcttcttcctcttcctcagccaacccaaatggactcagtctccacgcctcaatcaatctcaccataaccattccaattcccattcccaaaagggtcctcagaatcaaactctgtatccccaatggcttcatttgctttgctcttgtcagatttcttggtctcattcatgtgggtctggtcaggggttctcattaagatctttgtttacacttttttggatttaggacatgaacccattggagaggtcatcaaatgttctctttccattatcaatatgttcttttttgcttatttggctaagctcaccaatggtggggcttataatcctcttactgtattgtcttctgcaatttctggagattttggtcgttttctcttcactgttggggctagaatccctactcaggtattttcagttatgggttttgtttgatttatggtttttgaaatgagatttgggaattaattgtttgggtttcattgattactcaaagtttcaatcttttttgtttccaatatttaaagttgattgctttattatgtggaatatgattatctgaaatttatgtttaattatggaagtaatttggtctaaagattacttatttattgtggtttccattaagcttttatccacttcttgtagagctgtattagaatttttaatctcatttgctaattttagttgctaacattgattaccccatttttgtggatatatttgctacaacagattgaaagttagtacatttaatgcatatttatagatgagttaaggatttagatggatttattatctacaagatatggattactcataacaaaaccaataatttgttttgaaatggcaatcttgttttataactcttcattagtgcttatgcttaggcaagttcttttcataacatgggcaagtctgtaaggtcatcttatgcttaatcatcactaggaactagatgaaagaaagtcataggatcatttgatgagtctaagatacatatgccctattggtttcaacgtgtaagccatgccaaagggtatggctgtggatctgtgctaggatcccgcattgaccaagtatgagattggtt

SEQ ID NO: 21076 - DNA, 3026 bp, Cannabis sativa
tttctactcggtgtgtagtgcataaaagttgattcaagctcagaaaggaaattggattgcaactaatttttctgggttctggcacaagctttagaatttgaaggtaccaccgaaagctctcaatttggtatggcgggctgcttcaaattgtttgcgcaccttgactcaattaagtggtaagagggtcccagatcaaatcatgtgttcggtttgtcaaagaagtgaggaaactattttccatatgcttatttcccgttcattcgctgctcaatgctggtagaggattttggttgggattaggctgattgttgttgctgatttttgcagctggtttgattaaattttgcaaaggtgcagtaaggaaaagtgtgggaaggttgttatgttgtgttgggggttatggaaggctcgaaacgagttggtttagagccaaaagtatgctacggtggatggtattcgtatctcatatatgagttgtcttgtgcaatagaagtcggccaaaatagaggttcagaggcttctttttcagtttttgaaactcgtgatggagctgaatttcaggttaagccgcatgagaatacaattaaggtaactattgatgttgccatttttcgtgatcgagctgcgtttggttatggcatagtcgctcgagactctcaaggagaattagtgatggctaactcgagcagttttggtggcataggcgctccgaattcaactgaagtaattggtataaaagaagtgctaagctggattaaaacttaactatagcgaaaattggagctggagtcaaattgcttggtagcagtctaaattcttcaaaattcatcacctatgatttcttctttagaggttattatagatgattgccgtaagtttctggtattattaaataatatttttttattttttattaaacgatctgctaacatgattgtttatagtcttactagagcatcttgtgcttttccaaatcgagagttcaacgagaatgatgttattattgaaatacaattatatcttttggttgatttgataaaagttgtacatttactttaaaaaaaatatatatatacatgccataaaaaatgtagaaaaaattcaaatttagatgatattattttgcgaaatatagaaattatcgacagtactaaagataccatatcactttttttattaggctttctccagcaaactttaacgataaattggttgtcaataattattcagtcacttcaatatgtaaacatgaattgcatcaataaacactacataaatttgataaaatgcataatcgagctcttggtaaagcacatgtattcaaatgttgactaattgagtttcagttaataacatgctattcaacctcctagagcttttggatgacagccacagaatagtccattatcgtaattacttaaaaataaaaatgcaaaatatgaaggtgttgtgtcttcgactaatgtattcgaattttgactaaatttataataagctatgcaacctcagatattttggatgataactgaattggctatcccagcctgctctattgtctggtccagatcagtcagctgtttgggtggaaaccccattgtcagaagttggtaagttcttggtccgtccggccttgacgcattgataaaagattgaatatctctaactgtgtggtggtagttaaatcgagaaaccatgcgagtaccatcagctaacctcaactggagagaggttgatggcaatgagtcatccaccacaaaacgcattgattgtggtgaattagggatggcagaagtggcaacagtcactggctctgaagcagtgctgctcccaccaagagttcttcccacaccctgaaaagcagcactccttcgcttcactggttcctgtgagaaaaaaaagcaagattgcataagtcaagaactggagattaaatggtgagtaaatcaagctgaagatacagaactaaccgggtagtcttctccacgccttatcatttcaacacgcacttgggtattcctgtccgcttgttgaagctctcgtggacattcagatttcctgatgctctgcattcagatgttactgataatgagaacaagcttatctaccaagagaacatcataagaaatttacatcttaaatattaatcatttacatctcgtggaaagcagtatcacacagttataacataatgaaaagcttcactgaatgattcagaatgatcgttcataaaatatgaaagaatgacaaactgttaaacaagattaaaataactccatgggacaagaatatttaaagtgaatcatggttgtcaaccatgcaaggattactctctttcgtttccatatgttttcagttcttaaagcaaaaaagaaagttgaatcattttgagcctcaggatggataaaacaagaatacttttaaacagtttgaagcattgagctgaatacagcttaaaggttatggagagaagtacaaagttcaaataagacacattttatagcataaatgtacaattattagtccaaaaagccctataagaaaactaaaaaagagagagagagtaatgatatgtgcacctaaagtacacaccatggcagctttataaactgatgttttgaacatcagtgtaatgtttagtgtatattttgggcgcacaaattattatatatacaaatatatatatatattaaaaaaaaattacctccaagaaatgggaattttcaggatcatccatccggcgcagtggaccatcatctacagagaaaccgttcctccaaaaagtgattgtgtgatttaccacttggggtggctgagggccaggtgccacagtctcgcctgtaagtaatctggctgttccagtaaaacttcttgagcttgaagaaggttgcgcatgttcgatggaccctagcatagcccccgcctgcttagcttggttgaaaagtgcatccacatcattacctctggtaggatcttgaacaagcattccactgcaatcaccagtaagttagatcatttttaatcctaat

SEQ ID NO: 21077 - DNA, 2822 bp, Cannabis sativa
aatataaataaaaagtcacccacgaatttctcataaactaagaattttgttatataagcacactttatatagaatagatatataaatttacactacacatatatgaggtacgtaaatgttgttggctgaatgatggagatgaataataattataggatttataagatattcatcctttaaaatgaaattaatgctccttcaattaattattttttgtatataaattcatcaagttcaatatttgttttcctatcacttcatttacttctatcttatctcttgttgtaactattccttttctttttgaatggagtactacttctaattattcttagtctaagaagtaagttaaggcatagttaatttgtagatatatttaattattcaaaggagatatataaacattacaataggttcatttcatggttctaatttctatgttattaatttcaaaggaaaaaagaaagaaaaccccacaaaatagagacggtcactacttttcaccttgatggtcactaatattagataaagagaatattcttaaccatagctagctgtttaattagctcaacagtatgtagcctaacaaattttgaaagtgaaacataatcaaaacttgattaacttttgtgtctctagaattgttggcagggtaatacaatctctttaataccgttttaaaactctcactcaatactatttgagaagataatttctttttgtttctttcttgttgctatatgtatatattttgaaactttcttgttactatatttaagcattaaacattttataaatattatttattgccacgtccaggttattcccagttggcattatatacgtatatattttcctttttaatggttaataaatgcacattcaaatgaaatgtgacttaaaaatgtgaatctaaggggctagctgcagctggtaaccaattttcagattagctatagcttacgattgtttctggtaacacttagaaatactatttatagcttccacgtgtttcgaaagggtgagatgatagtacctagtactatgcaatgccaaactctcgagttatttttttatatgaataaataaataaaacaattaagtcctcttaaaccttgttagttataccgacaatggcatttgtgattgtatgcggaaaacgttgtcactttcttcaaatttgaccaatcaaattgacaaagtgaagaacatatgaagcatctaggaaaccctcaagcagaattttggcccatgttttattattattattaaaaaatattaaagtgatatagggtttattcaaaaacaaaatctattagtatctaaggcacttttgcaatgaaattaatggctactttttcttcatttattattgttaatatttccacacattagagaaaaaaaatggaattttactcattgctatcttaattctgattaagacatctcaatatcctagctttttgatatctccaacaagaaaatcttacccgtgtaacacaatctaatttcctcactaattactactaaataaaatgggtacattatcttttttttaaatgacataatcattgttatcatataactatgtatttagtttgagggagatcgattctgtcaatcagaatacaacattttttttaattttcctttttaggggaattagaatacaagattcatcaaacggtaaagtaaattttaggtatacatacctgttgttttatttatttattgtttgaaagagaattttggttgaggtcgttaaaggttaatttatcatagcaattaagttatgtgcagcaaaggcttacacatatatctaaaatatttttccctaataaataactttggatttagatcaaagaaaataaataaataactttggttgttggtagtcattttcataaatgcacagagaaaacccaaatttataactatgtggataaatctgattggtacggcgttgtttgttgtgcatctttttgcaattatgggttaccctccaccaatatataatttttcttttcatttttagaaaaattacatgtacattcctttcaacaaaaaaataaataaataaataaataaataagagaaaaatttgtattactagaacatgacatgtggcatcatgtggttagtctccaaaccgtaacgtggaaactaggcgaatcattggatcatctccatggacttattaattattcaagaagaaacagtgaccaaagtccaacttccaacaaaggcaatttccttgttggaagggttctggcatgaggaccccttccacgtttttggtgaaatggataagcttcatcttcatgtgctatatttatatcattcaaatcttaaaataaataagtaaaatattaaaataaatattatttttttttagaaaaatattatttgaaaattaaataaatagagttatctcattcataacagtaccgcgtctttcaaattcctcctcctttttacccttttcagctgtcgattccacacgccttttttttccttttcaattcaaatatccatccatccataccctgactataaatacccaactatcttctaattccttcctcaaattctcaaaacaaaacaaagcctaaaattttcaaactattcgatcagactgaaattttccttattttcttaatttgatcaactaaaagattttctcagatagaaaatggtcgatttagactggaaagcaaagatggtatcccctgatatgtctagcaagtctcccaaactatcgaacaagcttcatctctccgttcccgtctccgctcgtgccgtacaagccgatgtgtcggcgg

SEQ ID NO: 21078 - DNA, 2855 bp, Cannabis sativa
ataatcgtattacttttcacaaaataaaaatcatttctcttctttactttttttttttttttttttgcttttcataatatattccaataaatgtaaaaacaaaagggaaagttcggtggatcattagacgaaaaagcaaaccataattaaacctttttatgaaatgacatttggaatgtgatctaatttaaacaagattattacttcatcatattcatcacgattagttaagtatataaaaaagcaaaactacgaagggacaatattaacaattatcaattaagggtcatatgggagggcctcaactaatgtatcataaatttgatcaatattcgatcaaaaattagaaaataaaattatacgaatgaataatgaaggcatatataccaccataatagatattataacctataattatcatcattataataagttaatatcatgcataccctgtttttctaactcggaatatatgaaaacatttatctaccgttaaaattgttagggaccactatcaaatttggacactattacaaggtctagctttatttgtgaaattattatttttttaaaaaaaaacaaaaaaaaaaacttttattcgtggaaatttagaaagcaagtgcctctaaatcttcctttttggacatgagaaaatatgtttgtcatttttttgtatgtatacaacggagaaacattggtattaataattaatagagaaagataaagtctagtactattatgaagtgtaatattattattaatatttttttgtaaatcaattataatacttctatctcataatagtgctttcccataataatgctctaactaataatgcatattataaaactttacacaaattactagtaatcatacataaatccccattatcattaatacattccataacaataacaatgaactcttaatcaaaccaaaatcatcattaacaagtacaaaatcaagttcataaatctccaaaataacattaaaatactttgaaatgaaaaacatagaaatagcatatagctagtccagtatagctttaagagaaaacacagaataacaaaacgacaacattacaaccgttccacttgataaaacgacaataaaaggctcacaagcaaggccaagcaaccataaccacttcctcagccgcctttacttccttccaacaccacctcatggcgtttggggtgcgcactacgctctccttcacattagcagaataagtacggtacagtacgcacctaccacctgacagatcctgcttcaccaaatccacacacgtgtacccttccaactcagcacgcctcgtggcccacctcagcgcatcacgcgacccgcacgtgacagcaatggagaattgagtgggcccaaaacacgtcagcaccttccctaccagcttttgaaaaggttccatggcgttgggatcgagtcctccagcctcgtagctagcgtagctaaacccatcctctggggtcacgtgcactgtagagtacgctgcaccttcaatcccgttcattgaatatccacaagggtcaaagtcaaagtcgcagatcacgtgaccgggaatgatgtcgtttatgcctgataatttagtcatttccttagctgaaacgacgtcgtctcctgagtttttgtaaaacacggccgctttatctctgctcaatccagtcatgcaaatctcaatgttgatctcgtcttttccgtccaccgtgaccggagatttcgccgccgagtaaacatgccagttcctgttaggacattcggagtctcccatgacgtaagctttggggttcaagtcggcgaagtaagtgttcagagcagcaacttcttcgataaagttccggtgaggagctggctgagcttccggaaagatgaaggttccgcgagagtatctgacggcggagacagcgagtgaaagcttgtcagctagtcggagaatcggcggaatagaggagaggagctttgtagtcccacatgttttgattatgatcttgtatgagtagatgaagagactcgactcggagagtacgtacgagtcgagctccgagttggagaggtgggccacaatggtacagcaagcgggctcgagaatggaatctatttgggcccgagtgagagcccggaggcccaatccttgtgggtccattaagaaaggtggcggagaaaaagtaatctccagacgcttttcaaaaccctcgaacccaattggggaagaaggagaagaagaagaagacatggttgtactatctgtatacaaagctttgaaacaaacaacgattgagaaatcgaaaatggtgcggtggcgatcggtggattaattaatgctgaaagtaaaaccctaatctacggctttctgaatgcgtctcaggatggcttcctcaagcactgttgcaaatacatcaacaaaaaaaatatatataaataaaacatgaatggaataaagaagaaatcaatggaatagggtttgaataatatgattacgtttgagtatgcagcagatctgaacttttcaattccaccgtttggacgaatatcttcaatgctgtaaccgagaggagcttcgtattgttgagcgttgttcttactagtactactactgctagacttctttttcccacctttcgtttccattacaacattcacgctttttctctgcaaccaaacaccccaataataataagagaaattaaacaacaatagcaaaatatataaacaacaattaaccctaaaaattaagtaaattacgatcaaaacaacaacgaaccttaaaatcttctttgaataacaagaggggaatttctttgatcggaaaccctagctagagagttgaaaattcaatacgaagg

SEQ ID NO: 21079 - DNA, 3297 bp, Cannabis sativa
gtgaaccatgcaacatagaatgcgtttttttatctttattaattagtaaatatgattatattaaaataggttttatttagggcacaagacccaacacgaactatgtatatagtggattagtacgctgacctgtatgtcaagaaaataattcaaattcatggtgttccaagatcgatcgtctcagatcgagatccaaagtttacatccaagttctgagaaagttcgcagcgagcaatttgtaccaaattaaagttcagtacaacctttcatcctcaaactgatggtcagtctgagagaattattcagatagttgaggacatgcttcaagcatgtgtattggactttgagggttcttggaacaagtatctccctctgattgagtttttgtataacaatagttatcaaagtactattggcatgacaccgtatgaaatgctttatggaaggaagtatcgttcatccattcattgggatgaagctggtgaatggaggcaccttgcacctgatgtagtcaaaagaatgagtgaagttattgagaagattcgagctcctatgcttgcctcacagagtggacagaatagctacgctgatccaaagtgtagagatgttgaattccagattggagattttgtcttcctttgggtgtccccaatgaaaggaatttagaagtttggaaagaagggaaagttgagtcccagatgtattggcccatttaaaattctggaaagggttggtcaggtagcctatcatctagccttaccccctactttatctggagttcataaatgcttcggaagtatgtgtctaatacgactcatatcctaagctatgaagatatcgagcttcagatggatttgtcatatgaggagcaacatgtttagatcctagataggaaagagaaggtgtttcaaaagaagactatactaagttaaagtgatgtggaggaacaataaggttaaggaaggcaaacttgggagttaaagtcgcagatgcaggagcagtatcccgagctattcaggtaaattttgaggatgaaatttttataaagaggggatagttgtaatatcctgaaataggataggaagagatagttgtaatgtaatatcttagaaaatataataatatttatttgggtatactttattaaatatgtgattaggctaatattcgagtaagattatgatcttacttatgtgacgattagtgtaaatttgatgaatgattaaataaagcataatttattagttacagaaattttattgggttatgtgggtattgtaaataccatttttaaaataaaatattttcgagtttggtgaccgtggaaattcgacagagtggtcagaaatgtcacgtggttgacattgtgttatattagaattataccgaattagtttagaattctaagttatcggtttagcgagattagttagaaaagaccaaattacccttagattttatttaggctatagtgtcttaagaggggtaagatagtcatttttttagtttgtcatttattatatatctaggctgaaatggaatgtcttgtagtgggtatatataaaataattaagctagaaaacctaaaactaaaaaaaaaaggaagaattatctgagccaaggagaatttcttcagcaagttcttcaatttcaagcagaaccatctaaggtttagggattgaacaatttaaggtaagttttctttatatgtttttggtgatttcttaagttttagcttaggttttattgggttttcttagaattcgggttggtgatgttaatggagtttatagtttgattctaggtttaatttagggttgttcaagtgagttttggatgaattacttggttgttcatatttgttttaggagaacttagcttatgaacttaattcttgatctttaatggtgagttgggtattttgataaattgttgtgaattgtttgattgcatacattattttcatgttattggagtgttctgaaaagtttaagtaggtttggaggagcttgggattagtttcggggtgtaaaaccagaattacctcaaattttgccaaaatcagtcgatcggttttacatggtactggtaaaccggtcgattggttggctagcagggggaattctagggtttttccttgaatttgattttggcttagggtgttttttggaacctagtttaaggcatttttagtgatgtttaagctattttaaaatcattggggatttaaagttgtctagttatggaattagggtttattctggagtttggacaagttgtttatcgaattttgttgttgtgacataagacctgggatcgtcgagctttgtttctatttaggttggcctacattcctgatattggattgaggtaagaaaatctttatgcactgctaagcaagttagatgagaaactattattattgttggtgcctcgattctgatcgaggtaatgattactattgttatgacccgattatgatcgagggaaagatacggtcattaccgttactgtgaatgagtaattgctcgcttgaaactgcaaatagatttcttacttatttttgctttatcaagcaatgatagtgacatatgtagctcgtggttaacgattggtaagggtgctttatgatgcatcaagatcggtacatcttataagacgtataactgtttatgaaatgcttgattatgctttggattgttgaatttgtataatatgccatgttgtgattattttcactaaacattgtttggatttgtttatagcttttcttgttgagtctctatgactcacgggtgcttcgtggtgcaggtaaagggaagggtaaagtggaccaaccatgagttagaggttttccagtgatgtacatatcaacgcaacgcctcgactttcagtggataagattcatccttttgatagtattttgaaaataatcttattttgtacaagttttggaacagaacgcaaaagttttatacaggggatccccgtacttaatagtggttttctttatgaaagttatgtttataattcaattaagctacacttttcttaaactaataaactataaaataatttataaaagcacacatgtggcgtccttgtgggacagggcgttacagtcttagtgcaaagtggccaaaacttgcattggaacatcgacttgacatagcacggacatgtttgaggcattagaatcagattcagagcaggttggttttgagcacccggggcccgagcacccatcacccaggttgacaatttatcaatctgggtgcctgttggaaattattttac

SEQ ID NO: 21080 - DNA, 2342 bp, Cannabis sativa
tatatatatatacgaaactaactgtatttacaaactataagagcctaagagagatgttatatatatatatgaatgttatatgcatgtttatatagaataggttaataggtgatgatgagctgagaaaatgggagtttcaatgaaattgcttattagtattattttcataccaatttagggtttttatgataaagtagtttatggtgtactttttttcttctttatcttttttctttctttgggtgaaattattatttggaaagttcatggcaatttcctcaaggtccacaaaattgactgtacaatgtcctttatgaaaattgtttaacaagtgttgttattattataaatataggtggaaatttgtcccatattgattttgatttcgaaacttaaacataaaaacaaaggcaccttaattatgttttgagaatttaataatttagttaaacgatctaaacccttttttttttctattaatattggtataggaaaaaaagctggttttttttaataatttttgtttaaaattaatgattttaaaataattattgagcataaacgaaaaaaatattatttatattattagtcggaaaccaattaataaaattaatggtccataaatgtttaatgcaaaagcaccaatattatttggtggataatcacaatttacatatggacatgatcacatgatctaattctatgccacgtaattagaacgatcgaaatatttttttccacgtaattaattgttaatatacatttatttatgatgattatttttaattattatagttatatatgcatttttatatatatattttttctatacatatttgtcagccaaattaaatacgtaagtactattacgtattacatatatatttttaataataagtaataagtattatctctcaaaaaaaaaacgtaaagtattatatatcctgttttgatcggtggaataagtgtgaaaaaattgagggttttttctattcataaatctatatgtatatagctattaaaagttgtctttttgctccggccaaacgggtttttttttggatttaggcgtagttttgttgggattgtgttttgttactacaattcgatttttactagtgcaattaattttatttctatgcgatatagttttgagtagtgttttatagttttatttttataatataattttgagtgttttaacttttatctgtgtgatatgattttataatttattttgtttcgtttgttgatttttttttatgactcaccattaaatcgttgttagtatgtatagttgagaataacaagtctacgactgaaggggttgttagtagtgaagttacgtactttacgcaatagttgagtgctcaagctagctatgcggttgaataaacttgctgcaacagtttctacatgtgtgtgtctttaagcggtgcataaaacagaatataagtattcttaagattaattgtgatgctgtaatctttttcatttgattttattttaaattttttatcaaacgatttaagaattaaaggattgattatttcactcatttttttaattctaatcttagtcggattttcagcaggtgagatatattgattggaagctattattttattagctaattgttaattaataaaatttcttaatttattataaaataagttttaattttcacattttttttaaaagttaaaaaatattttcagatgttgaaatcacgattcaattaacttattccgcgtgagtacgtataattaatataaaaaaaaaaacaggcatgcatgtaattagatgttttaagattttaaataaattgtaacccttttttttatgaatgagataatttttattattctaaaaataatttgtacaaattacaagcatacagtcaagaagatgtgtataaactctaatatttacaaagtgtcgaaccaattgtaactcaatttttatatatataagtttatattgtagatgatagataatttatctgtgttttttttttttgttttgaaaaaattttatgttgaaagagttcaaacattcaattgcatatgcatctgtactaatttttttaaggagtggccaattaattattttaaatttaatttttggtgtaaattattcataatttaaaaaataattaagtaaaatgcctatattatatatatataattatactctagataaacatattaaataaattgagaaaagtgataccccaagaatacttattgtaatgcatatgcttaattagtttggaggcctaactaccttggtaggcaatattattgctatcaatctaacttggccctcttttacctaaaaat

SEQ ID NO: 21081 - DNA, 2523 bp, Cannabis sativa
tagtacttgaaatatattcttaaaaccaaaatttatgaaagaggttggtcttcctccccgagctactaaccacttctggactcttatggacatcattgtgtgttcctacgacaaatgactgggaaaataagatttaagcaaaatatgggatgatgagggtcaggcaaaattctctcaaaactaaatagatagaaacactaaaaagactgaagaaggaagaaagcccaattaatcaaaatcgtatagaactatcacagaatcgaactgttgactattaacaacaatatatttcaaacaaaatgactatacaaagataataagtgaattttgcatgctttctattatcattattcattcatgggatgaaagtgagccaagcaagagaatttcggtgtatttatgtagcttaggaagaagaaagaaaaaacttaaaatagagaattatgtacagtgaaaaagagaagacagcaacaacatgctgccaaaacaaaactgcagaagcctctttgactgcatatcctctcaggcttgcaatggctcccaagagtatggcacttggtgttgtgtattgcagcaacagaacaaacctgtacagttgatcgccggggatcaagaaattgaatcgatcggcgcaagagactattccaattccgagcagtggaagaacaaaaagccttgcaacaacaataccaattgtggttctcattcccagatcagatctgtttggaccctcagcaagcattcctccaagaacaagcatagccgatggcaccattgcctcagccagaatatccaaactgtctgttagtatagagaatagtgaatccttgttgtaaatcacagcctgtgctgttggaaacattccaataacaatggccaataaggaagcaattgttgggggctgaagtatgtgagaaattggtgttctttccataacaattcttattctcctgacaatgcttggctcagccaaacaccgaattgaaacctttccctcagtatcaaatttcggaacagttacttccgcttccccagagatattgttgttattgaaaactctggcaatcaatggagttttgcagtgttctgtctccctatcttccattcctggccattcagcctccacaagaagtgtgctactcagatcattaacagctatttcctcaataccttcacttaattcctcaatctcagaccctccttcttcatccacaatttcatagaactctaatggaggttccatcatgtgataaacaagagtgtatacaagaaaaacagcaacccattgagaaaatgcgacataagccacgccagaactatgacaatgaggaccaaaaatgttatctttactatgacatacggatgtaatcacagcaagaggaagattacccgtgttaccaaacccggtcatgatgacggtgaaccgaaagtactgcgccggaggccgacatatgagtgctacaagtaagcctagtatgcagccagtgactgtgcttataatcacgtttacaggaatgaaccaccattgaattatgtgattgagattaatggaaggaccaagatttgtgaagatcaagcatggtaagaagagagcaaacacaagcttacttagaagtttaagagttgcttttgggatgagttgaatctttggttgagagagaactaagccaaagatggatagagataagaacttcaataaaggcaaaacggcactcaaaatatctgcatcagatttcaccttttctctcattaatgaactcgtgaaaatctccatctctatctcttttcctttcagaggatttttcacagtagaggaataggggtaacgtttttcatgtggctgagttttgttatgagagaaaatagttttgaggtgtaagatgtggaagtagatggacaaaacaaaacagatcaaagagcttgacaatgacttgctttgccaagaacattgtttattttattatttgattatatggtgagtggtgatggtgatggtactttttttaaacataattttgataaccttaccattaatagcaattaactttttccagtactagagctaatagatgtttttaaaacattcttcccttaccaaaaaaaaaaacattcttgggtgaaatagcttgttttgctctattatttgactacaatcatatagatagaagaccccagcatagtgaatattgatagatttcttagagatgcataatttatttacatgtctttgtgtactttgactttctttagcaaataaaaaaaatgctgagaaagattagtttttgttttgttttgttttgttttgggaaagaaaagctcattcttgctatatgttgtatgtcttctaattaaaattactatttggtagagttataattaaactgttaatacagggatggcaataaacaaagcagggaaggtttgacttctcagtactgttttgttcaaagactatttacagccttcaattaaatcatatttcatatttatatattatctctcttcaacataacatacatcatc

SEQ ID NO: 21082 - DNA, 4124 bp, Cannabis sativa
tatttatgttcagcactcccattacactattgtcggtcaacgctactgttcatactgttgaccgacgtgaatagtaacccaacaattagcccgtctctttaaaaatgacgcaaataatatgctatttgcgtcttttaataaatgacggtaaaaggtaaactgacgagaataaacaaaaaattaaaaaaaatacttttcattttgcgtctgttatcaacactcgactattgtattagcaagattttaaaaacgacgcaaaaaactatagtgagagatacaaacagacgcaaaaaattgcaaaatccctaaaagctaatcagctgatgcgcctactgatcattacgacctaaccctcatatcttcgaactttctctggcgaaacagcggctcctccgttctcttcgatgcacgcctaatgttcatacacatccagccctaaaactctcgaatgctctggcaaaaccacccctcaaccccttcaatccagccactgctctctgaaaccagcctctcaatcgtcgattctgaaaccagcctctcaatcgtcgattctgaaactagcctctcaaccacgcattcggatcatcttcttcgaaacctagctctccacaacattccccagaatttgtacgccaaagtccaatctaagcgccactttgttctaggcgcaaagcatcttgcccgagcgcgatctgcaaagtctcgctcctattcctcatcatttgccaaggatgcgttagccaaagttgagatatactttcatgcggatcattgaggtaggaagaagtttgtataagccatttttatgtgatgtttttatttaatttgttaccccatatgcaggttttactgtcaaactagagaatcattggaagaaaaatgtgctaatttatatgaagagaatcaaaaacctgaacaaactataaatgaattgcaaggtttgacttgatcacgcctaactgtttgtttcaaaatgtatcaattgaaatgcttataaagatgttgtatttgctgtgaaatttttagattctaccaaactatatccaatggattatgtaagtcaggtgatcacgaaagaagatttggtggagaatatcgaaaacataggcagctctgctgctgcagttctttgcaaaatttctaggaaagttccatttactacaagaattttaccttttaattacacaaaaccctaacatttttaaaaaaaaactatactaatattgggaaaattaggccttattcaaaattggcctcaaatagagagcatgtggtctagttcaggttggaattttctgattctgaggaggagaaattgataagagcgtggtaaagaatgaggatggaatggtactctcgcaaagatcgaacgagactctttcagaattgctcattcaggtctctccatatttttcaatctctctagacatatttttctttggtaattaccaattttattcttatgtattcaagattcctttgctttttcttgttatgttttatctgctcagacctaaaatccgagcgatccatttttccatgtagccatggatctggtatgtctttgagtgttgttttattaaatcatttatttatttcaagttcacgattgctttattaaccttaactttgatatcttacttattagttagattaaggattctcttctagtattaaattacgtttgtgtgtgtcttcacgtagtataaattgattgagattgatacactctgtggtttttctttgtatatagttgaaatgaaggtaaacagagctaaaatttctagtgtcaatgcacatcaaatcatactactgggtggatgatggtcctaatatcactcattttaagtgcttgtattttaaatatgaattgtgatttttcttatatatttacaaagttttgaccattattatatatcataattggatgattatatatgtgaacttgtgataattaatataaatatgaagttggagatggagtagctggagtccttctaatcaaatgaaatgaataaatatattttatgatctttttggttcttttttagatcttaaaatgttaaataaatagtcagttgttttagagttcttacattgcgctggaaatgccttttattctaaatttaattagtagtcatataagtgattacattgtttccattgtgttggagatgccttttttttcattttgaaatatatattaattttaattactaatggtaaatgtaaatgatgtcttaaaagttcttagcttaattttaattactagtggttgttgttttggatgttactcactaacacctacaggatgatagaggacatgacaccaagcattctacttgaagataatagggtctcaagtgatcttgtgaaatatctgaaggtataaatttctactgatattgagtcttttcccattgcatataggctacacttgtggggtgattcaatttaatctaacctattaatgaatttgaagtatctcttattatatatttatttacggtatttagccaaaattgcatctttttgatactctctgtgctttcttaggtgaacaatatagacaatccatataaaaaatgtacaaagagaaatcttttgttatggctattgttttgcaggtgaacaattagaaacaactctattcataccatataaactataatatttctctttctaaacttaacaaactcttttttttccttgtttattttcattaatatatctttttcttcattttcagttactaacgtgatcaagatcaaatgggaaatgtgattgaatcattcttttctgggtttggagaagttgacaccaaacacttggatcagcaatccaatattattatttctccaaactcgtccactttatttcttctagctccacctcgaagatcatgctcacttccttctttaattaatgggtactatctcaattccataagcatttatatatatgtgtgtgtgtttctttttcaatccataaaaatggtgctcttctgtgaaattttgtagcttgtcagttatttttttcccttttgatggtttgctcatgttgatatgcagagtttgttgttttctactttagacttgtattcttgtttttgtttctaatgcatcaaaatgtctctggtttagacacctaattctccataattgatgtgcttgataagaaacagaatgtttcctttgttatggcataatctagaattagtttgaagacaagtaacgataaaagagaacagattaagaattataatttttaaaagagaacagattaagaattataattttatagtataatgttgatatgtcttcaactgttgtttagctttcttcgtttctttttaactttgaaggctactccttttaagactgcttttctcattttgttgtttacttacttcatttccttttcttcctccttatttctaatctgtttgtgtgtataagctagtctgtgtaaagcatgtaatagtttttgaattgataaaagcagttttatatttaaaatttgaattgtgtattggtttatataaatttttttgattgttgcagaatattgctcaatctttcattataaagcttatggctctacttagagatacaattttaaatcgaagattggataagcaagaaagtataccagttaatatcaagagttatgaaagttaagagtaggagaatcttcctaatcacatttatggaggatatgcttatgaaggttgggcttgtatattaaaagtattgttagaaatattatatagacactttatgtaatattattcatgtaattgtcttaatttgaatttatcttttattaatcctaattttattttattattttttaatagtgaacttttaattaataatgtatatgtttttaaaggaatttatatatgatgttagtttatcttttatatatagacaaaataatattagtttatttgtgatttttttttaatatatgtagaaagattttattgtgaataataatctccatacactaagtgtcattttagaatcgatgcaaaaaaaacttgttgcgtcggttaaatattgacgcatagcttgttgcttcactttaaaactgtcgcaaaatgcttcaatttttgtttt

SEQ ID NO: 21083 - DNA, 3565 bp, Cannabis sativa
tagaattacatattttttttctttcaaataccagccaactcttttttctttttttttttttttggtgataaaaattatataccttggttacaaattatatatacaaacacagtatgtttatatacaagttgctatacatatatgttcatgatcacaagatcaagtatatacaagagatgtcaggataaaagggggattaaaaatataatacaaagcataagattattaactagacttgatatattatcttggagtgtcatcttttacggaaaacaatcttaccctcagcatcgtgaaataagagaggtataacttcatgaggagggtcaaagcaccatacttgaggtttgtccaaataatggcccattcgggctaatttgtcagccgctctattcccttccctataaatatgagaaacaatacaactacttagctttggaataatggagttgatgtgagcaacgtgcatttgtacatcgacacatttaacctgtcttttctccacaattatatcaagcaatgtcttagcatctccttcaagccaaacatggctccaaagaccatattccaacaccaattccaaccctcttcgaagagcaacaagttcggcgatgttgctgttggcttctccaatggattcagcataacccattaagaattcagccttgtgattcctgatcacacctccaatgcttgctttattattccctgctgccccttttgaagatccatcgaaattcaattttgcccatcccatttcgggttttgcccatgacacaggaacggcttcggccttcttcttgctagatgatgatgatgatctcagcccaaaacgaaatccattttgtgatgatattacagttattaattgtctttgttgacacctccaaagatctaatcctaatccaatcatgatgatgatactaattattaataataatagcaattatatatataatagtacgtacattatttacagaaatgaagtgcagtacaaacatatggatcacgtaattagtatacttgctatcatattatagatgatgaagttgagtggagcgaaagcaaactaaaaagacccggaatattgctaaaacaaggcagcatcttttatattatatagagagtcgccagggaggttccttttcatgtaatttataaagctttcaatatataaccgcttattattatctctacaaatgctaaggggtgatagtgtaaattaatattgaatcctgcacataatttaatttaataaataatataaaaaattaatgacatattatctgcctaagttttttttaatagatcaaattgtaactgcatatattataggaattcttttattaatatacaatatatacattaaaattacataaaaatcgttgttattaataatatgttaatctcaaggaactctcactcgacaaacaatcaacttcaggggaaaatccctctctaaagttccggccactctaccaccgtcaatggtggaatttccttgaggaacaacacttagagggttcgattcctcaagagattaaaaagttgggatttttacaagtaatggatctgagccacaaccgatgagatgactcaattccttccattctcttcaaccacccattgattcaacagttagtttcgtttaaccaagtctcttctatacagtcccgaccaccgtgggtccgtgcgattgaagcactgtggttctcgccaactaccgtgtgtttcaaaccaccatgaatctctgtctcctcagattgttcactactagaaatatggtgtatatgtactttttcgattttttatttagtttttacggtacaaaataaaaaatccaaacataaaagtaactatgtcctatgacctatggcttcggttattagaaatagatctttaaccctaaaacaatgaatactcaggccaacaacattcttctacagctgttttaattcatcagatctttaccttatatataacaaataaatattaaccataattatttatgttctaggccgtctctgctgactaattatcaaacatgaaccaaaactgaccatattataattatattaccagaattttctatatcttggcaattagttgcctgcatgcacttattcacttaacaaaaccattttggtatcctctcaaaaaaaaaaaaaacacattttgtaagtgtaattattaagaaccgaccgatctttagttcttcatctattaaaataaaagaatgtttattatgaagatctaggagctaaatattacaaaattaagtgaaaattaaaatactcaaagagctgtgttcccttaccaacaaaattgaacctattagttatgtattcccagaataaattaattgaatagcaaaaactaaatattacccaaatccaatgacacccctcattaaaaaatattaaagaaaaaaacagaagaaataaattgagtaaaaatatcacttaccagtttgaggatcatctataggtatgaagacaaaaaataattaaaaacactgccccaataagatagaagcataattgagtgcagcgctaatgaagttttaattttcatcttgatgaaatgagatgaggtaatttattaaagtaataatagaaaatttaaacctcatcaacgctgcactcaatgacgttttcattgtggagcctctgataatgcggtgacctgatgagtgatgatcaattaagctgaaaatcatggcatttatagtaaaaatgtgtctaactaatataagagcacatacagtgtcgtacatggacttttgaggatatatgtactatcaattgcagatttcaacgaatatatatgctttttattttgtaatgtggagagagaagtttgggctttactaggatcccatcccagtcccggatgaggttttgtttgtagtactggatctgtacttgtactggaatgaaattcttgtactacatttcaattcaaacccacctccatcccatcgattccaagtcatgccaatttcttttcccatttttttttttattcaattagatttttatttgaaagactgagctttaattacactgaaaatattatatacacattgtttgaaaaaaaaaaatattaacacatcccaaactaagatatctttcatcaacttatctattttatcttttaaaataaattataaaacatttcactttctttatttacttcaaaattatttatacattctctacatcatttaaaattttttattttaagttttttacttttacattttaatcaatttttttatccacataataattcacataagagcaatctaaactataaatttaaaacaaattaaaaaataataaaataattcccctatattttatttattttttaaaaataaaaataaatataataatacttttttttttgataaaaaataaatataataatattacacatatatatatatttcaaaaaaacaattataatataatatttataactcaataaataataattttttatatataactaaatactatttataaaataaatttttaagctataattgttcatatttgat

SEQ ID NO: 21084 - DNA, 2718 bp, Cannabis sativa
  modified_base (2284)..(2305): a, c, t, g, unknown or other
aaaatctgacttagaaaaccagttggaaaaaacaagacaggatttaaagagtacttcattaaagttatgataataattaagaaaaagcaatcatgtcactgcaaatatttatattaaacaacattttaagcaaagaagaatcaagtcagcatttgttctttgagtgctgctacaatactcatattcttaaaaaagtcaaggatgataggcattaaaggagtgagtgttcagccttcctggtcttataaactagattaaaaataataaagagacccaattcagacataaagtgttcttctgctttatctcagctacagtttacttcatatggaaagctagaaataaagccctttgggatctgaagcgtggactgttaagaaatttttcacaacattttgagtactgtctgtaatagaatttctttagctatacaaagaaaatttctagtatagatatgggtggagaaattgtatatagcttgtaattaattgtagatattggtgtttgtaattgttttctgagtaatatattcatactgacttaaaaagaaaaaaaaaaacattttgataattgattatattcctgattactgccatacttggacagtatttgggttgaaagctttgtaacaagagactagaatttgggaattttgggttgtgttcattattactgccatgcattgtgataattgattatattcttgattacttcacaggtgaattgctcgagatgatgatgatggaaaattggatgcagtgccagtaattgttaaaattattattgtgcactaatataataataggttcaataccataaatacaattattaactatgtgcttaatatttgtcaactatcataatgggatggttgataattatatattatgtttttttttttttgaataaattatatattaggttagaggtacatgagagcatcctttaaaattataattggcccattaaattatagtacaccattattgaaccacttcaacccaattagtatataaccccttagggtgagatatatatatatatatgtcttaagtgaagaggtttagggttaatggtaataagttgaaagaggggatagctccacgtagtgttctctctaatattactttgagtttgtatttgtcctcattttggagattcttggatgctctaacattctggatggatcatcaatgggaggtatgcgtgtttatttttattttgtgatgctctaaataaaatatagatcttggttaatgattatgagtaaggacgattagtatttaatatgtgtgtttggatagctcataatctatgaaaatttaacaattagtattaagagctaacatatttaattttagtgctccataatatttcaacttaacccttttttttttgtttttcaaatctgaattttcttttcggattaatgtgtttgaagttgtgtaaatatgagatttattattttaaatgggttcatatatattttggatgactatttttttatattttccattgatgcatatcatatttggaggagttgaacaatggaggaaactcattttcggatttgtatttaatgggtaatgttttttgtgaaaatagatgaaatggaggttggaaattgatagagggttgaaaatggaacaaaacccctcaaatggcatcgagtttggtggccggagatggtctattcgactaggtcacgagccgggtcgcgattcaggttgcagacctgcagacctgtgtgtgggtttttgggtgatagggacgatacaaaacgacttgtcatttcgcctctgtcgggcaaacaacatgtcgtttggtccaatgctgaagcccccttagccgcaaacgacgggttgtattctgacccaaattttggacgtcgttcggccgaacgacatgtggtttcttgaaaacgataagtcgtacggtcaatagaaaaatgtcaggcgcttgggggcgtgtgcatagcccattttgggcccttttttttttaccattttgttccatttttatttttctatcatttacttgtatgcacaatactaattcatgaattttattcatatttttggttattaattttagtattgtggcataaattttttgtgatttttcttaacaattagtgcttattttcttacctatcgtaagattaagtatgtaaaattatttagtaatgaggaacatttgaatattgtatattcctccaaaataacattaagatcctaataagtaattgattatcctatggataataattgcttgctaaggatgnnnnnnnnnnnnnnnnnnnnnnattagatattatgaatcacaatttttctatcctttgatagtaaattaatgtatttgattataatatttaatagatcgttcttacctgtgtatgagttctattttatttaatttgtctaagaactctagcatacatgataatcatttgttattttacgataaaataaatgagaaaaagagcacaaatgacatgattttgttataacatgcatttaattgttatttctcttttttctcattaaactttaagcattccaagaacctctgccatgttgacactaaatggaacaaaccacaaacagtgggtagaatctctcatcttgaaattgactcttatgagagtggatttggccttgagaatggatgcatcgcctaaacttgttgatgatgccactgaaaaggataagaaatcct

SEQ ID NO: 21085 - DNA, 2235 bp, Cannabis sativa
tatcatatatacttagtatttatcccattttgaacacatcatcacatcttttatgagaaatgtcctaattttgttcctaataaagagattataaataattaaatacacttattttcatttcaaaaaaacaaaataaatacacatttagtttgtttgagattaaatatgtgatgcattcttatagctcactttgcaaaaatttattttaataatgtgttaaatgattgagacatagtaaaaattacgttaaatttaatacataatataagttgatgtaaaacttgtatcactataaatttattaatgttttattaatttttatataacattaaatttagactttttataataataaaattattattattttatatttttaataaaatattaaaaaaaataattttttttaattatatataaaaaaaattaatttaaatatatcacaaaattttatattatgctaaatatagcataatttttatattaagtattgaagaaaaacgattaatatagtttttcgtccaaataaaaccaacaaattcaaaatataaatatcttatttatttttattagagatatatgtttttggcatttagttattaaatgataatttacacattaggaaacatttggcagatcctctagctttgtttctatttaatttttattagtaaaaacaaaatagaatgtgtcctcttcttaactctatatctaaaagatttttttttttattttccctttcttaacaacaattgtccatttataaataaaattgtaattacaaattgatttgaagagatgaaatgttgattattttttttaaatatttattaatagtaattggaatttttaaacttagctatttaaattttgaaaagaggcaggcttgcattaaggagaccctttatttatggttttttttggtcccatttttttttttttttttggttttatgggaaagttttatcttgttcgatttaggttgcggaggctcgtggtgatatcaatggccttcgatttggtatgaatggagtacgggtatcacatttatttttctcggatgatagtattgaaggctaatagtgaggaatgccaatgtttaaagtatttgctataagactattctgaagttattggtcaggtagtgaattttttgaagtttgagatatgctttggtagtcgagttgattcccattctcatggtcatcctttggctggggagaaaattacttctcattttgagaagtacttagggatgtcgtgttttgttgggcaaaagaagaatgaaatttttaagtataacaaagatcggatttagaataaaattcgatgatagaagcgatctctctttttctcagttgggtaagaggtgttggtaaaggttgtcatacaaggtatgccaatgtttgctatgagctgttttaggttctaaaaaaattataaacagtattcataacttagttgttaaattttggtggatctttactgaaagaaagcggaagatacactggtatacatggtaagagaaaggagtgggggagggggtgtcttgggtttaaaaattggggctttttaatcatgccatgttggtaaaataggtgtggccgctgttctgaaataatagctcttcgatccctcaagttttgaagcattcttatttttagaatggggatgtgttgagtgctaaggtgggttcttgtctgtcggttgtatggaggagattattatgggggcatgagattatcttagaggtatcgatgatagggttgggtgaacaagttcgtattgtggaggatcgataagtgcttaggcctacgaatttctcttttttggttaagcctttgttacaaccgagtattaaagtggtggatctacggttggtttcgggggagtgggatatagagttcttgcaagctaattttgtaataaggatattgcccttattcttggtttggtgcatggatctttggattttgaggaccatattatttggtattataataagaatggtgagtattttgtgcaaagtgggtattaagtggtgattaagaaaatgaaggtggaggaaagttggaggtgagtatggtatttgaaggtcccgttaagatcaaacattttatttggtgtctttgtcgtaggtggttgtctatttttgaggtgctacgaaagcgtctgatgagagaggtagtgcggtgtttgttaggctaaaattagtctaagtttcgggtcgtattt

SEQ ID NO: 21086 - DNA, 5955 bp, Cannabis sativa
  modified_base (223)..(229): a, c, t, g, unknown or other
  modified_base (5904)..(5905): a, c, t, g, unknown or other
aaataaaagaaataatttatttcatatatataatttaaaaattttcaaatgtccgcgcaaagacgggttgtttactaattatttaaataaatgagtataatacaactgaaaggtatttgcaaaagatttttataattcagggaccttagaaaaatttaaaggcaaaagcctacaagagtctaataataataataataataataattttctcaaaaaaaaaaannnnnnnaataataataataaaaaaaactgacaatataacagaaaattagcagtctggcagaaaaaaaaaagatattttttaaaaaaacaataattattattctatataatattttaataattaaacacgatccaaaataatccattagttatatatatagcgtaacaaaaagatgaaatatttcaaaaatatattataattaatagcaaaataatatcacaccctttgagccctacccgtatattatttagtataaatactactgtactttattattagttctctcctactccagaatcattaatactaattaataaaaggtacatttaattagttttggttgattaatagtttgttggattaattgattttttttttatttattttttaaatttgtgtgtataggaaaggaagatcatggggaaggaaaagaatatgttaattcataataaatctgagtattatattcagatcacaacttccaatccttatgatgaaattattgaagagatatggcctggtgcttccaaaagtatttattttttaactaagcctgtcctcacttttaactttggtggtaaatatgtattctcttttgaagaaaaattaaaaaatgcatcacaattaatagttgagactcataatgatggaaagctcatcctcaaaatcaacaacaataatagtaataagattgggtaagtattattattttaatttgtagttatattaattttttattaattacatttttttcttaattaattgttacctctttcatggtgttttcatcccataaaaggaagaagaatgacaagaacccaaaaaagaggtacttcattttctcttctaaattttatagttttcttttccaaaataagtataatattcatattcacttggttatttaactttttaacttttaactgaaaaagttaagttattcgtgtttgatactgtatttttttttctttagagaaaaaaccacttttaaaagctattcttgcatttggaataaattgtataatttttaatttactcgtgtttaatttttaagaacccaaaaaagaggtacctcattttttttttattattatttatcattttaatatatatatatatataattttttttagtgttcttcaattttatccacataagtaacaatatgtaagatgaatgagaaaatctcaaaaaatgagatttttttttattttatattgttttgtttagggtgacactttgcggtcgtgtctgtcaaatatatctttaatccgaacaccacttatataattcgtttataaatgaatatgtcaacccattaatatattaatatttaacaagactcaaacttatttaatgaaaacctagactcgctaatctttgtatgtattgtgttctaaccggtttggccaatgtattagtttaatgttgaccatgcttagttattcagcttatttttaagtctttttttccctaggactaaaaagtggtgtttgttagtgattaagtgcatttttttcttctttaaaaaatcacttttataatttttaagtaatgagtttattattattattattattattattattattattatccacattatttaaaaaaaatcattaaaaataaaaatattaatatattaattattcaaatgcatagaaaataaatcataaattttttatatgctttttaggtattaaataataattattatttgcctaattaattttcttaacttttgtcagccagaataataataagagtgatgttagttcttgggagagactaagaaattacatgaagaaagtttggaaataaagcttgagagacaagcaatcatctatgctatgatgaattgaggtacattaattaattaataattaaataatttcttatgatttgttttgtgcatctaaatcttatagtcagttaatcaaagagccacgtcatttaactacgcgtgaaaaaaataacaaaaatatgaatattttgaagtgcagattctaaacaatctaaataatttataaacatattatattttattttgagtagtgagaatacaatagacttgaatcatagtgatttttttttttaaaaaaaatcacacataccaaccatatataatattaactctacatatcaattatatatatatataattaatttattaattagcgtcctttctttttgtaggtgcaatattcttatgatcataaggacaataatggccgagaagttcagtttgttacattctttcctaaaatatttgagattttaatatttaatatttatttatttatttttgaataaaaagtttgttgtgcaaaattattataaaaaatattgttaattttgctttcaattaattatatgatgaaaaataattcaattttgtaagatttgcttattaataaatatttttgtttttgaaaaaaaatgtaaagctgatataatgcaaatttaaaagtgaggtcagtcttagcagttgtattttgttcaataatattaaattttaaaatcatgtaaaacttcaaactttgatattctataaatatatattaacaaagtgagtaactattctactaaaaatttactttttactcttaataatataaaaaaataaaataaattaatattgtacatcatagtctctagctggttgcaaactgttactagtaaccgaaaacaactcatcgctaggaattgattgcacaacagctttgagaagaatttcttttctacctatcgagaagattttatcattccaagcacgcatgagcttccaaattttctctttaacatcactgaacatttgttgcttatcccgatctaaaaatactggcaaactaaaatatttttcattgcattcacgaatggacatagatagttgcgtatggaagaaaacttggattgcgtagtatttggtgaaaaagacatgactgatttatcttggtttagaacctgtcgtaagacacggtggtaaatatccaaagcacgcttgatagcaaggcacgaactctcatttgcattaacagaaaagtaagttgtcgactgcaaaaagtaagtgagaaatgggaggagttcgcctagtgagagaataaccatcaagctatcctatattttcttcatgttgcaggagtcttgaaagactttcagagcaaatcaagaacagaagtcttatcacctttattccaaatattggaatacatgcatatgagctatagaaagatagagaaacaattccattcgaacaagataaacaacaaaccacccaacttatcagacatcatggtagctagcttgaaaaggtttgtgcttggagcccataaacacactctaaaacgtctttggtttaactgattagtgttagaatttgataaggtacatgagtttccatctcaaaaccaattgacaatgggaagaatagtctattcattttatatatatatagtatttattcccacacattaacaatatagaactaactctaataattagaccaagacaattaattttctcccgttaagcatctagacccaatactcattattcttcttgaataagggttatgtccttattaaaaaaggcaaagataagcatgtggctgagtttgtgtagagagtacaagcagggccaacccaagcattgaacagcttgggccattgcacaaggcccctatttttttaaggcccatttatttttttaaagaaaaggcctattattttctttttttttttcctattatatatacataaataaaaaatttataattgaaaatttatgaacgaatcttgaaaaaaaaactagtaatagaattgtaattttaatgtacacggtttttttttttaaagagctcaattttaaaattatacacaaggtccccaaaatacttggaccggccctaaggacgtagtactcatcatgtcccaaaccctctttatcttctttatgtgtgacctataaccaataatacatgttatgtaataattaaataataatggcatctaactccgaatgagagggtaagtgaaagaaaggagaacgaaagcttaagagcccctttggagcttgggacaaatggtgagattagagacatttgttcaacaacactaagttgggcacaaacttaaggttattggattggataattatacccaatgccttaaaattactcacatatcacgggactatattatcccaacaatagtaatttgtgaaataagcatttatttgtatctatccacttctaatttctaagaagtttctttataaataagtacatcaatcaaataagatatgcaatatttatcaaaataaataaataacatttgcaataacggcttatgttgcactagcctatattgagacacttctttctatttgtgatgctacctgctatgaatttttttgatctcatttcaaactgaatcaacaacttatgtcataaacaacaaaatttatttatatattattaaaaaggaaaatgaataaaattgatatttttaaatttttaatgtccattatacaataaagaaggataaataataataaaaaaacttatgaaatacagttaattttcatccgcatctttgttaaaacaaaaacgaacacaaatacaaatacaaatgtatataaaaacatgtgtgagactcagatttgtattggttatagatagaaagcgtaagattgttgtgttaacaaaaagcttaacataagtgctattctagagtctagaattagcacctttgtttgagggaatttggagggcgtcgtaatgaccaaaaccgtgataaaggactctaatggggtttccatctccatattcttggccatactcagcaatggtgattagcccaccagcttctctgtcatgcatgtacactgtgattggcatcctgcaaaatcatcatcatcatggctttcatcaagtcaaccccgaaacccaactctacacactcataatcacgaacacttacacggcatacaatttaaataccgccaatcaaaataatttggtctcacagcagtatgatgagtcattttgtatgtaaaaatacaattgtgtacctagtatcactctaattatacatacaaacacccaacaacgactaaccaagtgagcgatgcacacaaatgaaaaagagccaatgccaattgcataatcaattctttgaaattttacttgtcttcaactgtgaacaaaggatctgtgttttgaaattttacaattgatggctttttattttcagcttttttttttcacaatggccaatacaacttgtcaaaatcatttcactacaatgtatatatatagtccaaacagctaaagaaacttagcaaatacaacccttccaactgaataaaaaaataatgtacatttaaatagccagaagtgataacaatttatcctcttcttgtacatttttttcttttttagagttgtgtactgagaaaaaataaataaataaatctgaaagttcaaacttagacatttgtaccgtaaattttaaatacaagaaagaaaaaaggttaaagacaaaagtttgcattgcaaattcaatagagaaaaattatatggaaaccccttccaaaaataattttttatattaagcagatagaggaaattacataaaatatggcattttttccttaaatttcataaatatggaaaaattagnnatttacttaacttatggcttttttacaatttaagttagttgtatggaaaa

SEQ ID NO: 21087 - DNA, 4042 bp, Cannabis sativa
tagtgtaataaccgttacgttgcatacatatataaatataggctaactaatcagtcttggaagcaagaaaatcagcgaacatgttgggagaggtggggcatattcttgggcatccaaccaccttgtatcggcagagacaccttgggcacgatgatctgtcgcaaaggcaagggttcccgcaagttgatgggcaagcgcctcttctctcgtctgtgcgagtgcaactcagcttcccatcctctccaactgtgcaatcacagctagcacatttcgttggacctatttacaaaacacaaagtaattatcaaataatatataatcaaacaagattcacatatctcatttttatatcttaattaatgagtgtctaaaaaagatgaaaaaaataaaaatagaaaggaactccaattatatttgaaaaaatggcccacataaaagataataattattggggatattcaatcatcatggctcgaagaaaatccttgttgggtccttccaacaacgaatatatgtatataactactttaaaataaaaagtttttaagttaaaacaagaagtaggagacactcaatgatattatagatgcataccaacagcgcactgataaacactctcagattctaaggaagagtcaagggtagcatgagttgtgatagtcacaacagccaacaggaacagcaccaaggaaagcttgttgaaggccatattatcgcttcggacgtggaatgtcaatatttgatatgcttagtattgataatatttgggatgccttaacctggttgcttgatcctatttatagaggcttaagggataaaatcattattttttcccattcacagattaacacttctatctagtccattacttaatttttgaatttttaagtggttaatttaatatttaatttgggcatgtgagaaatgtgcctaccggtcttccaaatttaataatttatatattaacaaaatagtacaaaggaatatgactcttcagcaaaataaaagacaaaaggccttggaagaaagaaagtattgtaatattcaaataacattttctaagagagattattctatcaaaaataacaatttataaaatatatatattttctgagagaaaaaatatgggagtttttttttttttttttttgaaaggagaaaataatttataattgaattgtttcgagactaagtaaaaattatatatttatagtaatttaatgtttaagttaaaaaaaatctaaatttggtttggttttctcaaatcaaaaaaataaaaaaattgaaaatattttaaattagaaaattatacataatagatttatataaaattttgtaacatatattatttttaaataaatttacgatattagttactctgataatttctacgtaagttgctatataaaatttagctgcaatttatgtaactctattaattactatgtgaaatttcttataaaattaaaaaaaaatactttaaaatgtaaaaataaacaaaaaccttataaaacaatcctaaatctcttccttttcttacaactccatatatctaaccttcggtaaaagatcatatatctttattaatatataaatgtccataattgacactttgccttattgtgtaaaatatatttagctattaattctatttgaaattggataataataactatctttttcatcttttcttctgttatgagttatattttaattcttaacgttcaaccacgtatattttgatgagctactgcgagaaattagacttttgttgcaatatcttattataattgaattaaaatttgtgtataatgagtgtaattaggtggctcatattttgaccaattatactttggtaatcaaaattagtgtcatgtggattgggatttcttctcctgatattcaagctattcatctagatatgcctttttctttgagaagagaagatgaatagcttaaggagaagtaatcccaatccacatgacactaattttgattaccaaagtataattggtcaaaatatgagccacctaattacactcacgatacacaagttttaattcaattatagtaagatattacaacaaaagtgtaatttctcgcagtagctcatcaaagtccctacacctttctctttatcgattataagttgtatcgctcgaagacaatcagtaacaactcaaaatatgggtatacattgttgtaagccagtccggatgccatcatgtatagcaaagaatccagcaattaaagatgagcttacttgagggagaatcatgactaaagtaaaattgaatcgcatcattactttctcaaatcaccactccactcgttgaaagccccacctcaacacagcagccaacatcaacattaatggtcacagacccctcatcaggtggcacccacgtgtttacttcccagctgcctccaatgtaattagcttgattataattaagcaaaaatttaccacaccaatttaggaggtccccttcctgtaggctaaatcccccatgcactactgagtttctagcattccaaagatgctataaaataaccagaaaaggagcaaacgaatctcgtgaccataccttagctaacagatggaatacagagatgattgccattgagcacagtctttagatctgatctcaccaagcactcctttttcatactttgatactcaatgagaaacactactacaaatattacattttgtgttggttttatactatatatgaaattttatgttttttatattttatgtgtggcaatattggaacgcgacgtttggccaatagaatcacattttctttataatttagtattttaataatagcagggcaacctagatagacattgggaatatttggggttttagaaatgatcaattacccctaggtggtaagtttccttttggcataggcaagggtaaaatagtctttttccatttttatatttttgccttgtagtggattgttttatttgagtaatataaatttaatatattagataattatgttttttttttttttcatttatcaaaaaatcaaagaaaacacaatatcttattctctcttcaagctctctagaaaccagcaaccattgaagggttttttctgcctaattcagagtgtttagtagaatcttgtaggtttcaatccaaggtaatttccctagctcatttctttttgttttttttaagttcaatttagttttccatgcatgatgttaggattagggctctgtgatgttgaaggatgtttgaatttgtgttccgaagttaaaatgatgttgtttgagttgacttcacggtgttttgggggcttggtgatgtttttggtcaaggtttgagctttagagctcaaactttggtctgtaatggtgatttatatttctgtggttgattcttgtttttattgcataaagtatgtttgttgtgacctaattaggaggtttggaaggttttagatcatttggggtcgaattggcttatttatgatgttttttgtgtttcctgcactaaactggtcgatcggttcagtgggacatgtaggaaccaaaattttggttggtccccgaaaaaccccatagatctggtcatttggttggggaaccagtttgccagttgggccagtttagggaaccctagtttttcccgtttttgctatgtttggggtattgccattttattcatcgatagggaaacttctagtttgattttaagtccctgaaaagtgatttagcgtgtcactcattaattttgcaaatactgtgatttaggggccataagtcgtcgagcagtagtttcactcaagttgaccgacacacctgaatttggaaacgaggtaagaattggataatgatatgcatatgtatttacatgtttagcgtacatgtttatggagcctattagattacattgatagcggtatcagtatacatagagttgtactggataccaataaatgtatgttttggtgaagtacgagatcgatgctatcacattggtatgactagagtatcgagtataggctgatattat

SEQ ID NO: 21088 - DNA, 1466 bp, Cannabis sativa
caaattctttacaaggtaacaactcatattaagttatttctacacacaaaattcaattttgatggtaccatattattttataaagtgaaatgtaatgtcaaaatacatgtattagattgcttttttagataaccagattactttataaagcattcaaggggttacctcttttggattcatcaaatattgctaatatttgatgagtatatcatatacatttatcaagacaaatcacatggattaaactatttaatatgtataagtcatggttatttcatatttttcaaagtaagaaatgttacaaattattgtaccaatatgtaagtatagtatgttttccaaagtaacattgtagatttataagtcattattactttagattatttatcttagattagggtaacttaatagctttaatttgtagatttagatttacctaatagtttttattgtttggtaaggtagatttacctaatctcatattcactcttatagttctaggttactttttatataatgtacaaggctcttttaattgatccaggttgctcactatgtgattttccaagcaaagggatttggagtaaaataacactatattcttgtacattttaatattaaggagagatgcttggtggtgtataattcaatgactcagaagaagaataagaaaactattgggaaaaatattgaggcattctctgtgttgattcttttgtttttgagtgtattgacttctataataggagagcagccatagactttaatcaagatccatatacagttgcaaggtctcatcttctagcattaaaatttgtaaaaggtgttgctcaacaagtagattggtaagtaatatgttttatttatagcagttttttattaatttaaaatgttattgtttatttctataaggattttcatacatatttgtagcaataattgtggtgcatttgtaatgtcttttgttgatcacatagttcataggaccataaatgacatatttcctaaattaaacattaccaattgttgtgatggtcgacttattatttgtctttataatcatgctaaaaagaagaaagagaaagggcacaagactgatgaagaggcacttgaaaagcctaacaataagaagaagatgtagtagttttatgttttttgtatgaacataagttggattcttattttcgatgaaaaacattgcttgttttcaaggattaatttctatttgtaagggacaaattactagtatgttgattttgaaaaattgacattatttatgattttttatagttataaataagtaggcttttttttaaaaaaaaaaaaagaaaagaaaatctttacttattcaacacactaaaaatatttctatttatgaggtaacacgatactttataaatcataataatgcaaagctttatttttgtatgctaaaaaacattttgtagtgctgaaatgctattatt

SEQ ID NO: 21089 - DNA, 3017 bp, Cannabis sativa
cgagaatgcatagaaaacaagtctagttgcagaaagttttcagatatcacccaaattttacatatagaggatttaaaaagtaaaaatgcttctttccatctaattttagcttactgactttcagaagaaataacgactataaaaaattaacaatggaatctttatcaaatacaatggtatcataaccatagcaataaattatactgataatgatcaaactacaaagtccggatgaaaattatacctgtaggttatgagcgtgcgctctggcaacaagatcggtaggctcttgtaagtaattatttatcacaggaacaaccgtgtccttccaaggtccgatccccaccacatagttcttaatgaagtctaagtaaggatcagatgtgatttcccaaaatgactgcattaaaatttcattgattaatagtgaggaaggaagaagtaatggaaatgtcaaaaactacaagtacacacatcaattctaaaagcaaagaacaaggtaatgtggtaatttctgtggagaagtccattgtcacacattagatataaaataaatgtctaataaacagctatggcttagcagcgtcaatagataatgaagttgtaccatgcatgatttaaaatgttgctatagaagatttgtatatctttttttgatcttaataacaggagtgtattatttgcaccacaatttatcatcagtatacataagacaatcaagaaatcatttgaattacaatataagtatcttcgagaatctcttgagaatgtgaaaaaccaggaaaacattttaaacatgaagtatttgtcaacaaatcccttgcaactcatgcaaggaaccaatgataatcactgatgcattgactaatttggttcaaggaagaaaaaggaagcaaaaacagaaagattgcagacctgattagtgtcttgagttggaactgtaacatcatcaattaacaggatcttaggcaagtctgtgagattagatatatatacaagtgaagttggagcaaatgactggataaatacaggttgtttcatccaatgtttggacaaatatgaaccctggtatccatacttcttaagcgtctcaacgaacttgtcctcaaatttttgaccacctggccatttcacctgttgtaataaatacaaaaaatgagaggaatcagaaaggttaaacaaaagaaactttgcctgtatgatgtgaaaattgatttatgttttgaggtttacaaatggtaaaaataaaccaacagaagttctaatacaccatcagatttactaatcgaagccatctgtttccttaaaaatggtcaaaaaagatcattcgttcataaatcgatactagttgtttgttacctagcttataacctacttgacttaaaagttttattttaactcacaattaaaggcttaatctgatgctagttgtcattagcattactacaacttttcacctacgcgtgtatttcctttctgttacatgataacttttgtttatgagctcagctatacacgagcccctatattgtactatctgtttctcaaggaatacaacattcagatttcattgctccatactattttcattgtcatggtagtttctataatagcttgaagaatacttacatgttgattgattaaaaccgggttttttatttctgggtatattccaaccactctggatgcatccagtgctatatcaataaactcttcaaaagtaataatagagaactttcctgaacaataaataaaacaaaagaacaattttggttagatgtcatcaaacatatgtctagcatgttttatataacagtctatgatccttcactcagttgatacaaattcatgttaagtctaacagtaaattacaaatttatttggaggtctgtctcaaagctaaagaactaaccattatattgttgatcacggaatgggtacctctgattcacacgtaatgacttcaactcttttaatgtgaaatcaactgcacaaaagaacaataatatccaaaatctccagttaattaagttgaatgacaacacacttattcgtgattaactacagtagctaactataatgacatgcatttcaaatttgtgggggtttattgtacattacacttacactcacaatgcccaattatgcaataaacaaaaaagatgtaaaagggtcaaataccagtgaaaaagccagtaacattgaccccttgaacttcataagtccttttacgatttgcaaaatgcttatgtttagcaacatcggttgtatcatcaagtgtgacatcatggaagcatatgagaaccccatctttggaagataagatatctgattcaatgaagtctgcaccctcttcaatagccctctgcatcaaaatatgtccacttttattttcacattcattcgaaattggctcattgtgagttcaaaactaatgaaaataaatcacaaaaatgttcccaaattcttcatgaatactctcaactcagaataataaaataaaaaaactatgatcgaaattctcactgtataccatatatgcagccgctgtttcttcagggatctccccattggaacctctatgagcgatattgtacggacgaaaggtttgaagaggttgtttattttcatggccggctttgctgggaagcgggtagaaaggccttccagagcacccaacagtgagaaatatcaaaagcccgaatgggaaaacccctgtcgaattcataaaccagaatcaagtacttcattcaaccatttacaaaactaggaagaaaagtgtgtatgacaatgatactttgaaactcactgctcaggataggaaacatcataacgaaaaatgaaaaaaaaatataaaaacgacgaatctaataccatgaaaattaagaaagataactaagatgagaatatggagcttacactggggaagagccatggagttagttatgtttgattgagttgtctcctgtgttttgggctccagactgatctggtttgttgaatcaattattatatat

SEQ ID NO: 21090 - DNA, 2697 bp, Cannabis sativa
agtatttttgtaaagtttgtaaagttttggtaaagttttggtccaaatttggtccaaaaattggtccaaaaacagtatatatgtaaatttccctaaaaaaatatattatttgattattgatgttaaatttagcattgatatgagtactaatagtatccaatatttttgataaaaaaaaatatattagtgtgtaggtacattcaattacatacgttggtttggttattgatattaaatttatgagcattgttattgagtactaatagtgtttaatattttttataggtgacgtcttaagatttattagcgatattttttaaaaattattttcttaaattatatgaaacttaatatttaattacactaataataatataatatctaagaaagtaccctccattttagcatttttataaatttataccattctttgggctaaaacttatatatggattacaagtgtagtgatttttcaacaataaacaaattttctgccactgttgattatgaaaattacaaatacataaagtcatattcaaaagatatgttttttggtcttaaattcttgcattttccaactagtaattgcaatttacttaagcacgtgatatgtttgaaaactagaccctagcctatatatatgcaacctacaataaattcattgcattgaaacttgataaatatcattcaagaaagaatctattttatgagaattttgggatcaacaaaagaaaaaaaaaactttaatatgaagatccatgcatggtctcaaatatcaatggtttatatgtatatataaaaaaaaactaatgaaggtatgaaaaagttatggtttaaaagggtaaagttgaagcatacatattcttggttcactaaatcagcttaattaaaatacagacaacgtgaaatctcaaggctcttattgttcttgtacatattatatagattgttcaatttggttcaaatcaactattagtcagtaataattgacaacaagctcagtgatttgacatctttttaatgtttttattttcatttaccataggaatcattgactatattcaaagttgggccattgggacttactataagtacaaataagcaaatttccataaatttaaataattgtggcttaataatttgagcttattatatcccagacaatttgctcatttgaccaaagggaaggccaatgcatttaagtcaaataattaattcaaaaaatatagccaaacagaaagtcatagtctgtggtgggattataggatcattcagttggatattaaatgattcatcacattcatgagcttatctagtttatctatttttctttttattattaccaaaaataataataatggtcacacgtaggggtagggatatacatgattcatcacattcatgagctaattaatttaattgtttttactatcattctttcaaattatctatgtatagaggctatatttattttgtaggttagttttgttacgggtttataattatagaaattttgctaataaatttaattcaataaaatatgttggagatgcattttcttctaaattttaagaattttttatttttggttttattaatattattgttaggatgctaattcatctgtcatttttgatttttctttgtagatattttatggacttatcatgatagtttgtagtattggacatgctagctactattcttataaaagtattgtctaatttttttgagagatagtttatctttagtttgttcagaactagtcaaaggaaaacatctttagctagttgttttttagttttgactttggatcttgtttcattaggtttgattttattttatttgaatcaagtgatagtaaatgaaaatttagtatgttattaatatattatttggttcgtacagtcattctaatacaatttattttttggtttttgttttgagttgtctcaggtactatttcaggattacaagctgaagctctaacctttctagtgcgtcgcttgattacgttatagttttattgtctagatctctgagacaattttgtcctatgtggctcgcttacttcatcaactcatgattcggcaaggcatgtctttcggttagatgatgagctatcctggttcgaggaggtttttgcgtcgatagtagatatctacatcgtaaattcataagtgtttctattcgtcaaaaaaatgtgtaattattcatttgtggaattatattatattttaaaaaattttacacaatacacctagaaattaacctttttctttagaattttataaatttttttttatatatttttacgaacttttttcttttatttacatttttacaaaaaaaaaaaacaatcttacaaattttcacttgtttttttcataaaaaaaacgttgctttaacattgttctaaaataacgaaaaaaataactcttactgttgcaaaaaaaaaaaacatgttgctttctcataacagcaatgtcaaaataacatttttttcgaaaacaatagaaaaagaacactatatttttgtaaaaacataaaataaaatcagtaaaaaatatatatataaaaaatagatccgtaaaatataaaatttttcatttttatatattaatgaaataatctctatattctattatgttaaatgttatcaaatttcatatataaatacaaaattaggatattggc

SEQ ID NO: 21091 - DNA, 6233 bp, Cannabis sativa
  modified_base (1771)..(1785): a, c, t, g, unknown or other
taccttttatctttatgcccttcaattcatttattaatcgtcaagtaaaagttatttgtgatccgagggtttggaaatatttgataatgggtttggggtttcatatttttgtgatcagataagatggattcagtgaaagatgttcttgggaagtgggggaagaaggctgcggaagctaccaagaaggctgaggatcttgctgggaatatgtggcaacactgtgagttattcgtcctattgctttgttttatttggagttcatatatacgttgttcatcttcgatttattgtcatcttttaaacatccaagttattgttattaaatattgtttcccaaattctggttttaggagaacaaattgtacttattacgttcaagaacataatatattacagtataatcttgctaccatgtgttagttggctgtgtagctgaagtttatttatagactttcttttgacttgaaaacaaatgtcattcttaccgtaaggaaataaaataaaataagaaaacaagcttatctttatttataacctggttcaaatgtggtgatggtgaaacctgtgattcccactgtttattttccctcattgtaaccagtgaaaacgggtcctagttttgctgatgctgctgtcggaagaatagctcaaggaacaaaggtgcttgcagaaggtggttacgaaaaaattttccgacagaattttgagactgtccctgaggaacagcttcggaagacttatgcatgctacctatccacttctgctggtccggtcatgggaattttatatttgtcaactgcaaagcttgcgttttgcagtgacagcccactttcctacaaaactggtgaccagactgaatggagctattataaggtacactctgaacataatggataatttaaaacagttaataccatttatctgctgggtttatcttttttctgatgcttgttactatgctttcagtttcttttttttgatgctttcagttactttgttcatgcttgtgtagataggtttgagctaaaacctgaaaccaatagataaatcattgccattggaaagtggtttatgaaagactcgataattatatgtcttaagataaggttttcgacaagtcattttatttttgtttaaacaacactttctagctctcaatattttttttaatcaaagatcaatgtggaccttgtggataatactttatatatctggtttaggagatggtgatttgggttagttacaggactaacgaggtttaccttttagatttttttcttccctctttcctttttttcttactttttcttggtaatttttttgtttttcaattttaaatcacaaaaatgaaggtagaatttttgtttttcaaaaaatgtgctcattacatttttaattttttattttaaaaacaaaaaaattaaaatgtgttttcataaatttcattttattttggtgccgtttggtaacggttttgttttctaattttttaatcacaaaatgaaagtgaaatttttatttttaaaaattttgtttttgaaaaaaaaaatacgttctgtaactatttttgtttttcaattttaaaaatagaaaataaaagtgtgttctgtaaagttcattttcatttttattttttgattttatttaagtcgggtctaggtctggggttagatttgggttcgagtcagagacctagttcaacgctagggctgtggggaggatttggatcgggtctggtcggagtctgaaatattgattaagaaaaaaaaannnnnnnnnnnnnnnttgaaagtgactttttttttgtttttaaaattttgattctcaattaaaaaaattaaaaaataaaaaaacatgtttttgaaaaatatttttatttttctaattttaaaaacagaaaactgattaaaaaaatgttactaaacgttacctttatgtttattattcaagtaaggaatgagaaattaaggtgagaaaaagtgggacagggtcagaaatatattcatttttgagcaaatataaaaatcaacacaacaattacaattttgtttagaatcatagttggagggaaaaatatgttttggtgtgagttttattgggtatgtttggaggagtgagctaaaattttaggaatgatcacctaaaattttataaaattaccctatttttttttgttttttttttttttttttaaatatttactccagaaaaacaggctaggaactggtatatatactttcaataatttctcgttgctcttaaacaaagaaaaagaaagttggacgtttaaaattacatacatttacatttttgtcagttttgagtgatgctgtaaatatcgagctggatttttttgatatgacatgaaattgacacccgaccaccaggagaaagatatgggtttgggcacgacatagtataatactatgatacgaaaaaaattaacttaagtacgacacgacaagcctgaaagtatagtacataagcatgaattaacttgtctaaaagtacaacatgttaaaaattcttataatttaataatattatttactaataaatattcaaaatccaatcattttaattaattttttatataattatgtgaactattgttgaaaaattatgaaaaatacatataatttagtggttaacttattaatgatagaaaaataatagaaaaatagagttaaattcgagcctatagaaaaaaatagactaatccatttataaaaaatgagttagtttgaacaaagtacagtatgaaaatgcgagtttacggatagtgctaaccttaccttttaaaatattggcaggatttatgttattgtgctgcaaccattttagaaatttaaaccgtaaatttgaaaaaaataaaaataaaaacagtatatgggatgatttttttttcctttttcttagtgacttttttttttagtcacgttggctgatttatcttttatttctttctttttcttaacttttgttttcttttctctctctctttatttttctttttcattttttttctcgatcatctctctatctctattttttttctcactattttttttttatctttttatacatataatatataataaatatacatttttatatcttatttttcatactttttttactttcacaaaattttattttataattttttttaaaatacaaatttattatatttctttgtttttttttttacattattttatcatttacactcaaattatttcatagtttttttaattaattataaaatatacaaaaaaaattaacatttactaaaacttttatactttttctcatatttttttgatactcctctctcttacaatccttctatatctttctctcttttacattaataattttttttttttggttattttgtagtttatttggagttgatttgtgaatgatttgcatattttaataaattgatgtcttgttatttctctattgatttattgttgtcgttttgttattttatagtaatttttatgttgttatttatgtgttttataattattttatagttatttttatgtgtttttttttgtaaacttgttaatttttgtgtattttttatggtgtatatttttagtttattatacaatttttgttgtatatatgtatattagttttgttgttttcaattgtttttaagtagtttttaaaatatttttttattcaataaatattttttagttatttttaccgaatatgattattttaatttcatacttttttcatttttttaacattattttcctctcttacaaaacaaattaagagcactcttatttttttttttcttttacgtgattaataaaaatagtattttttttatttttatattttatagtttattcagaatttatttatgaatgatttgtatattttaataagattgttgttttattatttttctattggttcatagttgtctttttgttattttatagttgttatttatgtgtttaataattatttttttgttgtttttatatttttttatatagttgtttagtttatgtgtattttttatagtgcatatttttagtttattccatacatttttttgtcgttgtttatatgtgtatttattttattatttttatgttaattttttagttatttttttattcatgtgtatctttttatactgtatatttttagtttctttttttttttaattgtatgtgtgttgctttgtaatttagatatatacttagtttatttttttttcacacgtcttattaaaaatacaatgataagatttttcgtttttttaataacataatgtcagtagtagatattaacatattaattatatattattcattatgttaaaattataaaattttattatttttattattaatgtaattatttatttaagttttaaaaaataaatattatttctaactgttattaatttaaaaatgaaaaactaaaataaaaattaaaagtatgaagttgtaataataaattttataaaaaattaataaagtaatataaaaagataaatcaactaagtaaaaaaataaatttgtaatataaaaatatattgagaaaatatattaattagattaatattttttttttgacacattttattaaaaatataataataagagttttcgttgtaaataatagatattaatatattaattacatattattcattgtattatatactctcatttaaaattataagattttattatttttattgttaatgtaattatttatttaatttttaaaaaataaattattattttgaaatgttactaatttaaaaatgaaaaaataaaataaaatgtaaaagtatgaaattgtaaaaataaattttattaaaaataatttaataatataaaaagataaatcaactaagtgaaaaaataaatttataatataaaaacatattgataagatatatttttttttttgcatattgtaattagattaatattttatattttttaattgttttgtaattatttttttttgttattttatagttattttcattttatttgttatattattttagaatttttttttagttgttttagttgtttttaagtggtcttttactttaatataatatttttataattttaaaattttaacccacagtattaacgtaaaagaaaatgtgttacaataaaatgacccaaaaaaaagggatttttttatatttacatttcaaaatagttttattatttttttttttatatttttacggaattctacttagaaacctctattgcaactagcactgtaactatttttgaaactcaaaccgtaaataaaaaaaaaggttaaaaagatagtatatggggtaattagattcccataaaaagacttgagataaccttcttacgagaaaattacactttatatcctttttatattgtcctcttttatttttactttttttttttaaagtttattatttttacctctttttttaaacattgtactaattttgctcctgtcacttcaagatactttccataagttaaatttaattaattgattaataaaagtgatatttttcaacattactcctaaccttactacgtagaataagacgggctggcccactgaattcataaatgaatgtgggtatttgggtgtagcccgtgaaactcaattttcacgccaacagcagattgtagatacgttgttcaatactcaaatatctctgtttgataagagagaaatttggaagaatgaaaagggttaggtggagtgccaaaattatatggcatgagaaaatggtagggagggaaaaatcaaaccttcaacaaatgaaggattttataattagatatttttttttttgtagaaattaaaattacatacatattcttaaataaaaaataaaatatatattgagtaataaataatttaataattttgcttttaaaatttaaacacatccttatctcttcggttctaagaccaaacaatattaagaaaagtaataatccatctcattccatcccaccctctctttcctttttaaactccccatctttcgaatattcttttcttcttatcaaatatagcgtattaagaaaataacagaaaaaggaataatattatgtgacgcaagagaatttttagtttatgagaaattattgggtggttttttttttaaataaaaaaataataaattattagatgttgtcagcattcatgtagttagttaa

SEQ ID NO: 21092 - DNA, 2782 bp, Cannabis sativa
ctctctctctctctcttttaaatgtgtttcgtgagcatttttagctattgagttactgttttttgtggaaatttcaaatctttaatactgggtttgaattgaaatgaagctatattaagaaacttcagctttaatttctactactcagggtttgttgcatcctttgaaaacactgaaaaaacttctttcttagtactctctctctctctctctctctctctctctctctcactatccgattagaaaatcagcatgtttttggtattactacgtcactatctgtattctttaggtaacgtaatctgggaaacagttggatttctctgggtaatactttgccgtagcttatagttggtggatctttcattctttctaacagtcttgtacttttcaagatatgcattttctgtttatttcatttgataactttactacatagtagtagttgttttcctttatactatgtttggtgagagggaaaagtgagaggatggaaaggaaaggagggaatgagagggaggagaggtcgaatccccttgtttggcaagaaggattattggaaggaaaggaaagatgagaggataatgaatactcttaaatgtacaattttgattccttccatttatagaaggattggtactctccattcttatttgttcaaaattagaaaattaccctctaaaaaaattattaaaaaattaatttgaaaataatttagttatttcatagatgaatagtgatctatcattcaatttctctatctctctactttttttttttttgaaaataagggtattccatttctctatctctctacaatgtagaggaattactactttcctctccctcctttatattttccatcttctcttaactattcatcctctctattctccttccaccccaccaaacatattgttaacggctatatatttgatcgtcgcgaatgggtaccacatagctttctttggtttttttggttaatgtatcttaaagaagagagaatagaactagttcgcatctcatttgcataaatatcgtttatgacataaacatttaaacaaagtttctagctcttaaaatggccaaaatcgttaacactgaatcatgatgcgtttactgcagtcaagttgaatgccaatcgcatggttgttgggactcttcgggggttcgatcagttcatgaatctagttgttgacaacactgtggaagtaaatggaaatgagaacaatgatataggcatggtggtgagtccctaatttcttccttttatgccttttctgttgtcattttatagcttttgtttttttggggtgataataaacttgaccttacgggactgatataacatttaccattacaggttattaggggaaatagtgtggtcactgttgaagctcttgaacctgttgccagagcacagtgaggtgtgtttttgtagttggtactagtaactatatgaattcttggctggtattagtttggacatataactgttgttatgggaagaaaaatgttttgtaattttggatttgatgttaattagttaggttcgttatacaactactcctttcccatttccagcatttatcctagtattgtactttgaatcagatgaactagctgtgaattcttacttggcttgtctccaatcacaatctcttaatgtaattgatgttttcttaaacgagctttgtttcaaagcactcttaagtttacttctccgatttaatatttattctgagtcaaattattctagattgggcaaggtttcgcgattgtgcattataatccattataactaatatgtttgatagggtggaaggagaattatgaagataaataatataaacgagggagaggagagtagtaatccctctaaactgtttggtagaaaagtggaatgatagatcactattcattcatataattactaaattaccttagtaagtatttcttaataaactaagaatggaattgagagtacttttattaatgtaaggatttaaaattgtacacatgagcaagaggaattgacctatcctcctacttaattcccccatttcctttcgatccttacacttttaccaatctgtgtaaattaagtgctgcatatatagtatcgattatgaaattaataggcgtgcaatcttatcgagtctgtctgacatttcccatgttggaacaaaagagattttggaatttttgggctctggtgagacattgaatttccattttattttattttattttttgtcatccaaattgaaagattggataagatacaagaatggaaatctctcttttcttaaacacaagacataagataaggggttcatttctcctttatttttctttagcattgcaacttttaatttgaatttcttacaaactttctactttctatctcccaacggttgtcttctattgaacttaagctatataaagtttcttttgcagtgttttttttcttttgcagtttgataccaacagatcagctggctcgatctttcttattttttttaattattttctaagaagagataaagattgatgataataacgattgtcacaagtgcaatagtagtactggaccagttagtacaggaagattctttgctttattagctgtggtttgaggctttgagcttgtactaaaaattgtttcttttgcagtttgaggtaacggtacatgttatgtatgtatatatatgattcaaagctcagcttggtcattgttctgtggacccagcactacttcctttcctctttcgttttaaag

SEQ ID NO: 21093 - DNA, 3214 bp, Cannabis sativa
  modified_base (3180)..(3188): a, c, t, g, unknown or other
atgtatatatattttaagcccaaatgagtcatgtcaaaagagtaagaacgaaaactaaaacagggtccatgactgattgcagaacttcaaggcaaaaagtggctatctttcatatcagtaagttaaatagagttcttccacttaattaaaagacttgcttaaatcagatatacagatgaaattgattaaccccaatttatgatagtaatgaaatttagtaccaagaattccagtatagtaagagagaggaatatcagtggtatgttggattttgaaaaggccttgggttgagttgaggatggtgtactcttcccaaccggtcatcccccaaacgaagtctccttcgttgaaattaggatccccagattccaacactttacacacaccatacccagtgatgggctgcattcattcacattattcatacaaatattataacaagataagagttcaaaaaaagaaaaaacagaaagacagacaaacagagataatgagatatggtatactgactgaaccaggtttgaaagaatcaacataagattcacgttggctcattcggcctcgcatgtagggatcgcatgacaagtagagattcttaaggaggactcctttggaggattggggcagcttcaatttgagagtggaagaagtgatggccatgtctgattccttgggaaaacctctcacatagtccttgagcaatacctgcttgttcttcacttccgccattattgattgctcccaatcccaattcccaaactacacagctcggtgagacccgtctttctattcttcttctgtattctctattctctaattccaacaatggcctatgattagctcggtgagaccagactattattattgcttctcctaacaaatcacataaaaccccaaacttgatttcaaaaaataaaaaataaaaccaaaccgacaataccattacgtggcacctccacaacaagtcctaaacctttatatccaccaaagtgtgaaaacgtgggtagaatgtctgttcaaataacatatcaacatataattgattcgtcttattaacatcccaccaagccaagcttaataaataaaagaaaaagaagggtcaatgtcttctctgttttttttgtcttaatttctttgtttctgttgagaatgctatttctatctaatcctaaaagttacaaaatgcaatttggaccatatcaagctgagctcttattcttttgtacacttgaagcatggttggccttcgatcaggaagggtttgaacacaatcaaatgcaattctgactaggaataggatcattgaggtgcaggaacattgcaccactcaagtttgatatcttgggcgtaaaatagatgtggaggtgatgtttagatgaggcagtaggatatgaatctgatggtgtaaccaggcaagtcctcttgctacaccaacaccaatcttaagcctcaaaggccactccatttccttagtagccatatcatttgagatgtacttgtaaaccagaatgtacgctgatgtggctggcattggcattggcaatggcatgaagcagaagcctaggagtggaaacaagttgatgtgtctcaacctgcctacactctttaacttagacaccagggattgtttacaaggtttgttgtgtctcttcaccgcaagcaataagggatgatgatgatgattgaactctttccaaagctgattatattgtggttgctgaaattgttggtggctttgaggattccctggaaactcattccaccaactcactctggaatctgccaatgatccatcagtttattatactcttcaaccttcaatttactattattatgtataatattaacaatgttatgtagtactggttctgttgtttggtgcttcgtcattttcatcttcaaattcaactttaactttagttttttcttcatctttctcctcctgaagctaaaccaaagcaagtagtagtaagacataaagaaagtaaaagtaacaaaggcagttagttgacaccacataaccaatcacaaacccctctttcaaatattccaacatcttcttcatctaaatataattgatcaactgatcacttgatcaaaaacaccaaaaggttttgtgatttaaactaataagatgtcgtaattattatttttggttttggtaaagttagtcgataaacaaatgtgcctttgataacttcaaaaaggtttatttaattgatcaagttactaattaaatatttctaacgaatttttgggccaacctaccttgacttataacaagcatataagatttaattttccactctttccaaaaaaaaaaaaaaaaatcatttttctaaataattacatgactaattcatcatatttatgttgtttgttttttcaattcatattataaattttactatttaaacccaaaacaataatagattagttaatgtgcattttataaaatattttagaggcatattttaattgattatattcattttgtatagaattacgtttgttttctacttgtttcagatttaaatggtgaaatataatataaattaaaattagaagaaacatgttaaatgagatgaatatgataaatttataatggaatttaaaattctaagatataatagtttgaaaaattctaagttttggatgctcaatacactctgtttgtgattgaaaatcaagtctgaagcttcaagctaatttttaactataatgcgttcacttttaggaaacatattgtaaataaaagttctatatatctctctttcagttttttaaaacattttaaatcgtctaattctaagcaatatcaaaaaaaatatgactaaaatattatcagtcatcgtactaagaagctcattgctcaaaaatcgtttttaggggtcacggcttggagggttaatgtcgcggccctcatgggtagaatgcaaaaatgagggcttttaaaccctaatttcgagatttaaaagggtttttgacactttttgagaataattttgaaagagacaaaaattcaaagcaaaaaacagctctaaagactttcaacaatattttttcgacgagttttttttctattttattttcttatgtgattatgagtagctaatttttttttttttgaaccactattatttttagctaattaggatttttttccccgaactttgacannnnnnnnntcatgcccctgaacttttttggccgt

SEQ ID NO: 21094 - DNA, 2182 bp, Cannabis sativa
  modified_base (2134)..(2140): a, c, t, g, unknown or other
atgatccctcggccaccacacacatagaatcacctccgatacagatgttacagttgattttgatccaatcttccggcgggggaccaaacaggagaaatattctgtaattttattttataaaatgacagtattttataaacttttgcctaaaattataaaaatcccatttattgaatgtatggcttaattcggtattgttgattaatgatatcttttatatagatcgatcaactcacaaattcaaggtaccacaatttttttagaactagcctagatctgactctaaccgtcacattttattatgaataaaaaaatacataattttgtttagtcatataatccaaaattttattcagattcattaaatataaaaaaaaaaatacaaaaatatagcaacagtctcatagagagatatatagtacagaactaattagcgttgacaactttttttctttttatataatgatgaataagtaaacatatataattagctagttgaacttcatgcgaattctcaaccaaaataattatatcattgtgattggtctcctcattaatcaaaagctaaacaatatatataatataaatataaaatacaaaatacaaatatttcatacatgttatatctatatctatgtatttatgtatatatatataattatgccgacaaagtacatattctcgctccaataatggattggattaagctatatgcatgttgtgttgtttataaccaaaacaacctaaattttaaaagtaatatatttatattaattgaaattactattaattactattacaaaaattaaataaatgataggcacatgactttgtatttgtattaaagagcacatgtgaaactttggaatttaagaaactggataggctggcccacatgccagaatgacaaaaacaaagagagtatttatcttctctctctaatcagtatattaattattcttcaatccatcccaagaaagctggaaacgtttctattatttttttttatatgatatgaaaactgggtgcactgcaggaaatgcaatactcaaaattagtgaaaaatatacaagagaatagagatgtgcttatggtatattagatgttattacttccttgttgagttgccagctcatatatacatgtttggaattgccaacaatgggaccacttattcaacattgttttttaagttaaagtttctttttctttctaaattagataatatatatatgcttctttcaaaaaaaaaaaaagataatatatatatgcttcttaagctatatattagtacaaattatttataattagtaataattccacgacactttatatttgtttatatatatatattaatctttcataataaatcgtttatgttaattatattgtgtaattactaaaaatattctaattatgttggatgttgccaaccatgacaatataaataaatcatcttaattaatacgtaggtatataataactacatcatatgatacagtaactttcaaacatctctttatgtaaatggaaaatgattttttttttcttccaagaaaatggaaaatgaattttgtaattagcaagtgtgtgtaaagcagtatattataaaattaaaaatgtatattatttatatatttcatgtttaaaaacagaaggtttggaagaaaatgaaagttcacgtaacaatagagattacttgacgtaaaagggaaccagccaaccagatctacataaaatggtcaatatgccaaaatatgctaacattagaatgaaataaaattttagaacgaatcccttatttgcattgatttttttcctgttaggttggtggctaacttattgcagctttacataaagtaaaaatataatccttaattgggtatttatatatataaaggacatctatcttatctaatattattatgatgtgtaataatattattggtataatttaatatcaatttttatttcttttattttaataaatattataaaaaattattaactaactataaaatgacttctataaaatgacttcatggtaatgttaatgataaacatcataacaatgctcatatatgtatatattatatactagcaaaaactatgtgcgaggcacgtatactaaatnnnnnnntagtttttttctatgttatttgaaagtgatacaataaaaaat

SEQ ID NO: 21095 - DNA, 3212 bp, Cannabis sativa
  modified_base (40)..(50): a, c, t, g, unknown or other
gttcagagggcattttcaatggccttaaaagttcaggggnnnnnnnnnnntacatgtcaaaatttagggggcaaaaatactaattagccttattgtaatttgtgagtttgtttttcatgagaatgttaattttgtaattttattaatatattaatgtatgaaaaaagttacaatatttgattgacttattattattattattgttgttattgtgagtttttattttcatgagtattaattttgaaagtttaaatagtgaataatattttatttctaatatttttaaatgtacatattcagtggtaagttcatctttttctattattattctttatttttttttctaaataaagataaaaataaaaatgttaatacactatattgttgttgttttcatcttttaattttccaaataaaaatgtatctctcattttttttattgcactttgtaactttacttaatgtttacatgcttatatattaagcaataaacacaatgaattatactttcaaatgtgaatactaaaaaattaaaggctataagaagtattaaatcataatataaatgaaaaaaattgaacctgtaaattttcacattttcaataattcaagtggaaaaactagagagaacaattgcaacacacccctcttacacattatggctctaccaaccaaatttttctttctttcactcattaaaagtatgaaatatcattacaaagtcacaataggtgcattagctttgtcctctgaggatggagccgccaccgcaacattattcttctcaatattgtccgcctcaactttctcgtcctttggcgcctcctccttgggctcctcaacagcctcaaccttaacatcgttgtccttaggtgtctcaacagcattagtggcgtcgactttatcatttgtagcctcaactttcacatcaacttcggcattggacacatcaccttctaccttattggcacccttagtttcggttgagttctcactctcctcgtccttcttctcctccttctcctcatccttgttaggagtttcgctcttattctcaccttcatcaacagtcttctcctaagatcacaatgtagaaaaacaaacacaaatcaatacaacataacatgaaattcaaattcaagaatacttttagttaagataattgtatacttgagcaacagtctcagtctcagcctcagcctcaacctcagtttgagcctgttccagcttagctggagactcgcttgggagagactcgcgctgggcgatgtcagactccttttgcacgctcgcacatcctcccattattgacgaaataaaaaatgtgggacaaatgagcgagtcttcggaggtgaagaggaagggggagaaaggaggttgttgtttcttccctttttttattctcttgttgcaaatatgtgaattgaggcaaagaaaaatagtgatggtgaagggagtaatatagggtaagatagttgtaataattaggagattttgttggtgttcaacctggcatttgtggtgtgatttattttgggtcaatctttgtatggacaagaagaatttttggagggaataagggtaaaaattagttatgacagttagcttattatgggaatcaaatttgtcgtttaaaacaatgatatgttgtcttcttggccatttgatcatcttcgaagtaccaaaaactagacaccaatgacattgacaatgtatatacatatattatttatggtactaataattatagttaaaataatataaaattactatatcaaagcatatgaacctaacttttttttatggttttcttttaagagattgttttttcatatgcttttttgtttttaagaattaacacttaagttattaccacatttccatcaaaatatgaaaaatgaattattaccacattaatttttaaaagactcttgagaatttttgtttccgaactatagcatatgtattattgtgtttttgaaattgtcaacccgttaaaaatagttcccgaactattcacattgtggtaaagtgatcattctatcatgttttgtcacatgtggtaaaaagtataatgatgtaacaatttaaaccatttttataccagttccacgtgtataattaatttgaaaaaataaattaattttttttaatttaattttacttaaaaaaaattaatcattaattgattttagcttaataatttttgaatatacatattattttaaattatacacgtgacgtctatgtgacaatgatataaacatgcacgtcatcaatttgtttgtcacatatgacaaaatttgacagaaggaccactttacaatattgtgaatagtttataaactatttttaacgggttaaaaaatttaagggcacaataatacagtagtaatgtggcagccatttaatatcataatattaataaaataaaaaattaattatagtttttatttttaaaattgcttgataaaggcatttagactgaacggttaattgcttggacttggaccactatgagagaatctgttttaagaaccacatcagcccaccctttacgctttatccaacttaaagcctattcgatcccaattacttcagcaacatcaaatcgaaccaaccccaccttcctaattgaaacaggctcaattagatttctctcttggtcacgagccacacacccgacaccaaaacacatttcatgcttaaaaattgctccatcgacatttatcttaaccttatgtatcacaatttttctccaatgctcatcaccactaccaaaaactacattcagtagaggacctaatttctatgcttgatcatttagtcattggtcaagagccaaccttgccgatctcactacttctaaggcagtactaagcttattgttctaaaagacatcatttctagccttccaaatcctccaagtcaccatagtcgcttcagccacaacctcaccatttcccacactaagtagactagaaaatcaatctgcaaaaatcaaatcagctgcaattttaacaacactcgaaatgctccaacaggaacgagcatagccacacccaaccaaatgaaaaatggtctcaacttcaatgttataaagagggaaaattaagtccacaaaggttcttcaattccttttattaaagaaaaatatatatataaaaaaattctacgattcatcacccacccttctcggtggtggaggttta

SEQ ID NO: 21096 - DNA, 3877 bp, Cannabis sativa
  modified_base (2535)..(2551): a, c, t, g, unknown or other
attttcatagctagctttgctaataagagagaaagctagtaagaacacatctgcacccctataactcaaaggtcttagcctattatagtcctcttgtcctgcaatcaccaaattttatcagcattagcagcagcacttaacttattcaactcaaatactaagaaaacaaatgctcacctgcagtatcccacaaacccaggttaacagtgcttccatcaactacaacattagcactaaagttgtcgaacactgttggcacatagtcctagcataccaaaagttgagaaaataacattataattagtgggataaacttataatgtgataataaaatatatataaacataaaattacagtggggaaggtattgctagtgtaggagataagcatgcaggtctttccaacagctccatctcctacagtgacacatttgatgaatctagcagtactcattttcgagctctctttggttggggacttgggacttgggagaggttagtttcagtgatgacccttttagtaataaggcttgatcttcttctctgttttgtgaatcttcacctccattgaaaatgtagcaagtttagctagagaaaaaaaaaaaaggaaagaaaagttgggaaagagggtatgaatgaagggatgagtatgaatgagggtattgaggtgatggtgatggtggtgagtttgaaatttgaatagaaatggaggggcattgaggtgtgcatttaataagattaagttatgtatcaacccactttagctaatatgtttcctttattattctttttaactttactatgattgccaatggctttctgttcctttaaggggaaggccagagctaaagaccaagaaaaagaggtgtttggtactcgtgttagttggttaagtgtgggacaagggaagggagagattgaatcatgagttttgagaaaataaacattgcttaattaccccaaaagtactatagatgatgtgtataaaaaataaataaataaatagaaaatatatatgtaccaattccaatttaaagcttaattaaaggaagtttggatgtatggagttctatgctacaagggaagtgggtctcttgcatttattgaattcaccctttaagcttagcttactttataattcatctttatttcaaatggtcttatttgtgcatttatttaagagaaatactagaagtcattagtggtaataggcactatataaatgtgttatattattattagtataattaagtattgtgtgccaaataatttaagtggaggttagtaatatttttgtttttaaattacaaaaataagtaaaatttttgtttttaaataataaaaatatgttctataactatttttgctttttaatttcaaaaaataaaaacaaaagtatattttgtaactacttttatttttatttaagtgagaaataagaaattgagattaaaaaagttgatcaaaatccggcactagggtctaggtccaggttcgggacaaagtacatgtttagggtcaaagaatggggctaggtcaggtctagggtcggagtcgaagtcgaattcgagtctaaatttagggtcagtatcagattctaaaatattaatgaaaaaatataaataaaaaacgtggttttattttgtttttaatatttatttttatttaaaaattaaaaaagaaaaatagtttcacaaaacatgttttttgaaatttttttagttaaaagaaataaaaaattgattaaaaaagtgttatatgaggcactttttatttaataatttttataaaatgttactaatcatttataagacgttatatttcggtaatactaagtatctacactgctgataactaatagtaatgtatatttttaaaaaaaatatatatatatatatttacactatttagcagcaaaatccatgagaatttttgttggcaactaaatcaactcaataaacaataacaatatatttattatctactgctacatatttttgagcactcctatcagtgtgtttataatagttataaactaaaaatttagcttaaaatttgtatcacctcatgcatgaggttcttattttaataaaatacattttcacatgtagttatggagaaagggtaagctaatttttaaaacattacaaatagacctaaaaaattatataacatatatataattaagaaagaaattagactaaaaaacttatttgaatgaaaattttctctaaattatatttaaatttcttacaattatatactaaaaaacataaaaaaaaattcttaaaaatatttaatttataagaactcaaatgttgacacgactagggatgcacactgagcgaggaattggcgggaagtgctccctccgtccccattcccgttaagaattttaatccccatccccgcttattccctatcgaggatggggcggagaatcccctaataggaacggggacgaggcggagaatcctctaatagaaaaataaagtttataataaaaaatttaatatacaaaaatattaaactacannnnnnnnnnnnnnnnncacattaattattatttaataaaccatttattatccaaaacataacttaaaattcatataaaaaaatactaatatactaaaaaaatacaaacataaattgcaaaatatcaaatattattataaatataaaataaaatattaaacgggtctccgtcggtgtgggaagtgtgatccccaaacccgtcccatttaacattcgagacaaaaaataatcttcgttcctgtcccattccccatttaggtgaggaattcccgccccattagaagcgagtcccgtcgggacctatccccgttggagaaatgtacagccgtagacatgactccaataataatccatataataattttttacatttaatagaaaacaaatacacaattgattgcaccaaaggtccatgcaatgtaggaaatatatatcaaaactcaaagaagtaattaaaatttatataatagcgtctcctttattgatttatagactaagtggaaagtgggtagctggtattggagcaaattatagctataataattagtttaatttggtaaggcttcattaacaatattcttctataaatgcaactttttgacacaaaaacaatattgcttcatactctctcatgtggtaattaacaatcaatctatttggtatttacttaatacaaaataattaaaaggaacagaaagtagaagtattgaatgaatgaatgaatggctctcatcagtatacgttaataccctgctccacagcacggtaatgaataaggagaaattccaaataatttttaatttttttttccttctgaattaagaaattctaaatgtgagttgctcttgctcctaataactatacatacaaactaattatttaatcatattttagcagcataaataattttttaaaaaaattctaacaactaataaaatatggaaaaatttatagtacacttctaattaaaatcttctagttgttttctaatccattttttcttcatataaaatcttgtatgttgtataataataataataataaaaacaaatactaactacaaatataataaaaaataattatgtatgcaataaaatatttgaattttatttttttgtactttaaataatttggaattttaaaaaatatttataaataactataaaatacataattttataaaaaaaaaataaattaaaaaactctcataaatattaaaatagataagagatatattagaaagattattgtaatgtacttgtatttgtaatgaattaacctttgtaataatcaaatttgtatttttacgtgtgaaaagcgtacatgcttagatatgtatagat

SEQ ID NO: 21097 - DNA, 2525 bp, Cannabis sativa
  modified_base (1405)..(1416): a, c, t, g, unknown or other
  modified_base (1945)..(1959): a, c, t, g, unknown or other
  modified_base (2488)..(2490): a, c, t, g, unknown or other
tagggatgttaaacaacatacatggcagtattctagatccttgtaaaacataatccaacaatcctaactaccatcaaagaatcagcagatgtctttgcatggtgccaaagagatatgaccagattatgtccacatgtcattactcatgttttgaacgttaattaagatatgtctctagtacagcaaaagagaggcccctttgatcaagtgaagtcagaagccttggaaaaagtgttggataaaatgctctcaaacacctttatatgagatgtgtattacttggaatggctggctaatccagtttttgtaccaaaacaaaacaggatgtggcgaagatgcattgatttcatagatctagaaaaaccttgtccaaaaagattgcttcctgttgcctaagattgatgaaatggttgactcatattttggatattatcagatcaaaatgcatgtggcagaccaagaatgtactaactttagaatcaacaagggtgtatgcagctacttagtcttgcccttcgaattaaaaatctcaggtgcaacatatcagcatattgtagaccggatttttaaaaacctcctaggaaagaatatggaagtctatgtggatgatacgtaagtcaaatctaagacaagcgagggtcatgcaaaagatctaaaagaatattttgaggtggtaagaaagtaggggatgaagcttaatgccaagaaatgcacatttggcatcaaattggggaagttttaaggattcatagtaagctaatgaggaatagaggtgagcctagagaaaataaaagccttgttagatatgccttcccaaaaaagacataaagacatacaaagcctgactggaaaaataattgccttgagccgcttcctttcctactccattgacaagtgtattccatttctcaatatcttaaagaaaagttaaaaatttaaatgatctaaagtatgcgaggaataattcaaaagattgaaagaacatatgggcaaacgaccagtgctgtctaaacaagttcacgaggaagacctatacttgtacttattcggctccaaaagtgcagttagcataactttagtccaggagaaggaaaaggtgcaacacccggtgtattatgttagtaaacatatgacaggggctgaaatttgataccctttgatcgaaaagttagctttctacctccggattgcatcgagaaagttgaggtcgtatttcgaaggacacgcaatcaaagttttcacaaaccaccaacttcgacaagaccctctatagatgatatacattgaatagggattaatttacttttacacccttcaatgtattttatccttaaaagacatagctacacacaaatgatattccaggaaactaatgtaattacagaaatgagtactcaaccatttnnnnnnnnnnnnccaagctcgaaggaaatcattattgacttgcatatccggatagaagctatacattctttatctatgattagcgctcccaatcaattgaactacgatgtccttaacctatatgtcacgagaagaaccatttggtcgactttaatgaatagattaaagaacacaaataatgcaactgaactagaacttaaccatctcaggattgacatcatttgatctaggatcaactaggtgatattgaatttaatagatattacggtaagtttatcatatctagttcaagtttaatatcggtcctttccgatgcatactccatgcatttaacccaagcttacataaaccaatgccttggaaaggacatagcacttatccatggtgtaagtaaactgcattgtagattatcctatcagttaaaccatgttaaaccatgtgcactgataaatcataggaatacatttaatcacataatcttgaatactttgtaatgtgctgatgacacaataaataggaatatcaatgtgataaggatttnnnnnnnnnnnnnnntcaaataaacatataaatgatcacttaaaccaaatgacatactaaataattaatgaaaataaatctgtttctttattgatgatggaatagaaaagattacattgaaatagagttttatttagcgcccaaagcccaacaaactcccactacattaacataaaactatcagtacatttcaattaatcctaaatccagtctgtgcttttcaaatgtagttgcagtcaaaactttggtgaatggatcagctatgttgtcttcagtattcactttgtccaccagtacatcccctattgccacatattttctaatggtgtgatatttcctctctatgtgtttgcttctctggtggcttcaaggctctttagtgtttgctattgctccagtgttatcacaaagtaaaaccaatggtttttctattctaggaacaacagcaagtccgtgaagatctttctatgccagacaagttccttagcagcatcggtgatgtaatatcccagaaaataaataatatttaaatggacatattttnnnaaatatgtaattacttggaaaatgaagtaggatta

SEQ ID NO: 21098 - DNA, 2902 bp, Cannabis sativa
  modified_base (744)..(747): a, c, t, g, unknown or other
tttggcaagtttcctttctagtctgatttgctgctatagaaactcgattctgatgccgcaaacaagattttttaagaaaagtttgttttgtaactgtttttaagattaccataatctataaatagaacctacaaaacagccaatcggatcatctcttctagttttcacttttgcatatgttcttatttgtgaggagagtgttttatgtgagaacttagttgttcagctaggttttagtattttcttagtctagtcttaggatcgatttgaacaacttgactgaacaagtggaaagtctttgaaagaagacttgttcaagccttacttcgagaggaagtaagcactcacacatcaaagtcgaaggaagttcgctatttgatggtgtttcagaaatcagattcgtgaagtgaattacaaaggattacgacaaagatttagagggagtctaaatttgttaaagtcaattgtttttgtaattatttaagactttactaattaattacattctctgggtgtgactccgtagactaggagcgttcgaaaggacactaataccacgtataattctcttgtgtaaagtgattttattttctagtgttattttatttctagttttgtttctgcaaaactgtattctataatgatagaattatattttgctgttgcagactattacagttgtatttatactgttattttgtaaaaatttattgcctaagattttcaattattattattattatnnnnattattattattattatcatgataaaattacagtagagtaggcacactagacgacttttcatgtactatgttgttttttcgtatcaatctattattatatcatatcatatggtgatgtttttttttttgcttaactatcatatgatgatgtcgaggattactagaatatttttatttatttatttggattttaactaaataacttgaaaaatatgaagaaaataaataattttttttttttttaaaaaaaaaaaatcattaccagagcatgactgccgaagccagagacaacctaacaaagccccatatattctgaaaagccagccatgaaaatccagaccaagctccaccacaactcccactaaacacataaaccatctgagccaccacaatgaaccaccacgaaaaattcaacaccacggcggctccaaccagtccccacccaagcttcaacattagaagccagctaaaaaaggtgtgaagaaccagagcaactgcagctataacagccatcaccatgatcttgctctgtgcctgtaaaaacttagctataggaaaattcatagcgtaagcaaacagctgaggaatcatccaaagagcaaatctcccagctgcctctgaaatttcctctgtttggccaattaatctcaaaagtttcccagcaaatacataaacagagctcaataaagctccagtagttaaaagaataacccaagatctttgaagataaacgcccaacatatcaatctgaccagccccgaaagcttgcccgcatagagtttcaagggcgcttcccattccaagctgagatcatcaattcaattaaatatcataattaataattaattaactcaaagtttggttttttattttttttttgttattaccatgacgccgaaggagaagccggcgatgacggagttttcgacggagacggcggcgagggcgagggtgctgacgtggccggcgaagagttgggtgacggcgccgagggagtaacggcatacggaggtgaaaactgctgggcctgctaagtaccataacttctttgattcgaaacaaaattgtttgaagaattcagtggctccgtcgatcggaagggcatcgttggttttgttaatggtgttttgagattcttcttggattgttgtggaagagataatcaatggctgttcattctcattctccattttattgtatatgtttttttttttctttgtgctgaaaagtacgttggtcgggattagcttaaatatatatagttagttatatacactcaagtaaaaaaactttattaacatatatgggatgtttgaataatctaatgaaaactttactttatttatattattttaataacttataaatataaaaacttttttttaatggaatagtattaataagtggtctatgtaattaaaaaaagtggtattttttgtaggttaaaatttgacatgtgctattttttttgttcaatttgatacattttttagcttaagttaaatttgacacacattttatatcaccgtttgaattaacttttagcaaaatattttaaaaatgacaatacactacaattaattatagctttctattgaaaatgctctaactcatgctttgtaagaagttattcgtgctaaaagttgagccaaatttttcacataataaaaattaatctaaatttagttcacaatatggcatgatacgagaataaagacaatacttatatatttacttttatgttatttttaatattttattattaaatttatttattacattaaattataaaccttttatatttattttttattattttatataatacaattaatgataaagatattattattattgtatattttaataaaataaatttaacattaaattttgcatcaagttttataattgtgcatttgagcacaatgttaaaaattaatctaaatatattacaaagtcactttttgtatctttcattgaatatggtcttagggcatctccaacccaacactataatattatatatagtgtaattttttccacttttcactccaacccaactctatttttcaacctattttcatggggatctacagtgtcccactattagtgatgggcacggtagaccacggcaaagcttttttttttttttttt

SEQ ID NO: 21099 - DNA, 3955 bp, Cannabis sativa
agtttaatccactagtggataaaatatgcttgttatgtggaaatagagatgaaaatttaagccatttattttttagctatcatttacagcaggatgtgcctacaggggatcaaaggatggctagattggagagcaaaatcatgggatctgctgcaattagtaaggtggattgacaaatcaaaaatttcgtcttctactaggaagagtatcatccatgctgctcttgtatccttagtcatgtacctcatatggagagtccgaaatgatgtatattggaattaaaatttatggtatatccagaatactgtacagaaaatcgaaaaagaaatacaacttagaattaaccttgtaatgccagaaaaggctaaagctatagatagagattggtttatggaaagatgtaaaaaataagaagtagtatgagaggtatttggagcttgattttgttaggaattttgtctggtttgtaattggagaatgtaatttggttattgagcaatacaatgatccttattcataaaaacaataataataaacacacttaagtaaaattagattttatcccaaatatattactaatattaatgtaaataatagtattaaaaaattaatatttaaaaaatattaaacataacaataaagtctattttttccttgaaataaggcgtcataaaaaaaaatataatatattataatatacacaatccaattaagtaataatataataacttccaaaaaaaaagtaataataaaatataatgcaaataattttttcagttaaatgataatataattctataaaaaaatataataatacgataatactagaatttatttttttttccttaagaaaaaaagttttgaaataaggagacaaataaaaaaaaaggttattaacatgattaatataaatattcttttaattaatattacgtgtaatgcatgtatacttaattatattcttaatttttattttgattatgtatattttttttagtgtatagttagtttttttagatgttattcaataaacagcattattttttattaaaaaaatagttaactatttttatatataaatataataatattcaaaaaaatttattaattataattttagtttagctataatcctttaaattttatttttctttttcattttttttagaaatatcatacactttatttattttttattttgttataatagtataaaaataaatttttggtaactacaaaatgtaacagcgttacaacagtaattttttaagaaacataatcattttttctattttactatttagaaagaaaacaatataatagaaatatatattttcttagatatgtggatgggataaaaaattaataatagaaagatattttttttagatatgttgggtttaaatttgaaatgcaatgttaaaaaagacacaataaatataatagataaaagagatatttagaatttaaatttgaattgtatgttctgaaaaggaacaacaatttttgtaatatagccacgttcaatataacatagaaataaaacaatataactctataaaaaaaataataaaatataatcacatttcaaaacaaaatatcataaaacaaaaactggaataaataatccttaactttgataaatgtgttaaatgaggggatgacaatttaattgaagtggcgcattttaattggcttgggacggggaaataggaaaaactaggacataggatttgactccatgtttatacggtctcgacaacaacttaagtattaattattgttgactcaaaaatatgaactaaaattctaagccacacccgctcactagattggcgagaatgaataagtagtgaagtaattataagaaagagacaataaatttatagtagttcactcgctatatcgctatagtaatagagctgtctacttcgagttcttatttctcacagatggtaattgcagcaatacactaagtgtcagaagctccaaattctagagagagaaaatctagagagagaagttctcaccttgtgggtagttttctgaatgtgtaaaatgaattaagggagctctcctttttataagtgaaggaggccaataaaaataggaaaatattaaataagatgtttttgaccgttgatgatgatctaacagtaaaaattagctcttggtggtgatggctatttttcaaaccctgacgggtcccgctgcaagtaactcgaagcttattttcataactcattttggggtgaaatttgacaaagatagcttcagaattacgtctagagtgtgaaatagggcttgatagagaattgaattagcttcaaaacacaagttgaatggtatcaattagatcaaaaatgactcagttatgattgttttactaaaagcagtctgtgacccaacacccagcttgacatccagcgcccaggttgacatatgacgtcaacttggacgctgggtaagtgtaaaaacgtccaaggatgtactttgagatgcgtaagttatatttttacaacacttagtctatttatatgttctggcaaagctagtcatcgattctcggagatgttgctgcattccaagaatgagagactcaaagctcttcatttccgagtgagctagaaatgagaaatgaaaagttttcaatttgacttctctgtcttcataaatctttgtcattgtggaagaccagatggatggtgaaaatagcgtcaaattcggataagcaaaacccagcgcactaggtcttttgtcaacctgggcgctaggtacttactcgcgagctcccaggatttcattttagatacttccacggcttctgaacttgaggatgaggtctcgtactctattattgaccattccgaattcaatggttgcattggatttggcattagagcaattgaaagtagcatcccaggttgattgtcaacctgggcgttgggcccaacactaggtcaacctgggtgcttgaccccatttctagggtcccaggattgtgattttctctccaagtttgcttgaatcttcattatttttgatgacgaaaaaaattcctagaatactttttgctaaacttgatcgaaaacaacccaggttgacaatacgtcaacttgggcgctgggtccccatttctcccctttggaaattctattttgtccctagaaatagtttaatctctgtattttctaaaaacagagaagatgctcgaaagaattcctgaaaaactctatttaaaatggcctaggttgacaaaatgtcaacccgcgccccaggccctatttccccatttttaatgaagatgaagaagatgaaaaagttggattgctgatctgataatgggaaggtttccaaattgacagcttgtcaacctgggtgctgggtgctcgggggcctgggggcccggggacccaggtgctcaaaaatcaacttgctctaattttaattttgatgccttaaatatgtctgtggtatgtctatttgatgtaccaatgtaggttttgaccctttttaactcagatggacccaaaaactgaaactctagttgagaatgtcaatttgggtgtcgggtgaaaccctaagagcccatgttggcttccaggttgcaggtttgtgtaatttcaactcatggggcttggattaggtttctccatgtcttcatggtacaaaatactaaaacatattgggttggattcaagttattgaagcccgaacttctatcccagagatcccaaagtcaacttaggcgcagggctagggtcccctctcaggtcgactgctcttactcgggtctactcaactccgtgaaatcatccttcatgccacgtgtcaaacattgatgtctacatcaccaagaaaagttttcaagttaaaaattattttttattaattaatgttgattaattttgttcttttataatattttgaatgaaataattgttggaatttattt

SEQ ID NO: 21100 - DNA, 2209 bp, Cannabis sativa
aatacatataaaaagaggtatgtttcaattaaatataaaattggaggtagatttagttcattaataaataaaagaggtatttttcaacataccccttatttttatattgtgttgctttaacttagaattcatcaaaatttcttgtagggaaagttttggcttgcacgaaaaaagtacattgaaacaccaatagggattaaatgaaagaaaatttaagtacaatgtacaatttggtaaatatgttgaagttaagggggaggggtggatttagttgctacaatttataaactcagggactattatgctaatcttaataaatttaaagtacaaccatgctggaaagaaaaaaaaaaaaaaactctatgaagattatcagaatctaaaccataatcatcaatcaaatatgagcataatatatacagctttagcccattctttattaattaaacattaaggaagttcacacaagataagatagtagtacaggccaaatagtacttgaccatttctacataattaataataaaaacaaaccttaaataaaaacaactacagagtactgatcttcccaaatatgcctattaatggattttgcttgcattagtagtgttccaagctgatgatgctacaccttaaatatttctagtcccaaaacagtttgacactaaatcattcatgccactaaaggaacagggcgtttgtaactatgcatagtagtactaactgggcttttaacagacacaccagctgtcccaaaacaaaagtaaggactcttcaaccttttgctatgactatgatgaacatgattatttccttgcttaatcaaacttggattgtcattgtcattgtcatgtacttgagttgagcttgagcaagaaggtccagctatgtcatcattctcagtaaagacacccttttgtttgtccaatgaagttggagatgagattgaagatttggagaatgagctagaccgagatgatcggtgtggaattggaactgttatctgtggtactgcttgcataacaccatgccttataccagaagcaagtttcttctttgctgatggacttgattggttactcctcacagaaagtgcccttttgttatttgttgttgttgttggcttagaaaatctcttcctgagtggggttggtgctgcagcattatctgaattgtttgcttcttcatcatcatcatcattatcaactgatttcttccctttttgaggctttcttcttgttctgtctttgatcttaggccaatgtaggacttgtttcaatagctgaactgttgcattgtttactgaacttgtcttggcactgctactagtgaatgagctacggttgttctcattggcagagtaatcatatggactagttagatcaatcgaaactgctgcactaattactggactaataacatgatcaccaccaccattactaccatctgatgcattctcaattcctgtgtacaagaatatttctgtatccgagattcgaaatgatgatccagggctgctgtttccattgctttgcatcttcaaacgtgagacaatgacttttctagcattgtaattttgacaaccaaatatcccaccagctgagattaactgtcttatgagtatatcagatgaagctgaaggtggtctttgtcttaggtaatcaagtggtgtcatgccatcaatgtcagtgacattcacatctattgattcagctgtcattagaagctgcacaagatctgaatgagcattgccaatgatggcgacatgaagagcagttcggttttcgttgttcttggcattgataatgttcttgatgttgaaagctttaccactaactaattgtctcagcagctcaatttgtctgtctaatctcctaaaggccagagtttggaagccagataccgccttgtggaggaaagtttcgcccgcgttgtttttctggtgaattgatgagggtgaagctgttatgagagcttcaactgcagctagttggcctctgtatgcagccacatgaagagctgtgttgccctggttgtctgttgagttgctcaagttgaaagactttgtaaggtacttgagaatctgcatgaataacaagaaatgtttgttagaatccttaaaaactaaggtgtcgttggtaacacttttttaattagttttttgtttttaaaattagaaaagtgaaaatatttttcaaaagatcggaag

SEQ ID NO: 21101 - DNA, 1746 bp, Cannabis sativa
  modified_base (754)..(754): a, c, t, g, unknown or other
  modified_base (803)..(814): a, c, t, g, unknown or other
  modified_base (954)..(969): a, c, t, g, unknown or other
  modified_base (1016)..(1019): a, c, t, g, unknown or other
aaaaaaaaaaaaaaaacctcatttgaagtgtaaaaaaaaagatagatttgtgtgggtatctcacattcctcatgtgagtgtgattaacaaggtttatattagcaacaaccaagttttaccctcataatagggtctttattaataactagataaatgatttgtttattacatttttatagagatatctataaaaaaaaaaaactccttaacatttgtaattgttacacatataattctaataaaaaaataacaacaaaagtactttattttacaattttgttgcaatatactcttttggttgtttttgatttaagtgtttatatattacaaccatgttttatttgggactcgaacccacaacctccaacacacacacacccacctatggtcacttgatctagcctcaagtggttgttaagtgtcaactaaatccgttaagtaacaatttagaaacacttggtgacaaattgtatatttttttatatttttatctatataaaaaaaattatttgttcgaataaagaaaaattaatttagtctttcttttcatcaaatttgtatattttaaattaataaaaataaataataattatttataatacgtgatacaataatgtgtcatcacatatttttaagttggcacttaacaatcaaaagactaccattgcgataaaattaggagataaggtacttttgtcgttatttttttaggctaattaggattttttttcctcgaactttaacatgtaccaantcatgccccctgaatttttttggttgttaaaaatttcccctgaactatnnnnnnnnnnnnatttaaggacttttgtctagtttcatttaattttactgtttcaataattgtttatgtactaaaccatgctcctcagactttgatatctaccaaattatgctcctcaaactttgatatgtactaaattatgtcccctgaannnnnnnnnnnnnnnnaatttttttactaaaattagacacaagtccttaaatctaacaatctnnnnagttcagggagaatttttaatggcaaaaaaagttcacggaacatgatttggtacatgttaaagttcgagggaaaaaatcttaattagcttttttttttaattagagttatatgtgtaactattaaaaatattaaagaagttttgccacaagtatctcttttaatttataataggttaggacaagttgctaacaagttattattaaaaaataataattgaattaattataattaattatatatttaaaataattttttttttgataaaatataaaacaaaaactaattagcaattataattaaatgtaattttcaaataaaattaatcttaaaaatattttataagaaaaatatgtattaataaataaaataaaattatgtaagtaacataatacaagtaatttattagttatttaaaattaattgcaattcaataataatttaatgactaaaactaatgtaaccatagtaataattgaaacttcttttatattttaactagggaactaagtcgcgcttcacgcgggttcgatctcacttttataattcttttaattattttaatgtaatttttttacattttatttaaaatataatttaaaataaataatattcattagtattagcttactacaaattaggcaataataaaataatagagttgtaaaatgtaaatacatgctgcttttgaggtccaagaaactactcaaaagatgagcatattgaat

SEQ ID NO: 21102 - DNA, 4219 bp, Cannabis sativa
  modified_base (3165)..(3177): a, c, t, g, unknown or other
gttcacctcaccaatagtcgcgcaggttcatctgtgcaaagagggaaagggaggtaaacatctagacaacataaagaccatatgggcaacatataatcagtcggctagcaacaaaaacacctcgaataggccggccaggttccctaagagatttaagataattctacaaaaagaagccataaaccttggttctttgtgttcttcaagacccataatcaaaaatgtgggaaacaaagtcaagattcaaccttttcagctaaaaccctacattaacctatcctaacatacctgggcaactgtagtggttgggtttccctaaacctaaggcatgtaggctttttaacctccaaaaatggtgtaaaataaaaaacacagatcttttaaagaaaaaaaagaaggttaaaggaacttactcactaggtgaatcttggggcaaagcgtggacgttgacgaagacgactgttggttttcccttatgcagtggaagacaaaggaagaacacgaggaaaagctttgagtttcttgaagtttttcttatttttctctagaatcttttctggaagaaaaaacaaaaatgagggattcaagaagaagaaaggcctttatataggcctcatttatttgattttctcccaaaattaattaaatgggaaattaattcctaataaaatcatcacggggaaataaaaagagcaaaaagtgaaattatggggggagtgcaaccgtcaacatgatctcccataaaatgtgttttaaaattgtcacaatgagaactgacatttaatagtgagttgaagaggctgaagtgtgaccattcacaaagcgcctggctaggtcaccaacctatcagccagggaagacaagagatcttgcaagaatgattccacgagaaaggacaagtctcgagaaaggtctggctaggtgattaacctaccaaccaaaaataacacttccaggagtgtcatataaggctacatgagccttgattttttcttcaacaagcttccacaaatatctcaaactgaatcctacaaacttggatctagcaaatctatctaagaataaaggagcttcaacagatcttaattgcaccctagaatgtagggatatttattctttgtttactccttttacggagctaatgtaaaaatcttccccttataaatagtaaataaattcacaaggagaaaggaccgagagctgaaatcatactcaaacatctaagagcactttgctgaaagatatgttctataaacactttgagagctgtaactagaattcactttgtcttccttagtgatctgcccgatattatctcacattcaatacaattgaaagatgagtaggtcattatccatatacaagggggccgaacctctatatatcttggtgttctttatatatatttattattccaaactatttattgttgattaacttgtgattatttgactatgagtcaattgtctattttttcagtcgacaaaggtcatagtagtaaatgtgctctcttgtaagatcatctccaatggagatacaaataagcaatgtaaatctaaaatatagctcacttaaaaaaatatacttcaataatgtgccaaaaggtgatgtaaatttggcacatagcaaatgttgtgccaaatgatacaaaatttgcatcatcataaatattaatagtattattgacttttatgtcacttttattattttattaatgtatttagctataacattgatgatgaactatttatattctttttctattgttttacataataataaaataataatattaatgataaaattattattttttttacttttaataaacaaaattaaattttgcatcaagttttgtaattgtacattggagtacaatactaaaaattgatgcaaatatatcacaaagtatttttttgtgctaaatatagtacaatttttgcatctccaatgaaagatatggattaagtattttactgatccataaatgtgtaattcttttttttttttaaaaagtcacaaaggagaaagcaagaatgtagtagtatagggtgtttctataatgtactatccaaaaaaagtgtattgatgcattctttactgtttcgatatttaagaagttttttcagtccagttcttttttatagttgtttatattataattatttaagacattatgtaaaattttgaaaaattcagtataatttacattataaaaagtagtatttaaacaatttattttatacatgtataactataaaataaaagaatcacgagtgtaatagattatttaaaccctatttataacgtgctaaatttttttaaagttcttaaaattttataaaattaatcacaacctataagaccattaaaataaattagactaaaatatttatctaaatatcgaaataagtaagaatgtatcactataccctttacccaataacatatagtttgacaagtaagtaaatcatcttgttaactcatccaaacttttttgtgatatttgaaaaagtaaagaaagcactatcattagtaaaaagtaaagttcatagatagatagatatttgtttcggctacaaaaggaaaataaatttttatggaatctattctgtacccactttgagcagtccaaaagaaaacaaatgggtctttgctttcggcctctccttagaaccacttgtcttattaaatttatttataaatacaccattttttatgtcagtgttgtccatagagaagttcttcatctcagtctcaatatctcataaaacattgatcatcttcataaaaagtctcatacatatattgtatactcagcactagcttaattgagaaaacttgctttcctttcaatggcctcaaaaagaatattgaaggagctgaaggacttgcaaagagatccaccaacttcatgcagtgcaggtaaacatcacatagcataacataatacacaactatgtttattatataaatatagtcatttccgaaaataactttaaataaaacgttatatttataagggtaaatagcggtataaatacttaaatttttaagtttgtaagtgacataaatttaatttttattttcagcggcacaagtactcaatgtttgtaaaactataattttctttcagtttcgccagtacagactctgttttgaatnnnnnnnnnnnnnatttggaagtaactgatactacaagtttttatctagaactaatgatctagaatctgcaccttatatgtgtcttgtttaagacaataacaaagtatgaactgacaaaagtagagaaaaatttcaattttataaatattgggtacttatgctactaaaaataaatattaagtttatgttacttacaaacataaaactttaagtatgccgctatttaccctatttataattaatttattttactaatttcaatctttacattttttttttctaaaatggaagtgttacattagatcatttggttaattttttcaggtccagtggctgaggacatgtttcactggcaagcgacaattattggtccaaacgacagtccgtacgcagggggtgtatttcttgtaaccattcattttcctcctgattacccatttaaacccccaaaggtacttaatttttcataccaaacccaacttcaccaatttacatgcacaaatatactgacatacctatttgatttattattatattattattgttgttgttgtttaaggtagcctttaggacaaaggtgtttcatccaaacataaatagcaatggaaatatatgcttggacatactgaaggagcagtggagtccggctcttaccatatccaaggtaaccaactaacccaaaaccatgtgatgttaaaaataaaaatgcatgttatgaatttatttatttttccaatttttaatttgaattattattgttattgtgttatgcaggttttactatcgatatgttctctgctaacggacccaaacccagatgacccattggtgcctgaaatagctcatatgtgcaagactgacaaattcaagtatgaatccacagctcgtagctggactcaaaaatatgccatgggctagtctctatctatatataatatattcaatattaataatattaagagtaaacaaatactatgtgttttatggaaatattgacacaataatatatgttttcaataatagtcatttgatactatgtaatttaaaatgatac

SEQ ID NO: 21103 - DNA, 2414 bp, Cannabis sativa
atatatatatatatattaaatgttagtattatatataaaagattattatttaaaaacttaaaagtcaatgtttatactcaagaagtcattcaccacacacgaaactaatttatataacatattcaagccattactaaacaaacaaacaaacactacaactttattagaagaaaaccatatgaccaagtaacaaagacaatattacaaagaagaggaattaatgaaacaaacaccaaaaatctcccagttgaattgatatatgtgggaactaaataagatctctgtctcaacaaagttgtactaatttttaaaaagttgtttcaaattgtaagatcctttaaagctgggctttccactccaagcttgctcagcaaattgctgatatgccctttcagtgggatgagctgaatcaaaaaacacatactcacttacattaccacataaataataatcttttattattttccctccacagctgaaaattcccctgtacggtccactcccacaacaagcaaccaacccttctttaaaacctttaagaataaaagattaaaattactttttagcaaacatagacagtaattattagcataaaaataaaaatccaatacaaagaaactgaagatgaagaatccactaccatatttaagagggtgatccattctttcttttacaaaagtgaaataatcagacaatgaaaatttgaatcctctgagctgattgtttagcttttgtaaaagtttggaaagttctttgttatgtaattctacaaatggtgtactctgatccaaacaggacatgttatattttgctgctgcaacaattcttgcgtaaggtacacaagctatactccttacattttgaaacccaaatttccttcctccaatcttatatatttcctaataaaacaatacatcccatgatatataatagtggttaaaagtaaatacatatgtgtgtgagatataaagtcagtatggcaaaatatacctcaattgctgaacttatgtttcctatcacaagccccacaaattcttcccttgaaaaagaatcaagggcactagaatttgtgtcgaaaaggaacgagtagtcattggctccaatactgaacaagtaaacagcctttgacagcagagtaatggcctctgcatctcctagtttctccctcaatatctggctaacatttttgaagtaaccaatttgagtttcaaggcttatgacctgaaaaacaaattaaaataaactaatcctttgtcatttttttttcctttggttgaaatttgaaaaaataaaatattaaaaagtaatacgacatacaaatccttggcgagtttcaagtagagcaccagctccagcagaagcaaagttgactccatatgtaaagtcaacataaccaggttgtaaatatggtggaagcagtggcaactcggcatactcagctgtatttatatatatatatcatgcattttgacaatcaataaaatatgtttcaaagataattaattaagtgaaaatatttatggctagcgtactaatgaaatctgggattaaacggccattggaaaatcttccagttgggtacttaaagaaggtttctccatatggataataattggctcgagaagaagtgttgaagtagttgttatttccaacatcaaatgaagaatctccaaagacgaacagggctgctttttctgatcgacttggacaggattgagtgaggagtacaaggtttaaacataggatcataaagaaacaagtactgagaaagtttgactgtgccatgagagatcttattttcttctattcctttttcatgtttaatttggttaactactggtgattatttatgtggcaaaaaatgtgactttattcacttcgtagattgaataaacaaatgctaaaaaagacaagactgagtcttaaacaatcaacatattcaagcctcaataacgtaatgatgaagaaataattatgctttggagatccgtgtgtatggattttatattattatttatatattttgacgaaaaaaatataggaaaattgttcaatgtgcacgcacccctcactaagcactcctcaaaattttgacaaattttaaaaaatttaatacaccaataatagagtttaaaatcaaataacttttttattttatacgcctataaaatttattgtttgagcattattttctatattataaattattttaaattctttaaaattttacaaaatattttgaataatcaaaatatatatacgactataaaaaaattggactaaaaaattataatagataccgaaacatatagggtatcgctacacccattttagaagaaccattgtgaaagcactcgataataatgtggggtgggatttttttcaaaattattgtgtattatgttaagttttca

SEQ ID NO: 21104 - DNA, 4084 bp, Cannabis sativa
aaaaaaaaaaaaaaaagtaaagttgcagtacatgtacatggaaaattctttagtacatgatgcctttttgggttttggccatgtatggatatagaagcctttttattttgatacgttttttttaatagtaatgtataatatatagttatttattaattagcatttttttttttaaattttcgtaaaatttctataagaatatacaatcctaataaaaaaactaatgatgcataattttaattatttttaacttcatacaaatgtttttagaaaaattataatttacagtattaaaaatataaaatatattatttaagaaattattttgcaaatatataaaaataacaaaaaaaaaaaattgtaaaaatatggttgtacgaaattttaaatattatttttacgattttatttacagaaaataaagtcttttgaggtattttacacccgtataaaatataaaataggcacgtgtgtaatacattgtttgaacgtaattttcggcgtgaaacttttctaaattttttaaaattttacaagatgtcttaaataactataacgtatatgaccatgaaaaaaactttgactaaaaaattatttcgggtgctaaaacagataaaagtgcatcaatgtatccattttaagagggtgcattgtagaattttcgacgtgcgtttttcaaacttttaaattgacgtgagatatcaattacatattagacaagtactcctatatatatatgctattttagttttgttttttgttttgcaaaatctaattttcgcttttcataaatttgagagaaagggtagtaataattaaacaataatatatatatatatatacagcttaattaattattaattatatgcatagtacgtactaataatatttaagcgcgtacgaggagtcgaaagcaagttcaactttaaatatttgttgtatatatatagtgtaattatatattaataattataattttcctctctaataattgattaaaatggattaatattcagtaagacataataataataattatacaaatgcaagtgatggatgatttagtaaattgtatatatgtagtctacgacaagcgttttcaacacattattagggcccttataatcatagagagaatcctaaataaataatagttaaatctcatcatcatcatttttgttaatattaatttggtgaatattggccaatgcaattgcaacttggtatgttccatcttcacacccatcacatgcttattatatttataccgaatatataatcgaagattaattaattatttctttataaatatatatttatatatttatatatatcgatcacaatagatgagatgaggagcaagagccatgtggttggcagaagctgcattgatgcttatacatagtggtttttcatcaccattgattctcttattgctaattaaggtaccccatttaaccctgtaatatataaatatatatatatatttatatatatatatatcaactcgttatttgaccaatcaccaatgggaactcatcggatttttcttttttgtatataaattgactaaaggggggacatgcattataattcatctcatcatctaaatatatatatgtcaatgcatgtattaatatatatgaaaattaattgtacattttttgtaatccaactatacatatattaatgcattataataacaccgtcaataaggatttatattatagcattgcctgactataataaggaaatgcaaaatgttttgggcataaatatataatatatataaagaaaatgtcaaaatgtgatcatattattcaaataaatcatttaaattaattaggtaaattaataatagggggtgtatatgtataagtcgtggtatattaagtggtacatttataaggtacaataataatcagtcaaatatttgtataagtagagaaatgttaaaagggtatcagtggtgcctaacactcttttatgtgttaatatcgctattggtccaattataagtattgtgtcacatataatttaatataatagcttttagagaatatcgctagccaatcgcaacgcgacatatcgagaaggtgctagacaccactaatgcctaatagcaatacttgtataagtagctagagagatatccaattggcgccaaagacggaatttatatgatgagagaattagaaagcataataacatgggtacgtacgtacacttgatgtatcatatatataatatatatgattatattgacgacctcttaatgattggatcatgtgttgtgtgttattataattacatataataatatggatttaattagttatcacagcaaattctttcctttaattctggctttaattattattattatttaccttttgttttcccacttaatttaccaacttttagagagcaattaagtcaactttttattattcttacacatgacattcctttttatcggttttctctccctttaattttgtatatatatatatatatatatatatataaaaatttaatgtgtgtgatttcttggctgagacgatttgttgtcacatgaataagttatatatagtgatagatataatatattaaaactactaaagttgatgatcatgaatcattgtgttcttaatatataattaactttaattaagttgtaatccaatctccgtgaataaatgaatataatttaatgaacgataaggtatatataaatgtaataatataattttgtatatatgatgttctgattttttgaaagaaactaaaaaaaataccgtcggttattttttcccttaaaaaataattttatgtaatttttatgttaaatttttcttgcataaattaataattaaataatgtttattgcttaccactaaaaaaaaaaaaaaacaaaaaaacaaaacttggctttttggctaaaagtgaaaaatatcatcaccaaaagttttagtcctaattttttcttgtgacggcattgtggttaaaaagttcgtgattaaaagttttagttataataaaaaaaaatactatgagtactaagtcacaattaatctttgtgactaaatgtcacaacaattaagtcacaaccacctagccacaaattatttatctttggtgacaatatttattgtcattaatatttacttagtcacaaaaaaattgtgactaatatttttttagtcacaataaaaaattgtgactaatatttctttagttacaaccgaaaattgtggctaatatttctttatgcacaacaaaaaattgtggttgatatatctttagttacaacaaaaatttgtggctgatatttttttagtcataacaaaaaattgtaactaatatttttgtaatcacaacaaaaatttatcactaatacttattgacccacaattttttattgtcactaatatttttttagttgcaactcattatcaatctaaaataaaatatgtagatattagataatgatgacattaataatttttttttattaaatgtattctacaacctttttctcaaaattaagtcacataaaaataagacaaacaaattcaaaacccaattaaaatggtttattcatcaatttgacccatcaatgatctcttgaaattcaatctaaaaataaagtaatatcaatcaacctaaacaatcaaatcatcatatgtttttcaccgagctccatccttcaatccttgttgttccaatccccattgcgcattatgtaacatcactattgcttgtccttagacaactcagaccaaattcatccaattttaaattttcaaacaacttatgatagcatagataataaaatgagtaaaaatttaagtaataatagatataagtcacattcgagatttatcaaagaagcaagacactaattaagttaatctttataaaaggaaagaagataaaaaaatttataaacaaatataaacaaaaaatcatcgattatggagaataacccattaagtataggccaagtctgttagaatactgtaaatctgtatatagcccaaattaattcatgagaattaaacaataagattaaggaatagcg

SEQ ID NO: 21105 - DNA, 3071 bp, Cannabis sativa
agggtcagttgtcaatccaggaagcagccaaagtggcgtactcgtgtataagagtcattattctgtgggtgtaaggactcaatagaggcttgaagtggggatgctacacatttcaaaatataacttttacaataacgtaattcttctcacgttttatttaattttatggtgaaatgagtttagtaatagatggtaatcgataaatgaatgcaaattaattgttatctactttttatgttaacgaataataaattaaaagactttttctttatttataataatttatattttagttttagttctttaattattgaagtaaaaaagatgaaatgattttaatttgcatctatttatcaactatcatttattgcgtcacttttttcatgataaaattgaatagaatatgatttaaggactacattactataagagatatatttcatcacttttactttcattctccactttccatacaagtcctcttttcaataagtccctatcccataaaatgcttctctgttaggagagttgaatctccttgacattgttgttcgagtatgaacaaagaacaaagtatagtaaaataaaactgaagacaaagaaaagagagagtgaggaaagatttcatgaaagacctcaagtgttattatgaaaacagttatacaatttatacatgagctacatcaactaaacatgattagttgtaacagaatgctaactaactaacttactgaaacagttaattagttaactaacaaaatagaaaagtacaactgtcaactcttaacactccctcacaaactcaacattggaggcatcgacattggtgagtttggttcgaaaaagacagaagctttgattcaatattgccttggtgaagccatctgctagttgatcagttgctggaacatatttgacaagaatttggtgattttgaatcttctctcttataaaatataaatccagctcaatgtgtttggcgcgaacatgaagaactggatttgcagtgagcaaaacaatactaagattgtcacaccaaactgttggaggatgaggcagttgtatgtaaagcttagagaacaatgattgaagccaggcaagttcaacaacaacattagctagacttctgtatttagcttttgtgctgaatctggatgttgtgtgttgtttttgagactttcaagcaatgagatttggtccaaagaagatggcaaaacctgaggtggatcttctatcatcaatatcagtggtctagtcatcatcacaataggccttatttcaaaattttgaggcttggtgagatgaagatcatagtgaagagttccagcaacatatattatctgaagattcttttgacaacaaaccagtggctttgaagacctccaccaaaatcttgacaaaagagcttcattttctttacaaatcttggtaggtattcagaaataagctatggcataagaaggaatagcctgaaaaacaacctttatcagagtttccttaccagccttcaagaaccatttatggtacctttaatggataatggacaaaactttatccttaagaaaagcaaaagccatgtacttagatttaaaaagacattgaggcaacccaaggtactttgttataaaaggcttattctcgaggtcaaaggttctaaaaaataggtttatgatattattatgtgtattaggagaaaacagaatagaagatatagcaaaatgagcatcgcaaaaattttgatccgcagaataaaagaggatgctatcttcaataaaaaaaaaggtgggttataggaggagcattcttagagatagcaatacccttaagaagactcctatgttgaaagtccctaagaatagcagaaagcctctcatagcagagaaagaataaataagggtatctatggtcacccttcttaagacccccagtagacctaacatggcctttgacctgactattaacagagaaagaaattgtagtagtagagaggcattcataattaaagaaacaaaactaaaatggaagttgaaatgaaacataatattttgtagaaaatctcattcaactctatcaaaagccttgtccaattttaaagcagtccagcctctaattaccaacccttctgttgctaatagcattgacaagctcattagcaataagaatattatcataaataactctttttaaaataaaaatactttgaaaacaagaaatgaccttagaaagaactatcttaagtctattagctaaattttttaaaataatcttataaaaagtagtaccaaaatttatagctttaaaatctttaagagtattagcatgctgcttcttataagaacaatcaaagtagagttgacgttagagaaattaactcctttattcagacaatccagaatagcattagtaaaatcaactcccaacatagactagttcttttgataaaaataagcattcaaactatctgaaacccataactttatcctcagataattaagaaacaacccttctaacctcatcgtcagtggaagcctgagtaaggagactaacatcagactcctcgagaccaggacccaaagaaaaaaaaattgaagcaacaaattcaatctcattgccctaaaaagaaaaaaaaaaatagaaaaataagaagtaattaaagcaacaatatcatcttgtttattaataatatttccactgtcatccttaagatattttatagtattaagcatacttatgaaatgaagcctaaaagcttgtagccttattaatgaggtgaaagtgaagtctatattataattatgaaatttaaatttcatatcttacttatgatacagtttgagtgaaaaaaaaaaaatcaaaaataaataaataactaaataaataaaaaatacaatgtgtagctatatggcaataaagaacttcaaactgtatattttgatatgatatgtcaaggtatggaccattaatttgatgaacatcgatccctgttttctgatcaatacatttgtcaatacttgttttcttaagaaacatagtacttttcgatagaaacattcttttttcatggggtcacc

SEQ ID NO: 21106 - DNA, 4818 bp, Cannabis sativa
agaataaacatattaaatgagataaatatgatgaatttgtcatggaaggagttctaagatataatagtgtgaaagattttaagttttggaagtttaatacgctccgtttgtgataaaaaaaaaatcaaatctaaagctttaagccaattttgatgcattcactttcaaaaaaaaaaaattgtaaataaaagttataaatctttcattcctcagattttcaaatcatcttgaatagttcaatttcgaccaatatcgaaagagttaatagacaaaaaattattagtgattgcactaggaagcttgctcccaaaaaccaagttcttagaccgtggcactgaaagggccatatgtcacggtcagcctgattttagaggcccatgagtatttaaattttaatttcaaaggagaaaggggctttttgattgtgacttttagaaggaaaaaaaaatagaggcagaaaacgatcttggaggctacaaccattgatcttcaaataatttctttcttctatctttatttttatattttcaattagtctaaatcaattgttcacaatgaaatatgagtaaaactcactaaagtctttttgatttcaaagcatatgttgttgacattagtggaaaatattaaataatcaaacttatggataattagtttgtggaattatttggattgagtcaagcatttatggtgattttccattatttattttcaattatgagtcataaaatctgagtgttaaggttagttgttggagcaattggattgaaaatctagttttgcaacagttgaatcttgcaagtggtggcgatacgatgtgaataaaattttaaggcttaatttttttttgtttttattcatttgtttttagttagtgtcgatctttacttgcaggcgagtaaaggttaagtttggagagtttgataggcttgttttaggtgtattttataaagtgttttgaaggtgtattttaatggaatatattcattttatgcagtattacgtttgttttccacttgtttcatgtttaaatggtaaaattaataatatgaattttaaatgagaagaaacatgttaaatgagatgaatatgatgaatttatcatagaatttgaagttcttagatataacgttgtgaaagattctatgttttggatgctcaacacgctctgtttgtgatcaaaaattaagtctgaagcttcaagccaatttttgactatgatgcgttcgatttcaggaaaaatattgaaaatctaatctctctctttcagcttttcaaaacatcttgaatgtccaattctaagtaatatcaaaagagttatggccaaacattatcggtcgtcgcaccaggaagcttgctgcctaaaaactaagttcctgggttgcaacactgaaagagccatgtcgcgacccacctatttttagaggcccgatagggtaattaaatcttaattttgaaggagaaagggactcttttattgggacgaaaatagagacagaaagcgaccttggagtctacaaccattgatcttcaaacagtttctttcttctatctttatttttatgtttttaattagtcttaatcaattgttgacaatgactatgagtagctaatttttcaattagggttattaattgagattgtgtgacactttagtttgattttaatgtgatttgatttttttctaattttctttgtgtatctatttcatttgtacttaatttattttaattacatgatcaccaattaactatttaataatttcaatacaaaatctgagaaataagtattgattatgttattgtgaaatagagacagatttcgatacatgacgagaatacccatatagtttgtgtatcatttaaaatttttatgcttaatgcctcatatgtgtaaaatttatgacgagagtagaaagtttgcgtataggttgaaatttatttgtcctagctcaaatataaattttttttagttaattcactctcacatgaaaattaaaatttagaatcgaattatcttaaaaccatacaaagtagattcaatcgaaattaatcaccctaagctttaattattgttaatttcactttaattatttatttttttaagtggaatttagacatcttttcttatttttattgttaccaaatagaattaaaaattaaattatttggtaattaaatacaattcttgtgggatcgatccacccttgtgagtcacttgtaaacaatgcgcataagtgctggaatttttacaataaccactcactagcaaacttaaatagttattatttttaaattaactacaaagaataggataatacatgttatggacagagtaacagtacaaccaaactttcaaattgaaatacaaatggaagttgaagttgaagaaaaatacacatgaaataggccagagaaagattattcgaaaacaagtttctccttacctttaatgcttgttggattaggtcctcttgatgtttctgagttaggatccaccttaggaatgctgcagctatttatgctagtacctgcctcacaaccaatggtgccattagaatacatcttggttttgcttttattactgagacaaacaaaatcctcattttgtgacaatgacttcatgcagtaagcaatactttccttaaactcatcctcatcgtgtcgaaacaaaaggcggaggccacacttttcaacatgcaagcttcttccactgtcactcacaaatgaagcctctaagagactacaaccatttagctgctgattcgaaaaccacccttttggtatgtaggaaagccaaatgaattggccttgctggtctaaatatatgaattcttcattggtggtttggtggacatggagatgttctaggctgcctcgctcagtttgcaaatgacaaataaggcggtgagaacattgccttgtattatccaaatggtcaatgctgcaggcatttggatgcttataatcaagatcagaaaagcatgcacataatgctaatcctatccagttgtcatcaaataatagagtagtaggcagctcaattttgactgaagggcatccagtattataatttctgaaccactcaagaatctcagttgcagtgaaacatgaattatatatggaatgtcgatgaaactcctgaaataaaaaatgagaaaataaatagcctgataagatataaagtttaaacaaagaaaaagtaatttcaaaaactaaaaattgtattgtcttactattactagcagctcaatgtccgttctttggtttcgaggaacaatataagagtcatcaaaatcaggagatttttccttatttttgtctttcaaaaattggcatatgggatccaaatcatcaaagaaggaagtcacacacttgattattgtttgttgaaactcttgcacatcatcttggtaaagaagacgcatgccgcacctctcaacttccaaaccagggcagtcaaagctatgcatttcagcctgtacatagcttacttcattcaaatactctgtaaatgcattctttgggatataagttaaccaaatgaagccacgaagattcaaccacttaaacttctctttactgatgcggaaaattggtgcaggcattagacaattttcttgatccaatatgaaatgacacataaggtggacatccatttcagaacaaaggttgtcgagaatagcagcagggtgctcgtgaacagtaaaggcagcacacatcacaaatcccatccagtttttatcatcatatagatctcggggtatttggaatatcaccttgggcctatcagtctgatatttgaaccactctaaaacatttttccgaggaaaacaaaagttaaatctgaagtaaggatcaaagcttctaaggaatgagattgtatggcctgcaagactgagcatgaccaccagagaaaccttgaagtacttgctaagaaatttctccaagttatttatccactcggctgttgaatggctttccaagagtgctgtctcagctgttatgtctaaaacaatataagtaggctctgactctgagtctattgaagatgggcttacatctaaaactgagttgttctctacaaggctttcttgcattagatcccaatcctcaaaaaaggcattcatgcaatgaagtatcatttgctcaaattcttgttgatcatataccagttggattccacagttattcaccaacaaaccgggccgctcgcttccaaatgaagcttcaatgaaactgatgaactgatctgacaatgatccacatggtatgtaagataaccaaatgaatcctccaagatgaggcaaccactttatttcttcatttgtgattcggtatgagtgaataggttccaggctaccttcatctgtttctaaataacagttaaggaagtgggaatatgctgattcttgattctcatcaaccttgccagttaaagactcttcagctgagaaatatgcccacaaggcaagtccaatccaattgctctcttcaggcagtatttgaattttaattgagtaatcattattttgatggtggaacaactttggaatttcacttggaggaaaacaataattatacttcaacaattggttaaagctctgcaatatagatatatactatctatgagagagacagacaatgatagagatcataaacacaaggtagagagaattgtgtgaaagacctgataatatttttgaataaaatgctgagtaatgtccttcccgttctcagttggcaattgtgactgactattactaaaatttgagttataatccacttcttgcacttgtcgatgcaaaattttatgctc

SEQ ID NO: 21107 - DNA, 3148 bp, Cannabis sativa
gtcatctacttaatagtctatgctttctaagttctagcaagggcttattattaatttttattatatgaacaaacattattgagggagaaaactgaaaattcagatgtgaacaatacttgaataataacaggttaatagccaccctcaaaattcaaatatcagatcaaattgaattaagtcaatcgtacaatgattattggatcaattgatggacatcatctcatctattacagaaaaattccacaaaatttccgagcatgaaagcaaaagagttttactgatctacaacaaaatatattgagaaacttttcttaaggccaacagctcttatgatgataatttaatgaaaaattaactctgactaccaagtaagataatgaaaaaatatacagagattataccctccttgaaagagcaaggaatacagcagctgaggatatctgcaccttaagatcagcaaggtcaacatcatgaccaccttcaacaagaccccacttgtccacctgacacaaatatatgatgggtatataagaaaaatgatttcttgagtctgcaacagggttatcactcattggtgatctaataactgatatagttttgttttaattttatttgtgataaaagattattgaaatttcaaacagtctagcttgagaacttaggtaggtatgtatatgaaagcaaggaagataaacacaaataaaaagaacctgtaagtcttcttcgagtctgatcaattcaatggcttcctcaatctccaatttcccacgaaaaatcccgagggcaattactaaagagtgtcctgctgaagcaagagcatcaattgatgccaattcacagtcatctgtattctttaatacattttctacggcctttacaaggccatcctcctgctttccaccaaagaaactggagtacaccacgggcttgtaaccaaattctgatgccacccaatcaagtagaggatcaattttctccacttgcttatctacaaaagttttaaggccatcacaaattaatgagttagtcattgtaagatgatccccatcaaaattaaaaaccaaaggaaaagtccacattatcatattcatatagatgcttattgaatagaatacttcgtctcaaatggggctactgtctaattcaaatttgtaaatttggaaactactcaaacgattcttagtttcctaaatatacataacagtgctcatatacttgaagaaaaacgcaaaaaaaaaaatagtacagaaacaaagtaccatgaacgtatttcgttagattatcatcctccggagcacggcaaaagacaagatcttgactaaatttcttcatcaaatgatctataatctttgaccttgtaagaggaactctttctagagcagtacaagcaaacttcatgagaggcattgtaaatggtctgatcccatctgtaagctaaaagtgttttagaaaaaagaaacttcattaaacaacctccaagtaaatgaaacattcggctaagtttcacaagcgaaaatattaactctccacaaaaccctctgatctaaattagcattaatgaagaaaatcactgaattttacaataaaacaattttcaattttgaaggacacccattggagtgtgttatcaacacacctggtattcccactcggcagctatggccttagcaagagataaagtaggaagcttgagcggcctctttgatggtgtctttaaagtccgataatcaagcatcacagtccaaccattcccatcatcagcctccctcgtagtgacctgcttgtaaaacctctttcccacaatagaaccagtcatgaacgacattggcatagtgaccgaggatccggagtccctccttgaattcgagcgcggtgccttaaggtgtatggcttcgtcggtactggtggtattgtcatttcggtgttcgtgatcgtcagatgagaaggtgaaagatgggtcatccgattggggttgctcgacggtggcgacagagttaaagttccgaaccaatgacgagaacgatttgaagatattagggtttctgattgaatttaaggttctgtttatgagtggattggccattggtgttgattgaacgaagctttttccggcttggtaatggagtttcgttctctgattttgctagggcttagcgacttcgagtcagctattctaagcttaactctcttaaacactctcaaagtgaaatttggtgaaatactaacatttccaaaataacataatttatgggtaaataactgttttgcaaaaattatcgaaaggacttttgttaaattataaaataaattttatattttttaaaatggtaaaaatagaacttgagcttaatttttgacaacttgtttttaatataactaatttgaagacaattcctaacacaaacagataacagttttgtcatcacatataattaaattttattttgacaaaaaatcaatcaagggtcctatttgtatcattttagaaaatacagtatccattttgtcatttaacaaaacagatggttcaattaataatttttacaaaacaatgagtccaaaataatatttaccctttaatttattggctttggtgacttcaagacttttgcctttatttttaaaataaaatattctttgaagaattaaaatctttcaaataaaataaaagttaatattttttcaaaaaaagttactttttaatatattttcatcttgttaattagtttattgctactagctaaagaataatacttttggctagttatttttaaattttttctttagtttatattttatttatttgaattaagtggtagaatctaagaatttagttttttgaatgctaatcttaaacactccctatctttgacatgacaaagtatctattaggataaaaaattgttaattaaaggactcagatataaagttggcaatggttttcatatagggacaatccataaattttaggtcataacgagtttagaccgctaacttatataagacctctatcaatgcatgtctccactttcatcactgacaataaggaatgggttgtttctctgttgaatatctacttcaagcctattgatattgattgaatcatgacgattcctctgagtttcttgactcatatggcattacactt

SEQ ID NO: 21108 - DNA, 6171 bp, Cannabis sativa
aaaaaaaaaaaacaaatagctgctgtaaaaatgaactcaataaaatgatacaaatcgttaaaattaccttagatttaactttaggcttttctcccccatcatgcacttcatcctcaaaatcagaatctgatgtaacctagaacaagaagggagaaaacattaaatcatcaaatgtaatacaaaaaaaaaaaaaaatacaacaaccagaaaaaaaaaactaaagaaaaattgaaaaacaacaaaacgaaacttacatcctttgcagacttcgaaggttttgctctcttagccttacgagtctcgaccttatttggaatgtgtcttttcttagtacccgaaggctctggaacatcacccattactttcttagcaatacgcttcaaccccatcttaggatcgactttagataaaatagttgttggaggtttcttagaatttttagtatttttcttagctggagatggggacttcgaaccacttctagtggttgccatttatataaaaaaagaacacaataggggaggaagaacttgcaaataaaatcgagaaaaatggggaaagtggcatataatggaggttgaggaaaacgtgggttagggcttggagtgggtgatcgtgggatagagaggttgaagacaataggaaatagaagcagagaaaaaaaattcaaaaaaaaaagaaaaatggcagttatgaagaggtaaagggataaaacatgacacatgcatactaaaaggtaaaattgtaattatgaaacttttaaaaaactaaaagtaaaaaagtaaaaaagtaaaaatgtttaaaaaatcgaatattaccaaaaacgtaaaaaagtggtaaaaaggaggaggtgtaaaattcccaaaaaagtttgatttaaaatgaccttgagaaaatgtaaactttaaaaggagaatgtatttgaattgttttctttgctttggaaagtgtaagtatttgaattgtggatttgtcatcccgactaaaactgagagaaagaaagacgaggttattagaaagtggagctattcacacagtgacactgtatctgtatctgtagtgagtctgtagtaggggggtttgaagaactactgagctgggtgtgggtatcatcaatgaactctatattccgtttcatctcacaaaggccatgccctgcaagacgacttgtcgttttccactcatccttctccaccaaacccagacccaaagttaaacccaaacccacttattccaactcttcttccactactgccgcctccgccgccgactctgccccttccttttctcccaacctttctcaatccccctcttcggctaccctctcgccctctggagatataaaacaagaaaaatcttctccgccggcaccggacagaccgaccgagattccgttccaggccaaggtttccaacttggtgcacctgatcggttacgttcacgcgccggttcagttcgaaacttcttccaacggttccttttgggccgccactgttatcactcagaaccccacatcctcttcttccgaaaatgaatcatctgatgatcttcctctatggtacttcgaagctggtcatctttattttttcgtacttgcatttgtgtttatttagtttgttagcattattctcttatattttggtactgaagtcattgcttaacaatttcttttgtgtgtgctttgaaaataggttgtgggaatctagtgtgttgcatttttttattattattatttgaaaattttcaattttgtagatatatactgcatgtaggctgggttagtttcattttctttttatttatttaaaaaaaaaaaaagatgaagaagaagaagaagagaagaaaattaattggagcttgttttagattactcaatgactctgttaaacatctgtaaataattttggtcaattttaatgttctctgatgtttattaatttcttgaatagaaaaatattatatagttcttcatttgtgttttgatttttactcataattcttgatttggcaagctggagatcttgctttaatattggaaatgggtcaagtttcatactagaatttgatttgattatatattggagaaaataaaggtcttgactgatttaattctctcaaatcatatttcaacaataaaccaagaagtatcaaaacaatttctttactactgtcaacaccaaggtcctttcagctacaaaaattaaagaaatacaattctgagagattttctatgctaaatcagcttcattcaataagtgaaactctttttcaacaagtaattttagaatgtaagtaggatgaatgaatttcgagaactttagattttgttacataactgcggcctatctttaatatatttgttttaggagtctagttttcatttgtggtactccatgtctccaaacttttaaataaaggtgtttgttatgttagggtccctacagtatttgagggtgacttggctcacatcgctgcttcccatttgaaagtaaatgatcgtgtctatatagctggaaaactgagtgcaagtctgcctcacttgagttataatcagtttcaagccagtgttcaggtatgactgattaaaccctgaatgttgttcctcaaattaagacttcagaacatgtggagtatgatgttatggaaatatgttatcaattttctttttttatgaaacggttttaggaaaatcgatcgtactgttcaagcaagtgttatggtttgattagcttaagcttttttttttcttctgtgtcggtgtttataaaaatgtggttccggaagaggctttggagatacagcttcagtttgagttgccaaatggattacccatgggagagtggaaagtagttctgggttagttataaaagtaaaataagtttggtcttgcaaaaattcttgaaaaaaacaaatcttgttttttgaatattaatattaaaattttccaaattgattttgggaatatacttcttgaatgcaaacttgatatgatggatgcattctctttagttttcttgtgaacaaatgtgtgatatatcaattatttgtgaacattaggttatggtgcatgctctcaactttgttgaggaaactgttcaaatgaagaaaagttctacgctttgtgtaccagaacaagggacatcattcatcaaagaaatagaaaaagggaccttgaataattctggtaatcctcttttttttttatatcttaatgttttgttccgtcaatttctactgtgtgaacagtttcatggtttctaatgttatgagttaagtattcaacaaaactgccccaggaaatttttggagcttattaaatgtgagatgaaccatacatacccaggagagggtcaatccttgctcattctgtctttttttcttggcatatcatttatggtggcatcacaatgttgctctataacaaattcttcccatgagactgatattacagttttcatttttattgtatttatgtcgaggaataacagtgcctaaaatgttttatttactaaactagctctcctttatgaactgacatgttatctatttatccagagagtgtttggttcttgttcttttcatcttggaaattcatattattagtaactagaactctgctttttctttttctttttcttttacttttttttttcagatcctgtgaaaacaaatatggactcactttttggcccctggtcagaccttattgataatccaaaagagtggttggactgtcgtgataaaaaagtcaatggattggtaatgagtgcttgatttggttactttctttaagtagattcactgtctaacttgtttcaatactggatttcctgtgatgttattttgtttgcaggtgagtcgaaaatatcctgatttcaaacggaaggatgataaaaaagcactctggcttgacagtgcaccaaaacaggttttaaagaaaatctcagcactggagtttgacatttcatctcaaaactcaaatgaagtaaagcagtttaaaggtgagactacacaagctttctatcgagtttaacttgttcctttgcctttcatcttcctcaagttctttagttttcttggattttcgccgagtacttggcatactctagttacatttttttgtggcacttttgttacatactttttaagttactcttgagatatctgcaaaatttccttgtgttgatgttttgaatcctagagagcttcttaaccaaactgagtcctgatctatatcagaattttgagaactatatgcatggggaactattaatggtattggactaaatactattttaaagggtttgtaagtaatttttggtgtgctctaccacaaaatgggtactaactttttgtttagatggtgtgaagaaagatggggattctgcaataaattcatggaataaccttattgataatccaaaacaatggtgggattaccgtaactgcaagcacaatggactggtgagggcttgcttgcttcggatttattttttctttgccttaacttataattgttaacttattatttatctccaaattttatctaggtgaatccaaaataccctgatttcaagcataaggatggtagccaatcactttggcttagtagtgctcctctatggctttcatcaaagattaaaggtctagagtttgatgttccaactccaaaatcaaaagaagtaaatgggaataaaggtgagattgtgcacttttctgatagtatttgtgaggaaggactaggagaaggagaagagaaaaacaagagaaatagaggtaggaaataattttggacttcatttatctaaaaaatcattaacactgaacaaaccctatatattgacggacactgctaaacaactaggaaatcagaaacctgatcaaggataaacatggcaactggaataatggaacgtaatctagaataatagtttggcctaggttttttaggctgtgtttcatttttgcatatgctattcacagcttcaattatgcgtgtcaatggcttcctgcgtaatgattcaagtaattactaataacaagatagcttaaattcttccatagctttctaatttatggacttgataggaacctacactttcagtcacagcagcagcaagaagatagaacacaacttaatagaacattaggaaatagagtagttgattccctttcaaaaataaatagggaaacaaacacgggtggtattcaagaccaaactgaattcacaatcagaagattgtctaaaataaaagttttatttgccagaaagttttatttgcaataaggtattaacttgagacagctatatctatcagttgtctaaattagaattcttttagttttctattttttgtgcttccttattttgtaggttttttatttttttaccttttgcaaggaccttattttgtaggtttagttcttaattaatcctgtttgttagaacttctcttccattgtcttatgttttcttgcccatggatggttaagtcttattgatgtggtcttttgttcatgccaaatgtactcttattatttaggtgatgatatgtggaaggagttgttggaaaaccccaataagtggtgggataatagaatagacaaggtacctcattctatatagacatattgacatgcatacatgtttaaaattcctcatctgttcatatcattgtttgcttaaaaagaaggtgatgctgtttgtatttgcagaaaaatgagagagctcctgacttcaagcacaaagaaactggtgaaggcctgtggctcagctcttcgccaatttgggtgcaatctaagttgcagcctcctaaaactaaaggcacacaagatgtgggccatgtatcaaagaatacaacgggtgcagtggcaaatgtatgtctcagtgttgctgaaagtttaatatttaatgatgttagcttctaggcaataagctattgccaataacaattgatcaaattggtgaggaaccatctttacttgatttttttttcttttacaggcgtatatggagaattgaagagatacacatgagttttgtcaagtccagcattacggtacacagtgatgtggtatattttaaatcactcattttttccttttttttattaaatgagattgcattatttatatgggtggttaaagataagactacatagtgtatattgg

SEQ ID NO: 21109 - DNA, 3162 bp, Cannabis sativa
  modified_base (3092)..(3101): a, c, t, g, unknown or other
cttatggcatttagaaattaaattcataaaaatgtggtaaaaaataccataaaaatctttaaatttggacaaatgtcatataaagatggtaaagttaagaaagccatatttatgaaacttttttatagaatcccatatatggtgtaattttcactttacaaaattatgacattaaaaaagcccataaaaaattaaacaaaacaaaaaatgggataagttgaaaactacctatttttattacacattaactaaatataattctaaaataattttaattgataaatacattcttttataatcaaaatactaaatataacctcacgtaacttattataattagaattcttaatgtacataatgggaatatgacctataaatctaggtataaattaaagagtaataaaataaaggtaaaaattgaaatagaaaataaaaagtgggtatacagtataatttccttacaaaaaattcatacccaattaacattatttaattatgccatgaaaaagtaaacactacaaaaattcccataatttgtgtaatttctacaattggaatctaacttttaacatatccaatccaatctaattggatatccaattttttgtaattggattggactggatcagttcagttcaattgaattagattggatcttgcccacccctatctccaaccacactctttatttttttagccaaattttagttaaaatagctaaaaaattaaaatatggagctatttttattattttgctctaatcatgcttcttattttagtaagtatttgattattttaataatattttataaattgaattttttttaaatataaattaatttaataaaataataaaaaaataatagtgtttttgattaaaatactattagaaaaatttagcaaaaaaatagagagctccgtatccattttatattatagagagtcattttttgtatggttgaagctcatttttaaaacctcactccctatcttagccaatgagtgtgtttagagagtatgattggagatgttctaatcccttacaatgtgttatatgtatttttgggaatgtgacacgtgtaaggttcaacattctagattcgcttacgtgcccattaaacatgcctaaataagtgaatagctcggtccaagaataaaattagactggggtccggatttgaccaagattgcgttacgggtaaagttggacaaatgaatttggaaggttagcgcaaccaaataactgaatatccgaggaggcatagataccctcgggggtatcacaaaagaataattgaagggacattgcagagcatcgaacgttcgagagaaatctgacgtggcatccctctaacattagatcccacagaatcatgggtttgtcccttgtaccagacctaggaaaggcacacaacacaaaaagaaaactacctattgtccaacgtccgcaaccctaacaatcactatacacgatcagcaacgcacgaccacttgtctacatcaggttgtacgaatacgtacggacaacagaaaaaccctctaatttgggcctcacctactcgactcaatgtcaatattataatgtagttaccccatcagtgggcttatttcatagtaaaaaccttagcgagtctgggttcacctgtgaacctgacttcagcctataaataaggctttcacccttcatgcaaatggttacaaattttggtcacactctgattatatatttagcaagaacacttgtgtaaaatactccatagccaaaaagctcaataattttgactattaactaagactcattaacaccccaaccgcataaaaacctttgtcttctttacctttaatcactttctttaggctcaatctatttcttattcggttttcaaaaaattaggtaaacacaatgtattcactaattgaacatttggatcatgtttggccagaattcagccaacccaaaaatgtgaaaaaccctgtttggactgagcaacgctcatgatgcacgagtcgatttgagtgcatttttcatatgtgatcgggttcggattagaccgatacccaccgtggacccaattattttttttattacacttaattaaaaaaactcatagaaaaaccttataaatttcatttttgtcaatacactactcattcctattaccattccaaaaataaatcaaacattataatattattcttattactatttctatcaccaattattactattatcattccattatactgaatcaaacactaactttattttaaagtaaaatattcataataaaatcagatcgtctcaagctagtgaaaggcttaggaaaaattttaaatgagatattttttatatgctatttttgaaaaaaaaaaaaaaactatgtatttttttttttttgaactaaaagaaattgtcacaagtgaatgtcaaaccaataacctcctcaaggataagctagatgcttaccacttgtgttagctcaattttaatgaaaataatggattacttttgtatatatattatatatatattttttttttacatactgtatattctaatttttaattttgagccccaaaattatgagtctcgagcctgtcctggataaaatttttgttaattccattttgggatatttaaattgataaaatattttataaattaattttcaatttcagttgtatttttttttatttccatatatttgtatttaattgattgaattaagatatgaaaagtgattagattttctatatttgaaaagtttgtcaaaaagggtaagttttatgaataaatcaatttctatttttctagttgtgttaatctgatcctatatgagttttctaattggtttgatcagatttcttgtgaagaaaaatgaattaggactttccttttcctaattggaatgtcacacttactgctcacaattctgtaggtatagaaacaaaaatcattgggttgattgaagatcttttttaggaaagtttcttatgtgttatggttttgttcagactgtgcatgagctgtcaataaggtatgtattgattataaatagaggaaattacacttagtatgggattttaaaagnnnnnnnnnnaaatatggcacatttaagtttgactaatttatatggtatttttttgtttttagattttttt

SEQ ID NO: 21110 - DNA, 4371 bp, Cannabis sativa
tataaggctctacaagtaaatcaatctttaaaattatataattacattaattaatgtatataaatacgagtgagattttttccataataagcaattaagggcactattttacaattttacctaattgaatcacattcaatatttttaagtctatccagagatccgattcaactatatattggacatattggatgttaaattttaccatccgatctaatccaattaatttcagtcattcaatcgatccaacaactataggatattggattggatcggttctatctgttggatgtatttcatatatatttatatttatataatattttagacctaatattttttggatcggatcagatccatccaatattttaggtccagtatgtattggatttgattggatggatccaatccaagaaaaaaagagtaaaatttttatgttaatatttatatgtacatatatattttacgtataacaatataaaatataattactcatccaaactaaatgaaaatactaattagttcgactggatgttggatgtattggattttcggacaccccatctaacatctgatccgatccaattggattttcaaaaataacatccaattcgatctgatcacaattggatatccaatatttgacagtcagttgtaattggattggatcgatttatgcacacccctattagaaaggaaaaataaacaaaaaataaaaaaacaaaactttctattttcaaaaatacgtgctaacaaaaatcacggaggcagttgaaccacactcatctcgaatgtccaccattttcattcaaaacccaagaaaattaactctaacaaaatataaatctcacccaaaaaaataatcaaatcccaacaaattcaaatacaaaaggtgaaacataaaaaaaaaaaaaaatagagatttctacctccattgataaaaaaaaaatacttaaacaacctaaaatcaaaaattcaaattgtcagagaatttgaatacaaggagatcggataaacttcgaagcttacatagaaacgaatcagagaacaaattcaaggtacaaaaatttctaacaattttcttcataattaaggtacccctgatttggtgttcatttcggagtctcggttgaggaaggcgagagctgaggcgttacaggtgtctttgcgttttgttggttgctttgtggtggaagctcatggtaaaagtggtggaattattttactgtggtctaatactgtgaattgcagtatcctttccttctcctccttccatattgattctttcattaggaaagaggagggtaaatggtggcgatttacgggattttatggcgatcgggatcctagtcgaagaattgagtcttggaaacttcttactagggttggaaggatgtactcgggaccttgggtgattgggggtgacttcaatgagatcttgcgaagcaaggaaaaattgggaggtcaaccaaaaccggggcacttaattaataactttcgaaaagctcttgacggatgtaatcttagggaagttgattttgggggcagctgctacacttggtgtaatggaagacaacataatcttatctttgaaagattagataaagtctacgggaattcggagtggtttgatttatttcctgaagctaaagttactcaccttgagcgtgtcaattctgatcattgccaccttccttcagtgtttgtataggaaccgtggaaatgagtctggggctaaatggcattctcgattccattttgagagtgcttgggctgaagaagaaagatgctcggagattgtaacggagacttggggggagggaggtagtagtaccacaacaagggagctgaatctcaaaatggctaagtgtggggttgctcttcaaaggtggaacaaggtcaagaagaaagtgctgaatatgcggttaaaggaattcgaagacaaaagagccattctttctaggagtacggatacaaatgactggcattacttgaaagaaatagagcgaaaaaacaatgtccttttggataaagaagagaaattttgaaagcaacgaagtcgcacactttggctgaaagaaggagatcgaaatactaaattctttcataggaaggcaaacactcggaagaggaaaaacactatcttggggttgctggacagaaatgagaattgggtgtatgggaatagaatggtgggtcaagtagcatgtgattacttccagtagctttttgaagcgaatccagcggccacggaagatttggaggagttccaatgaataattcctaataaaatatctcgtgaaacaaaggagtatcttaaatagccttttactaattaggaagacgtctatcgagcaatgcgagatgttcaccctcaaaaagtcccgggaagtgatggaatgtcgggtctcttttagaggaattattggccgatgataggtgatgaggtgtccaaagtttttttgggtattctaaatgatggaaagccgattgatgacattaacgatactctaatttgtctaatcccgaagattgagaagcctatccaaatatcaaatttttggcctattagtttatgcaacgtggtgtataagatagtggctaaatgtctagcagggcgcatgaaaaatagcctttaccaagtgatttcggaagaggaaagtgcctttgtagggggtaggttgatccaagacaatgctatcattgggttcgaaagccttcattgcatgaagacgagaagatttggtaatggaaggaaattggctttaaagctggatatgtcaaaggcgtacgatcgggttgagtggtgtttccttgtaacaatgatgaaatggcttggctatgatgaggagtggattgaaaagataatgaggtgtgtgactagtgttttcattctcggtgctaataaatggggaaaagataggcaatatccaaccaacgcggggtcttcgtcaaggtgattctttgtcctctaccttttccttatttgttcggaaggattatcttgtcttattcaggcagctgagagggctggaagacttcatgggattcggtttgggagggacggggttacagtgtctcatctcttcttcgcggacgatagctttgtgttccttgatggaagagaagaagagtgtgatactatgatgaaaattctacatcgctactctcggcttttggggcaacaaatcaatctcaaaaaattggaagtaagtatgggaagccgcatatccaacaaaatgggtcaaaatcttgctagtaggctgggggttaagcttgttgctcaacacaccaaatatttgggattgcctagctttattggaagaaggaagaaagaggtgtttgaggtaattaaagacaaagtttggaataacctaaagagttggaaagcaacgatgttctcccaagccgacaaagaaatcttgataaaggctgtgatctaagccatcccaagttattccatgagttgcttctagagatagaaattgggcggttaatatacggggaatggaatccccacccccatccccgctacctatttatgcccccatccccgccccatccccgtctaataaccaccaaattcggagtaggagaatacccatcggttatggggaacccatcgggtatccattaaggcaaaatagaaaaaaatataataatttaaaataattaaaaaagcatttaaatttaaattaaaccaatattctcacaaatatttattatgcctttataatccatagaagatgaaagacaaatttgcctcaaagttaaaaaaaaaagcataacctcatagtcatagaagataaaaaaataaatttatctcaaagtttgaaaaaaaaaagcacaacccaagtatagtgtcatagtcttataactctcaagtctcccaacaaattaaaatgtaaatatagataaaccaagaatcgagaataaaatatcttcacacttgtaatccacaatgatcaccagttcactaccatcattagatcttcatgatttaagcatcaaaatttacaaaacttagaccctacaccatagaagaaataaaagtcaagaatatcaattattagtaaataagaagagaaaaaaaaaatacaacaaacaacttactgcttcatcatctattacgtccttaaacattgtttgatatttttctcagtctgaatgcttatctacaaaaaaataaaataagtaccgttaaaataatttatgtgtaaaaaaaaaaaagaaataacaatagaatcaggaggaaaattataccaaatttgttatcccataaccaatcttgtgtacacactaaatgtaaagcccgcttagctaatttggaaattatcagttaattgggattaattatgaaattatttatag

SEQ ID NO: 21111 - DNA, 5228 bp, Cannabis sativa
atgatctggatcaggtcggatcagagtcggatcagatccgacccgccccattgacattcctagccgttaagtgtcaattaaatggtcaattggtagtccctgattggtccaggtctttaatttatttatttttatttacaaattaatttaaatataccaataaaaatatgatatgtggataatgacttaacatttactgggcatatacttacagaaattcaaaaaatataatttaagtattattactgtcagaaattaaacttgagtatttttctacaaccgagagttaaacgtaggtatttacaccgtaaattacactattaaaaataataattttatttttttcaggcaaaaataataacatataaaatataaaaaataataattttattgatataaacattttaaagtaaatagtcactatgtataataaaaaatagtcatgtgggtagtatattatttgaactaaattttcagcatgtaaattatttataattatctaaagtttacaattggtcttaaataattataacatatacaattataaaaaaaaatagactaaaaaactcttttagaatgtctcaaaatactccttttgaagagtatactctagttttttccttaatccccctacataacccaaatttcccttttgaaaagctgaacgacaatttagaaaacatcattttataatacaatgataaatatctctcatctttcattgttttaattgattgtaataatgtaggaataggaataggatcccttatgattgtcctaattagagcaaagaaatgagtgtgaatattttattagaaatgctaaagggtactagtagtgtctaatactttttttttagttcaattaagtatcgactcctatataatttaatataataacttttagaaaatatcgctaaccaatcgtaatatatcgagaaggtatctaataggaatgctcatattttatcattataccgattggttaaaatacgcgtcatagttaaaacattacgtaaaatgatcatcactgatccatccatgtgctaatcattaatattgtaaaatggtatatcaaaacgtgtcaacacgtaccaccatcaccatacataccagtacttttaatcataaaccactgcgtttcttttatttattattattattagtataacattttactcataattagacatttattattgcattactctttactcatatcacaatcatgtaaactgaaaaattctaaatattaattgaagaaatatctgacgagagaaccaaggaatttacattagcaaagcaataaatagcatgtgaattggaaagtactgtcatctacttaattaagcttaaattaataatgggactccaccataatctataattaaccctcatcattctcttttttatattattactgctattatttcttgtcaaacacccaaaaaaaaactaacactgttcttacacgccaaaattttactaaataaacctccattttgcatgggacaccacagattcacccttcgccttatataaatctatcttcatctccctcctttctccaattattcattttcacatctcacaactcacaaacccatctttttcttattattgcctttttttttctttctctctctcttcattttccttgcttacccacattgccggattctttcctctaccgggtcatggcggttgggtttcagatgatccggttcatatcgtctgggtaggtagtggaatgtagagagagagagagaaagagctgaaagaagaagaaaaaaactaacgatggagtttgagagaagtagagaactattgctcctctggtgtagaatccgaatcactcgagtagccctcgtgggtggaaaccacaccgcttccaggttttgtactcgctagttccctcattttcttcccgattgttagattcatttgtctctgttctatatcaaattttcgaacaatttgctgttctgggttttacttttttctgttgagaaacgaaaaaaatttaaagcttaattgatcattcaattctcaagctctgctttggctaagctacggatcggatctagctgtttacctgataaaagtttaatagggaaacagttatggaattggctcctgggagtggtagagccaagaacaaaaacatgagcaagcatgtccatggtgaaagaatggggttgaattcaaatacccttttggtcattaagcttcctgatccaaaggttttgcgtgtaatttctcggtcagtgtttctggctgtgattttcattacattcccatgtattgggtccataatgagatggagctcagctgattctggttccagcttcgagactggtgccattgattttgagcaattagatgtgcttctccgtgatttggtcgacgaggggcttctattgaagagtaataaggctttggttgttagccccattgttcctagtaccgttcacaagcttaaaaactttgatgctaatcaaatggacatggtaatggatacggctttggagggccaaagctcattctctgaagagttgtttgattttgtctacgcatccaatttggctgttgacgttgagtttgtggatcatattgtgaaaattggtgggattttggcattccccttaagcaatgagaaggcaatcactctacgggacatgaccaattataagatcgcttatctaaggcgatattcatccaccattgtagccatgaggaaaattggctctacagaagcttcttcagcttctagctattccccaaagagacggcttttaggattggcaactgaggccacgaaagccgcagctttagaagatttggaagaagcattgctcgagccaccgagatggcctataaaaaacttgaagaactactcaaggaagatgaagttcctgccccatttgatgggaaactctctcgacggttttaggcgtcgagtctttgttaatgtggggttacctgaagataaaagggatgtaaatcaatggtttcatcaagattacccaaaaatggagcaagagtttgaggtttacaaccttgatttggagcctgaagaaggggctattagtagtggagtgatttttcaagagaatgatgtccccgattggctgaagatgaatgtgcgtgaagaagagtatgttgtgatgaaggcagaagcaggagtggtagaggagatggtgaagaggaaaacaatgcatttggtggacgagttgtttttagagtgcaacaaccaatggtggaagggagaaaataagagtaagagggcttattgggaatgcttggatttgtatggaagagttaaagatgagggagttgccgtccaccaatggtggggttgaggcaaacttatgttattttttatctttaacctattttatgtgtcggtgtcatgtgaaaccaacaactgaatatgtactagtaataaataaagcatgggagagttttaatgttgggtttgtgatttgtgttatgttaagcttaagctttctatgaatggaggctttggtaaaataaaagtgtgtgtcgtttgcaatttgtaatttatgggaatgccacgtgaggagaatgacctatgtgtatcctccttttggcccttgtcttaaaatgataatattaataagatgttttatcttctttgtgtgctttcttaaaataattagtcttttatgtagatcgaagattcatacttcatggtactgatattctttacagaccataaaggaaaaatgtctatttatctcatccatctattattgctcatattaacacaggtcataatttagtgtagacactgtcattatcattagtaataaacaaagtttatattattgtcccttgaaaagaaaataatatttatacagcatccatagaataagagactagacctaataaagaggacaaaaaagcataaatcttcggcatttagttagaagtaataaaatagaatggaaagaaaataatttttcttctatttttttatttgattgcatttaaaagtattagaatgtcattttaatggaataacttttccatcattttaaaagaatgattattctattttaatttagaagaaaaaactattttagtgcaagatgagaaaaaatttaatagtgtttgtattaattttttttatacattttaaatttgattatctttcattactattcatattctcattcatattcttattcttatattttcattcttcccaatcaaacactactttatattatttatgggcgtgtcacacttatattatttatgggcatatcacacagtgtgcaggttgagccaggcacgaacaaactagcagtaaacggactggaaattaagtaaacattatactattatgtttgttttcaccaataagagcattctcaatagcttatcttatctaagaccgacaaaatgggtcagacacaataacacgaatcgaaactcgtacgagagttagcgggtttgaattcgccttaaatgagtttggatcgtgtttgggttgactagtctaactcgcttaataaacgggtcatgttcgggttgacatggctaacacgatattgacccgttaatgacttatttaaagctattttagtactttaacgtgtcataaatggattataaatgtgttgaatacttcataaacgtgttgttaattgacatgtttaaacaaaatatgcttacaaacggattacacatgtcgtgtcgcgtcaacccgtttataaacgggtcgtgtttaggtttcattttttaacacgattattaaacgggttgttttcaagtcaaacatgtacctattatacacgagtctcgatccgatacaaacacgaattgccacccctactcttatctatcttttaaaatatattaccaaactcttacttcttttattttacattaaacttttacattacactttacattaatttctctatctttcttctctatatcatttaactattatatttttaatatttgttttaataaaaatattaaaaaaatagaaaaaaaaaaaaaaaaactaataaaaaaagtcattaattagagagaagaagaaaagacaaaatattattaaaaaaatatttgaagaagctttaaagcttctctaaaggatctctatttgaagaaccaatatacatcatctgtttgctttcaaaaaaacatatatcatctgttgttggagcattattttaacaattttctttaaat

SEQ ID NO: 21112 - DNA, 2988 bp, Cannabis sativa
gaaagccaatggcgtcaaaagtcgagggagatttggctcaaattgggcgataggaactcaaaattctttcacgcctccactgtgattcgaagaaggagaaataagatcatggctatcaaagacagtaatggagactgggttaggcaaggaaatcgcattgcccatgttttcaatgaatttttccatcaactatacacttccagtaacccggtcttgggatgtgatttcttccaactgttctctaccgatattactacactggacaatgctatgatcaaggctattccgacgaagggggagatcgtttctacggtgaccgcaatgcatcccctcaaggccccggggcctgacgggctccctggttgtttctatcgccattactggaatattgtggaggaggaagtaatcaccatggtccaaaaattcttctccgagggctctcttgatagacatctaaattacacttatatatgtctgattccgaagatggaaaatgcgagttcggtggaaaaattcagacccataagcctgtgtaactttgcgtacaaaatcatgtcaaagattattgcatcaagattgaggggagtgatggataaacttatctcaccgatccaatcggcatttatcccagggagatggattgccgaatcctcaattctaaccaatgagttagtgcatacgatcaaaacaaagaaagggaagggaggattaatggcgatcaaattggatatgcacaaggcttatgatagaattgagtggagttttcttgagagagtgttggaaggtaatggttttgatgagaaagttagagagttaattatgaaatgcgttactacagtctcgtactcagttttattgaacggggttccccagaagaagtttgtccctcagcgaggactacgacagggagaccctctgtctccgtttctcttccttatgtgccatgaagtattgtcaaagttattcctccatcagcaggatttaggtaagctcaatggcatcaagatatctcgctcagcccctccaattagccatttgatgtttgcggacgatacggttctattcgcccgggctaataaagcaaacgctatggctatcataaattgcttaaagacatacgagaagtggtcgggtcaaaaatgtagcttagataaaactagtgtgctattctctaagaatactttgcctaacgtgaggcaagatgttctaaggctgctccgagttcaagaatgcgggggtaatgaaaaacatctcgggaatccttttgttttcaaaaggagaaagagggaagacttcaaattcctgagagataagatactccagaaaattgaagggtggaaatcaaaactgctgtccttggccggtcgaactactttggtcaagtcagtggctttgagcgtccctgtctattctatgtctacctgtaaaattcctctgtcaatttgccaggagatggatagtctgattcggaaattttggtggacggggggaaatgacaaggacagatatttggccttaatgagttgggatttgttatgccgtcccaaggctatgggtggactggggtttaggaagatggagcatatgaacttagctttattagccaagttagcgtggaaaatggcgtctgattctgatacgccatgggtgaactgctttaaggctaagtattgcaggaggaactccttttggagtgtcgagagtaagagccatgattcaactacttggaaagggattctttctgcccgagagatccttaggaagggcagcattacccttgtggggagtggagcgaatgtcgacatatggaagcaaccatggatcccatggttgaactatgcggagttcttaagtctaatgcaggaggtgagaggtcgatcccctctgctaaggtcgattgcagatatctccttcccaaatggccaatggaatagacagcgagtccaggagatttttggtaatgatatgggcgccagaatttgtgacattcagagactaccaactctcaattcagatatgctgttttggaaatatgctgaggatggggaattctctgtcaaaagggctcttaatgtctgttccaattcaaatagccttaatgttgcaaatgaccataatgctgacattgatagcaaactatggaaattagtttggaacgataaggtccattttcgactttcggtattgatttggcgagtcttagttggttgtctcccaaccaaggataagttgcattttgtgagggagaaaacctgtcttctgtgtgactctgcattggaaacaagttcccatcttttctgggagtgttcttttacaagagcactctggtttggagggcctttctcagtgactattgaccatgggacatctgatgctccttcgcgaagaatgatggaaattctgtccaacattccgccggatctcaggtatccttttatcaatttctttggttgccttgcggactgtgtgtggagaacaaggaatgatcttatgtttaaaggtaatcgggtgaaaatggacaatgtcctgaggactctgcatttgagatataaggaaaccagtgtggggtgtaatgtgattcagcaaggtcagataagggacaataggccatctcatcttgatcatatctctgaaagcaattcaactttcatgtgtatggtcgatgcatcttggaaagaggaagctgcggggttggcagtggtgttagtcgatccatatacgggatcttggaaatggatggcaaaaagatgcaaggcagcctctcctttggaggcagagatgtttgcgatctggtgggctttacagatggggaaggatatggggcatgattcgattacagtcttcactgatgctcaagtccttgcaaggtcttttcaggcgaggcgatgtcccccggtgtggaaagttaggcctttggcgcttaacattttaaatttatgttctgattttagttcttgtaattttttctatatttcccgtttagacaat

SEQ ID NO: 21113 - DNA, 2153 bp, Cannabis sativa
tagggcataaaacccaacaagaggcaccacaacagatgatgcctcaggattctcctcagtaagaggtactacaacagatgatgcctcaggaacatcctcaagattcaccaaggccaagcaaaatcgttgccttcactagacactgaaaaaaaagttaaaagaatgtccaagaagtcagtaccctacatccaaatgacaagtagggtacatggggaagcctcccccagaacagcttggagaggaccccaccggactcatcaccattacaatcgctacaatacaatagcctatatgacaagtcgagaacctcaacgtacaacaagcaacaaaatggcccagattttctttctaaaggcaaagtaaaacaaatgcatataacaaacaaaagaagaagtaagcaaaaggactattaaaaactccaaaaaaatgtcatcctcataatcagggagacctcaagtctcgaacatgcatttctatttgtgtcgcaaacgaaaatacctcttttaaaaccctaaagccagaaatgctcgcctatgtacccaaaaagtgaatctcagacatatataaccctaatccttagaatcatgttctacgcatgcaaggtgatcaattccttcaaatatgagaacgacatttcaattgaaattgaaaaaatagtctgaaagaggaggaacactcacttgtactatgaggaaagagtagggtggtggtagtgcactgggatattgtcgtttgcacaacggcggtggtcctcctaattccaattgtagaacggttgagaagacgacaaatgttagtggaatactatggcaaagtggggaggaaggaggttgagtttagaacaaggaggtatgaaagggttagaatttttttgagcaagaagttcatacaaaaaggggttctctctggttagaaaattgttgatgaagtaaagaaaataacttcaatcgtcgaaaatcccatttatatgggtaacaacgactggaaggattttgaaatgcacgatccttatcaaatggattgaaggctagatcatccaacggtagggaatatgaaagattgatatttaatgcatctaaaaaaagagaataaagcattcattaatcatcatttcattatcgcatccccaatgcacctgaggacaggtgccttttcaaaatcagccatcattttccttcgcaagggtcgcgcctaggataaagagcgtgagcctcaaggctctgctaacccagtttcatgcttcgccaagtcttatgggatatcaccaagaatagttatcatgggctcttcctttagtctcttgataacctttctgcgagacaaaaatacagaaccaaccttcccgatagcaagctcctgacactttcaagtcctgagagcttgggggtaaatgttatccatgttcccagataggttctacgtggagatagcaaaagggtgccacatcagattgtatgagaatatcacgaattccctttccttttaagataggatcaaggaacgcatcaaagtatctaggagagcgtatctgttgaaaaggaggaatcaatccctgaagttgtaacctagtgctaccggtatttggaggcataggccttctgggggttcttaagaataggctattccaggaggtcttgacctccacttcctagaagccccctacaaattaacccagagatacactcgacgtttacaccttgtctgacaccaagtcagatattgtcccctacatcagactgtggttgtgcgcgtacgtgcctctatagtgctaattgtccaacggcttgtctaagatattgcttttaaaggagaagccttcgaacgacatgtgtccatatccttacttgacaacctgcatcgattacgcactatacgatggaagagctacctaccaactccagccaattccagatcatgcatcgaataacactgctcataatccttcaactgtcgggaagcataagctacaactctgtcagcttgcatcatcccagaccttgtctggatgcatcacaataaacaacaggcttttcttgttctgatggtaaagctagtactagtttcatgatcagtcgtcgcttcaactcttcaaaactcgtttcacacttgtcagaccatacaaaccatttgttcttcttagtcaattttgtcaa

SEQ ID NO: 21114 - DNA, 2617 bp, Cannabis sativa
tacacaccaatactcttcaccaacaaagcttttgcaaattatttctcccaactctcatggcttcttctgcaattgctccaaattcagctccttttctaaaaaaggtgacttttttaacttacccacttcccatttccttaccattttcataacccgtgttttctttttgtctcagaaagagttgggtgctgctctctcttctttctcgtcatcaccggcattttccgttcagagatgcaagagaacggtctccaagaagatttgttctgttatgactccgcagcaatcggaacgcaagcccgccaccactggctcggttggggtttcttctatatttgattttgggggagatttgcgttgatgggtatggtgtcttactttttttgggtttggattgtttttttaatcaggtcaagacagccatgactatgaccgaaaagatttttgctaagtcttctgagaaaacccatttgagccctggtgagaatgtttgggtcaatgttgatgttttgatgactcatgatgtttgtggccctggttcctttggtatattcaagaaagagttcggagaaaatgctaaggtatttgatttttaatggcttttggattgtggtgattttttttggttgaacttgtgttattgattggaaatgaattgttgcaagttggcgtttacatctcttgattgaccgaagttatatagtaatgaatgtaagagtttgtatatgaattcagagaagtaatagtttaagttgtagaaatgatttacccaataaccttaattatatgcttaaatcaatgtaacagtgtcttagattggtagagaacacatattttaattatatatagggagtggattttgtgactgtgagggaatgtattcctgtttatttcgatagatatatatacagagagagtgagagagagacttggtgttggcaattctcttcagtgtcatatttatatagctaacctcttaagtttacaatgttctgattaagcatttgttgaaggaagcgtgtgtctgggtagctgtaacattgcgaaagaggctagagttatagctaactaactcagacctctctgttcaaagggaggaacccttcttatgtggtttccaacttcataatggctgatctatctcttctcgttttacatgtagctgttttggaactaattgttgtaatttttaatttaaggtttgggaccgtgaaaagattgtgatcatacctgaccattatatatttacaagtgatgaacgtgcgaatcggaatgtggatatcttaagggatttctgcactgaacaaaacatcaagtacttttatgatattaaagatctgggcaactttaaggtatgactaacaattttcactatctattcttttcttttattctagttttatgctgctttgtcccttagttattgatattgaaataagtttgatataaatttggcaggctaatccagattacaaaggtgtgtgccatgtagctcttgctcaagaaggtcattgcagacctggagaggtacagtttctttgtcttaagatttcttagcctcctaagaaaacagtataatttacattgcacttgcagatattaatttaaaccccttaaattggtttccaggtcctgctaggtacagactctcatacctgcactgctggagcttttggacaatttgctactggaatcgggaacactgatgcaggttttgtgttgggcactggcaagagtctgcttaaggttacttttacttgattgaatttattctgctcttctatgcaaatacaataatctatttagtctgcataaattaaatagaataatagcccaatggggctttctcttgtctgtagccttctaatgtctctcagtgctttgatctctcttcaccttaaagacaattacagttttctgatgtatttggtagtatttttctactgttcataagtgatatagcttgtagcttcagataagtttcctgtgagctttgtgctattcttattcatgactgttgattgatatttggaactttagattagttagttaccagtgaagtttctaagcttgtagatgcaggaaattaaaaaaaaaaagaacaatcctcgtaaggatctaaactagtagcacttctgaaaagtttcctgtgaacttattctactcttttgcatgagtattaatatttggaactctagactaatcaccagtgaagttctttttttttcctcttttttttcttaactcattcactctccaacttgagattctaccacttttgtgggatctaatttcaataagaagtgcttgagtatctaattcttatgtgcctcaccgacagcaaataagagctgcgcgctatctaatctcataaaattgctagtcttcttgaccttagactgaaattcaaacgtccttgtgtgctgagggtatggaaactgaaaatagaagagggctaccacaaagagtatttcgcaaaatagctttttttatttttaaaggcctatagtcacacttgacatccttacagaaattctcaacaccctatttggaaggctattttccaaaaagaataccaatttgcaaagtgacattataaaagagtttatttttacca

SEQ ID NO: 21115 - DNA, 2936 bp, Cannabis sativa
acgttgtcaatttacatccaggtcgaccaaggaggagaaagttaaaaaaagaggcggctttaataaattatgtagcctttctccacagttgcaagaagttgttggagagccagaattgtccaggccagaggtttttattttctaaaatttggatttgagtttgctttccctttatcttttaattgaatgcttttcatttttctgaaaccatattcttagacctgtttacgttgtgttttgtctttaggttgtgaagaaagtatggtgccacatccgggaaaataatctgcaggatcccaataataagagaaatattatttgtgatgaaccaatgcgtgccattttccgtgttaaaacaattaatatgtttcaaatgaataaagttctgtcgaagcatatctggccattaagcacagaagatggtacttacataattatgtttcttctcatctttatttttgtgtctgaatgtgtggtatgattgtgtttacttataatattaggcttgttatgatcttgcatgtcagaggttcatgtgggtttctttgccatttatagttgtgctgtatttgtttctttttttcactagtggagtttttggctgggtttggcttttggtgctatacatatttcaattgcaacactattataaacacaataaatgcaagtaaattatgtaattaaacatggattcacccacttcttctgcatctcttgtaatttggtgaatgctgaacatagccacctgggtgttgaatcatattttaattttgcatgttgccgtgtttagactgattgcctctttactccaaccctttctagacagaaaattattttagttagttcaggttaatatagaaaagggagaaaacaagatggtatctcatcatgaaagatattggtagattccatatattagtctttatatcagttcttctaattgtgttatacatatcattcagttctcgtttatcttttctttttgagagttcttaggatattttactagttgaaatgccatatgatactgatattgtagttgcagtttttatatttctccactttcaacttaactgcaacaacaagcttccacatttcatctcgctttattttatttaacggtatattataatgatccttactgtctacgtttagtgattcattcttaacatgtcgattgagtggaaatttaacttggtaacatcatgaaaactcaggaattgtgaaacaaaagcaaagagctgatgcaattgacgattgtcagtctgaagtagaatccagtaagacagtagaagaagtggaagaggaagaggaagaggaagtaaaagtgaaagtaaaagatagtaaaccacaaaaaaggaaacgagggtaagttcccccactcttctttttatgtttgttttatggaaggaatgatccaagttaagcttttattcatcttttgttttgtttcttaaatttgttacctcgtgaagtaagtctgctgaagtggataaaggtgttaaaaagaaagcaggtggttttactaaagtgtgtagcctttctccacaacttcaattgttcattggagagtccaaattggcaagaacagaggtagtttgatcggtgtacaatatttcctctgcatttgttatttcttcttgattggaatcagaggaagttatttgacatgcatttgaatttattttcccattgtttcttctcctctgttgtgttcaggttgtcaggagactttggcgctatattaaggagaacaatctacaagatccaaagaacaagcaaaacataatatgtgataagtcattgcataccctttttcatgttgatatcatcaacatgtttcaaatgaataaagccctagcagcgcacatatggccattgaagatagaagatggtatgtttttaatgagctttggcattttttatattttggtatctcacacaaaaacgaaatatgtatttcaatggtaatggatcaaaatacatctcatatttgacaatatgcatggtagaaagcatgtctaatgtgcagtttatccttttattgctgcatttgatgcagtttatccttttatctcatattaggtttagtctgccaagctttatttcagatcaaccttccatggtgtaatatttgtagactgtccctttttttaagcacaaaatacaggttcatattttagggcatctatctttttatatctgtattcttttgtttgtgtgtgcatgtttgaagctgtatggtagtttgaatcaattacattatttgatatgtagaagctccagcggactcttcacaaagggatgataaggctagacaggatcaagaagaaggtgatttggatgttaatgttaccacatgtttgttttctttttgtatgccattcatttataattctggtggtgtctttttttatattattttatttttcatttggtggatttcttcaaacttttggtggtttgattcatttacattgtttgacgtatagcatctccagcagactcttcacaaagggagaagcagtctgacgaagagcaagaagagggtaagataccatatttgactataccaaattggactgtagatgttaacagggtatttatatgtttcatggataggttgagtggtcaagtccatctgttctctcctatttagcaatattgctcgagtttgctgcctctcagaaattgtagtgtttgacaagagagggaccagtgtcaaggaaaaatattagttattgagtgtgcattcataaatttggttatggcttaacttacatagccaactaatcaagacatgactgaggtcccttattgttgtttctggaacagcgggcaacttttgttcttttagatatagatgagtgcgaacaaaaataaaaatagccaaagaaaggaggttctggtcttcttaaattggggacttttaggtg

SEQ ID NO: 21116 - DNA, 3484 bp, Cannabis sativa
attaatggactttatttctttgaaaatcaacaactcttcaatattaatggactttatttctttgaaaatcaacaacttttcaatattaataattatttacttctttgcagtgtgatattcgtcacctcttagaagttgctctagccttgatatttattatccatgttcttaagtacctttggtggatgctattctcactgctgcctattaacaaccccataatcgttcacttcgttttaggacaaccataaaactttgcctattaagacatttggttgtagtgcatttcttcatgtatccattggttactctagggatgcactaaacttgaccctagagccattaaaaatgtattcattggttactctcctacttaaaaaggctattgatgctattgtcctcttagaaagaagatgtatgtctcaatggtcgtaagcttctttgcaaactctttgtacttccctcccaccttgctccaggggggacaacacttgtctgcaacacaaggctttgtggtcatgggggttagaactacctctcaatcaatcttctacaaaagactttgatcaaagaatttgaagtcaaggatcttagaacactaagatactttctaggtatggaatttgctagacataagaatatttttgtatggaaaaggaattgcattcttgatcttctaaaagaaaccgaaaatgctggtagtaagccttgcaaagctccaatcaaacttgtaaacaaagcatgaaagttcatagcagatacatttgacaagggaagataccaagagttaggtggaaagctcatctatctctcacacactaaacctgacattgtttttgctatgagtctagtaagtcagtatatacatacatcatgttcacctcagtagttgaagtaggcaaagtgttatttttcaagaaagctcttgaatgaactgttgaaacagatgtatataaaatcaacacacatcttacaaaagagaagcttgaaagtggtttaatttgcactatatttgtctctacatagaatcaatttgcaactcacctttccagtgcagttttttacgtctctagttgacaagcttggaattggtaatccattttttagcttgagggaagtgttggaaaacatggttttgacctaattaatttaggagattaaatgttatatcttatgaggtttagtagttattgtattcattggttttagaaatttagtttcacctaggatattctttgtaattcttttttagtttagcttctggggatgtctatttttatatatttgcactaaatgtaatgtatcgaaaaacatttaatgtcagtttataagtatcaagattacatattatgggctgtattcaattgccagtagcagcctctggtgtgttgtgagtggtgtcaagcgaattgggttttttttattttttttttattttatcaagttgtaaatatgattatttctgaaatgttcttataaatatggtattttctaatttttgtttttttgcttacaaatgttttctttgtgtaattttatgtagtttagttataatttttcataacattcttatgtatatattggttggatgttggtcatctttccctaacaaatgtgcgagtttaaattttcccaaatcacagtgggtgtgaaatgacaaaatttgctttacaagaaggttgggatttgattgagagggtgactagtatttcttaagcatcttatatactaagtagtcggctatgtcatttgattgcaatcatactagtcttcatgtggtgtacttactacacaggagtcagcagcaaactatccaagatgctacaagtgttattattggttttcagtctagttagtgtgcttttgacggtttatgtccaaataggcagttaaagaatagtcaaggctgagttgtgactcttgtgagttaatactatataatgggattttgaaaactaaccacatctttggattatctcccagtggcattcccaaatatttcaaaggccaattacccactgcctagcctatattacttgcctttgaaagcagctacacctcattcagatcagtagtcttatttatatgtagtgttgcacagtaagtggatttctctgaattaccttgagattgacggtatttcttgtaatactatgtaatttttcgtttttcagcttgagtagctgtgtgcattatcaatgagaactaatttagctatttctagtgtgagggagcgagggaaggaggtttatacaagttgagtagggtttagggtgatgatattttaatccttttggttatgtattttcatgttttatggttttctggtttctgtggtgattgtgtagttttcttgaaaaaagtatgattagtattgaactaaagtaaagttgcatatgctagagagttatgattactgttctgtttatgctagttctctatctttcaaaacattaaaaaataagggtggtgttctgttctttttttcccagtcctgcataaaggttgcacttgactttgtctcgccagaaaatgttggtgagtgcattcgattagcagaggaattccgagaacttcccattagtcacaaggccaacgaggacaaattggaggtacgtgatctttaggttcatgtaggatggtgttatgtggttaatgccttatctattcttgctgtttgtatttgatcagatcacttttagttgtatctatctttagagatatcccatactgaaattctacgttatttgtagaacttatgtggcagtcagtatatgtaaggactcatttataacttacataaactatttttaatttgcaatttttgagtaggtgaagaaaatgaccttttatgcaacggcgtcggctttggaaactctggatccaaatttagactttggtttgtttccagaaaaatggttagtttgtcataacttgtatgtgtttattgcaaaattgttttaagacttgcttcaagcttttagatatttctctattatgttaacttctgtaaactaatttttctttttctggtatggttccgtgtcttgaattcgctagtagagagtatattgagataagtagatggtgttattttagcttattaaaaaagttggaattgccagattaactttagtttgaattatttatcagacgttttttttttcttttcttttataatcccattattggattgtaatagaagttgtgctcattctcaggtctgaaacaactgggtcgaagggaaaaaagaagatcacccaatcctaattactttcgacttaactattcaccatacttacgactggtataattttctcccttgtttttggagttgtttattgtatcaaaacaggctactctgcccacgtgccaggagttctctgattttgtctagtagtattggcagagtttaggtggcacaaggaaaagttaattcacttttgtgagaaactccttctgtagatagatatattaggaagta

SEQ ID NO: 21117 - DNA, 3032 bp, Cannabis sativa
aataattactgatcctcgtttatacaaaatatgaaatttcaatgataattaaaaataaaatgaaaaacaaaaccgaccctttcgctataaagaaaaaaatattaatgaaagtgagacaacaaatcaatatttcccagattttgaggtagagcagaagtccccgacagtcaaaaatacatgttcccccaataagacatccaccgcaggaacattctcaacacagccaacagttatctgcataagatgatcccaaacgtttagaaaaacagaggaaaaaacaaaaacactacatagtaccaacagacacaaccaagctgctgctactggaagaggaaaaaagaagagccgaaaaaccaaccttgccatttccgcgctgaaactcagacttcaaattcgaatgatcccttgacaacaaataagtcttgagaaagtctgcggattttgtatttcctgaaagtaatgaaagaacattccagaagaaaactcagcaagtagtagaatacgagcatgactctatggcgacacaaatacagagataaagatcgaactaaccagaacataattggagaatggaatcagagttgaaggctagtgcaggtcgtgacaaactaattgcaaatgacataccggaaatcccatggaaacgttcctcgccaataacaacctatatttaatccataaataattatcaaggaaatccaggagtgcataacattggtaacatgcatgcaaaatttattagtaagacctaaagtgcctatattcttttttttttttttttcgtaatttgaaatcactgatattcgcctgcaccattatactccccaaaaaatgcttgtcttacaaattggctttaaaatggtagtttaataatctactgtatcactagagttttctttaaatgcaatatggttgaagaaaaaaaaagtcctgaaaaaactctagtttagtagaaccaatttgagcatccccttgactacaacttacagcatgcggtggcatcaaattggagagaagcaaaggagaaccaattgcatcccttatgtaaagttcctgcaagtaaaaaatacatagttaaatactagggcaatatatttattaagttatactggtgtaaatgatatctacatgtacaaatggaaaaaaccacaacgatgtgctcatgattctacaaatatcatgaacaagcagaaatgagggcatacccatggataaaaaggaaataaactactacctgtgagtgcaaaactcgttcagagattgatttatcttgatccaacgattcaaagtagacctccacaatgtcagtaggttcaagtgcaacttttttacgtaacttctgaattctattaacaatctagattgaacaaagaacaaaggaaaagcaccaatcaatcagaaaatgaacatttctaaccgtaaaagtttacaagaaatcagttaacttagtcaactataaatcaagtagacaaagaaaccacttccccaagaaggagaaaaatgaagaactatacaaggatacaatatggacatgtaaatcgcatataattttttttattctttttgctgtgtacatgtaagtcacatataatatgtttcaattactacctcacgagcaacaccagcctcaaacaatgattgatctgggcacaaatccaaaattaccaacacatcccctggaacaaggaacaaaataaaaccataaggtacagatacaggtagagaacattcaatgacaaatagcaaaacccataccatcccctgctgcatcaacctcttcttctgttttaccatctggacgtctaaaatccctaacaacctgcaaaatatacatcatttaatcctccttcacgagccttcatgaatgcattgatatctattttggctaaaattgttttccaactttgaggtgaaaagataaccaccactcttacatcctaagtaccgtcaacaaagatgatttatcaccatttcccgatttaaatgtatgaaagaaaaacaagaatgtaaaagaacatgtacttaaacttactagcccgacaaaatagatgtgcaacagtgcaagaagctagcaagactaccaaatatccacaaggggaaacaaaacttggaaagacctaatgtttattagcaacagaaaattaggaccttaatatccgaaagttttagagagtgtccagcaacagtaacttctccatccttctcgaaaactaaaatattctcctgtgacattgctttgatttccttggcaacagttcccatggattttccaagccgctttcctaaaacactaggaacaaacaaccagtacaatttaacataagcatcgcgtataaaatatagtcctccttgaagaaatagtttacttacctaaaatcaggttcagctcgcaaggaagcatacttcaaagtgtcattacatgggacaagggaacgcacattgagttcttctagcacatactgaaaacaaacaaaatttaagccattattgaaacaatgatgtgcctaaacttcaaagacaaaaacaaaaaaagttcagttgaatcagaaagtagaaaccaataattttgaaggatacaaaactcatgggaatttatcaattcttccccttgaaactgttctaaaatttcacagttgaggggagaaacttccactaaagcaaaagcacaaaaaacaagaaacacagcattccgccaatctattaacatcattatgtaaagaaaaacttttgcttagactaagaaaatccggtggcacaaatacataattacatatatttaaatacacactagtgatcaggtaggtgccttgggcacaaatacataatatacatatatacacacacttgtgatcggatacgtgccttgggcacctacccgtttattaaaaaatatcaaaaaaatgagttttcatttgttatatgatttattattaaaagaaagtaaatttgtctctttttgttagttgttacttttcttttttttttgctaaatggcacaatatataacaagtcacaggcaaaaacttagtata

SEQ ID NO: 21118 - DNA, 3909 bp, Cannabis sativa
  modified_base (3570)..(3582): a, c, t, g, unknown or other
  modified_base (3633)..(3642): a, c, t, g, unknown or other
tttaaacgactgtttaaacgactgaattttgtactaatgctagcacatctcaacacttgagttttgccagtattgattcataccttgtaatcctaagggttctatatcccacctttagtgatctagatagtatttccctcggcataaatatagctaaaaggggagtaggttattacccgctatcacaagggggccgaacctctacaacaaatcttgttgtttattgcttttcattcttttttgtgcaaacatgtggcaagcatcagatccatacgaccccaatgttgattgatcacttcttaaggtcaacactaattaatcaaacgtatgtcgatatcatgtcgtgaatatgtcgcaaaattggatttgttattttgacgactaatcacgacatatttgtgactttttatttagttttgaatatgtttgctttcattctttgcagatggctcatgaacttatacttttaatttactaatattttactcgacgtcttacctattggggttcatataggtttagagatatcaaggcaaagtttaagtaggttcagttgatagatacgattaacgctagcccttttggatacttctgggaagataaagagttgactttctctaaggcgttggtccacaacctactcttacaaacaatgaaaacgaagatgaggtatggttttatgtgggcaaatgacattagattcaggcgaatcaagtttggacttattactggcttacctatgggtactgcccctacagagtaagaaatagaagccaagtccaacgactgtctagccaagacgtattttgaaaggaagagctctatgaagttggattcactgttactccaactgtagaggtgaaaagtaaaagatggcgtgtacaagcttggactcatcacttttattgggggtgtattagtatcgaaagaggacactatccaagtttggcccgatatgttaaaatttgttgacaaccttgagttcttcttcaaatatccataggttgagcgtgctttttgtaagttgatgtaagtagtgaataaggatatgcaacattacaaagctaatgttgacaagaagaaggggaagaatatcgctcagtaagcaaagggccagccgaaagaggacgtgaaggcgagcaacttcacacaactattcaaaaccagcgtatgttctattctgttttggatattcggtgtttttttttttggattttttgttagtttttagttgtttagatactttttgcaacataaactgatataggttttcaacatcatgctgtatttatattttaaatgttgctaaatgtaaattttcgacgtgtctgtgacatatcgcaatattcactactacaaaaatggttcttcgtgatgcttttaaacacttgttgaaagtattcccgtcagtttctataactgtcgccgatacgaccgtcgaaaaatgggtagaataggcgacggttcaaaaatatcgccaacgtggacttcttgacggtttaaaatcgtcgcctataacagggtataggcgatgattttaaaccgtgatttatagtattgattacgttttttcattataaaaagtttttttagcgacaatttttttcagtcgttacattggaaaaatagggaaaaaatagatttattgcaatttttttccatacattaattttaaattttttacaaatatgtatagtcacaataattaaactaacgttaatttcatctaaatatattttaaattctgtatagtcataataattaaactaacgctaatgtcatttaaatatatttaaaattctgtatagtcacaataattaaactaacgctaatatcatataaatatatttaaaatctaattaagttaacgctaattataatcatgctccaattcgggtaacttttgtcgtcgctctctttccccatttttatctatagttgttgtactcaacgtccaacttttttccctcgctaaccatttttgttatagcgctccatttgcttctcccgtgagtacttctatgtgttggttgttcaggatcaccactacctttttctttcatggatggttgttcaagatcaaccctagatccttctggtatggatggaccatcattaccatcataatctaaccaagcaatccactcatcgtccccacctggttccatgatagaaaatcttactcaaatttcaaatcatacattagaatatacaaaaatatgcaaattgttaccacatttatttcaaaggatcgaaaattaatttaaactatacatctcctatcatttttagaatgtgatcatcctcattaacacccttaaccttgttagacatagatatttccttgcctgaaactctattcttttccccgtgatgaactcaaactttataattcttgtctattcctttcttaaataaatgctcctttatccttgcaatgtccattcgctccatgttaccacattaaagacaaggaaaaataaccaatttatgactttttgcatacttctgttaaaagtccaagaaatggtcaacacctttgtatacttcgttataatctattcgcactcatccaatttcaatccatttcgaaacttcaaaaaaaaaaacaaaactttattaaattatttgtttgaatatgtgtagtaaataattagttaaattaattacaacacatattttagtgaattttatgcatttattaaaatttatccttatctagcgaaatttcgacagcataacggctgtaatcgtatactctcaaaaatttaaattatgaaaaaaataattaacaaacacatataacaatacaataataataaaataacattaacaatacaaaattatctacccatccgaccgtagtacatgtattcgcagaacctactttactacggataaatatttaagatatttaaactcttttaacatgcatattccacccacacccatccgaccgcaatccgaccgcagtaccgaccgcagtacaaaccgcagtacaattaagtacaattaatcgcagaacctacttcactacggataaatatctaacatattcaaactccactaaataaagaatttcaaagttttagattatacatttttccaataaagatagctacaattgcccactcttcaattaacacaaaaaatccaaaacctataaaatatttcaaatataaaattaaaagcttactccaacaacatcaccctaatacctaaaaataattaaaattaagaaagtgaaaaacttcaatttttctaatattttcaaatattgaataaaaaagtttaaatagattaccaagtctaggaccatgcacaactttaaaatttaatttctagatgacgcactacacaatcaagtcaaaattatggtgctttaataatcaagtcggatagaatgcccatagggggtcgcgaccatgcttgaaaattaatcaacatgtacaactccaaaagttttaagatcaagtatcaatatatttgtaattaaggaaatgtaatggtggagaaagtttatattgaatacaacctatcagattctattacagagagaatactacatannnnnnnnnnnnnggatatcaaggtgttgagattaatgaaatgcacttttgttttatattagtnnnnnnnnnngtttgttggattttgtgccctaaagaaaagtcatttcaatataatcagatttaataattaatataagattagaaataacttttatgttgcatagttcaaatgatttatttcatgattatatttaatgtataaattctattaagtccaaaatatatataaagatgcatatatttgttcatgattatagtgtcgtcagcacagtgaaatataatcatgattgtatgttcaaaagtttaattcccatgatttgtcaggtcactggattta

SEQ ID NO: 21119 - DNA, 4169 bp, Cannabis sativa
actattttattttatacgcatgtgaatagattgttcgaacactgctttctatattgtaaattattctaaatttatcaaaaaattattgaatatcttaaataactataaggatgtgatcatgaaaaaaaaattatttcaaataccaaaacagataacagtgcatcggtgcattccttttaagggagtgcattatagaagcaccttataatatattatttttaattgcagctaaataaaatattccaaagatgatgtaatgactatattacacatttatgttttatgtgtgatagggtttttttttacttcatgtgctctttggtccagctttacttagctgattttttgatttagttaaaccgtaatgttacctagtgtgatttatttattctttgctattgctactgtagccggctttcttaatagaattacttttggtgtggaagcaaatggaggttttagttggaggtgtggattgaggagaaagtgtttgttagtgttaaatatagatagacatttcgaacgtttagattaaattatttgggtatgttctatttcattatattacacatagcactgacctgttaagtttgcaaattactttcttcaaaggtaccttaaattcatttctttgaatatccaggtctttcctttgcttattgaaaagttttcactggaagagcaggcatctttagtctggcaatttttgtgcagtattcctgtaaatatgatggctgaattccttccttggctttcatcatctatttcccctgacgaatatgaggacctgcagaaatgtttaaaagagatagtaccagaggaaaagcttctgcaacaggttagttttggtctaattgttgtaactcttccggcacaagtttttcccagtacatatctaactgaacttcttgcttcatgaaggtcatttttacctggatggaagggcgaaccagcaatagcatgattaataaacatcttgatgattctcaaattcaatgttgtagtgattctggttctaaaaagttcggtgatagaatagatgaagtggactgtgcatgtgtgtgcaggactggaaaaaggaaatgcatggatgtttctgataccagtgggatgcatccaataaatgaaattttgctctggcataaggctattaagagggagttgaacgagatagccaaggaggcaaggaagatacaatgttctggaaactttaccaatttatcagctttcaatgatagactgcaattcattgctgaagtttgcatatttcacaggtaccctgtattccaatcatgatgatagacttccatttattatacaaaattcatttctcttaacagcttagtttagttatttatttatttattttcaatcaatgttaatgtttttgttgggtggattatttgaatttgctgtcatctgaatacactccacaatggaattgtttttagcttttccttattcagtcttcaagctactaagtggtggtgttgtctgtgctcattcttctgtacacaatcatatcatgaattatgtcatgtccattcaaaaagtaaaaatattgcattgggttttggctccaactttagtgtttattttatttttggttccataacccttatctgtttcccctaataagtcttgtcactgcagaaaaatatttaatcttattccctattataaaaatatcttatttttgttcagatcaatattagataactatttttccatctcttttcttaattcgagtatttattcttttctggtcacagtatagctgaggacaaggtcatatttccagcagtagacggagaattttctttcttccaggagcatgctgaagaagaaagtcagttcaatgagttcagatgtttaattgaaactattcaaaatgcaggggcagtctctacttcggaagctcaattttatgcaaaattgtgctcacatgctgatcaaataatggaaaccatacagagacatttcagtaatgaagaagtgcaggtgacctttcattagtcattcttaacaataatactattcatgacagagaacttaaagaaagagttaaggatgaggggagagagatgtagtgctgtgcagagagagcttattgttttctttggtgtgtgtgtgggtggaatattagaagaatatcatgtaacgtggaaattataaatgacattattatcttaccattttacttgaattaatattaaagctgcactatttctatttttagattactacaactaatgtttatttatttttatttctgaaaaagaatctgctaactgtttagcatatctaggttcttccacttgcaagaaagcacttcagcttgaagaagcaacgccagcttttgtatcaaagtctatgcatgatgccgttaaaattaattgagcgcgtattgccatggctggtagaatcattgactgaggaggacatacaaaactttcttaggaacattcaattggcaggtcatattatatgctatatttcgtcacttgctgaaagactattactatttgtggaattttctgtcatctatttattttttttgtttgtgacaatatatggttccgtgctccagctccagctgcagattctgctttggtaacacttttctctggctgggcttgtaaggctcgtaaccaaggtctatgcttgtcttcaagagccattggttgttgtccagtaacaaggctaagtgatattgaagaggatcttactccatcagtttgcccatgtgcatctgcattgactgctaaagatttcttgaattctgctcaaaatgtcaataaaaggctagtcaaaagaaatgcaactaaatcaaggaaaaatagtgaatccacaaacacttcagaggctgtaaatgaccataaacagtgttgtagcgatcaatcttgtcgtgtcccaggattgggagtaaatagcaataatctgggtttaaattctctgtttgtggctaagtctttgcgttccttgtcttttagttgttctgccccatctcttgattccagtctttttgtatgggaaacagataatagctctattgattttggccgtggtgaacgaccaattgatactatttttaagtttcataaagccatacgcaaagatttggagtatttggatgttgaatctggaaagcttaatgattgtaatgatacgttcctacgtcagtttattgggaggtttcgtctactttggggtttatacagagctcacagcaatgctgaggatgatatagtgtttcctgcattggaatcaaaagaggcccttcataacgtcagtcattcgtacacactagatcataagcaagaagaaaagctatttgaagatatttcatgtgttctttctgaactttcgcaacttcatgaaaacttgcagaaggaaaaattaaacggggattctagtgaaagtagcaccgagtattctgcagtcaacaaacttgactatactagaaagtataatgagctatctactaagttgcaagggatgtgcaaatctattaaggtgacactggatcaccatatatttagggaagaacttgagctgtggccattatttggtaagcacttctctgtggatgagcaagacaaacttgttggtcgtataattgggactacaggtgctgaagtgctccagtcaatgttaccctgggtcacttccgcacttactcaagatgagcagaataagatgatggacacctggaagcaggcaactaaaaatacaatgttcagtgagtggctcaatgaatgctggaaaggaagcccagaatcacctccacacactgattcatcagaagttagcattcctcagaaaggtctgtatattgcttagtaattttccatgtaggagagatttttttgcatgctcttaaccggagatgggtttaggagatatgtttaagactttgttttgggatttttcattactttttacttggtttctctgaatttatgtggtattgagtattgggtttgatatttgaaaagtccctctttacacgtcatttctcaattaaaaatagaaagaaatctagctttagtacatgaaagaataggcttagatctcaataacagttgactatgagataaagaatatgattctattagactcaaaaggccttgtcttgttaattataaatattttctgttgccatcacc

SEQ ID NO: 21120 - DNA, 2160 bp, Cannabis sativa
  modified_base (1998)..(1998): a, c, t, g, unknown or other
aaagaaaagaaagggtacatgagttgtaatcaaaagttgaatgaaagggaataatatatataactcaaaatcaacgcgtcaattaatattgtgattgtgatgatgagttcgtatataggagaatgaccccacgaaaggtcatattttctccaaattctttgaactatatattaattaattaatttgtattattattgttattttacataatagaaagttttagacttccttccgtacgctgtattatattgtatttgtattattctattgcttgagaaaaattgtgtcagcccaaagttcacggggacttgggatttagaacaacgaaagccatcaataaggcttttctaatgaaatgggtttgaaaaattctattaacaagactagcctctcgaaacatgccatggaagctaaatacattaaaaatcagaattttcttgacttggaagtcaaatcctcggactcccttcttcggaaggcaatccttcatgctcagaatatacataaaggtctatgccgtaaaattggaaatggaggagctactaaccacctccttgcctcaatgcctcgacagggatcagtctggtgagcaacttcatacaccatagcaggtggaatgagaagttaattaggtagttgtttcataatgaggatgccaaaagaatactcaatattattctacctaactagctattggaggactcttggctttggttaccagaatccaatggaaaattcagtattagatcagcctatagaattatcaagaacttagaagataacacaaacgtcaatgaaaaatagagaatcatttggggagcccaaatccaaaatagacttaagatggtatggtagaaaattctttccaacagcctacttacaagaggtaagcttctttcgatctttaaattacacgacccaagttgtccgttttgatctatggtagtggaaaaccccttccacctcttttgggaatgccactttgctatatggtttggctgcatttggcaaactagaactagggttcctagcattacggattgggataattggcttagttggttcaaaacggaagaacataggcttagagatgagaattatcatatgttcttggaaggggctgccataatattcaaaaatatctggaaggaaagaaataacattatccacaatagaaaatctacccgaattaaggtgataatgcatcagattaatggaagactcatcgaactagctgagattcacccaccatcgagagctgtagtgatcaaatggctcccccctccggctggttggatcatgtgtaacacgaacgtagctattggggaaaggcagtctgctttggctgctgtgtttaggaacgaggaaggggtcgtcatgagcctacatattactcatctttgtcacaatgatcccttggttggggaagtttcagctctttgttggggtgctgatgaagcgaccaaacaaggtcttaaaaacattattttcaatgttattcgattggtgcagtgtctgcggtgcaacggaaaagccatgaaataccagccttgcagcagaatatccaggatttagtggccaaattctataatttaactagcaaacttaacttctgggaggttagttggatccctagaaaatacaattgtgtgggccatggtgtggctaaatgggcaattcgatccaaccattttggaaacatcgacttgtctaattttgacagctccctgctcgatggcaaggcagacaactgatgcgacttatttttatttttgcttgtttttagatctcttgctgattattttatctttttatttttgcttggttgagcttagactcttttgttagatgaggttgtttccctccttgtttgttctttcgtttttgttgttttggctgctctgttgaggcaccaactataaaaaaaattatttaatataatactatatttgatattgacttgtattaatatattgtgtaaagttataatatattgtnaataaactcgaccccaacactgactctgtgtcgggtctcgagttcgagtctaggtcttaggtttggggttcaggcagggccagccctgaaaatatatgggcctaagacgaattaaattttggtgccctcaaaaatatataaaaaaaaaatataaaagaagag

SEQ ID NO: 21121 - DNA, 4397 bp, Cannabis sativa
aattttgacggtaaaacctccaaattattaaactagtaacaaatttaaggtgttattcagttaactgtcactatgggctgcttatgtgtacactcttgtacgcatggcatatatttatattggtacacctaatattattatttaaaaaatatttttatatttttaaattttaaaattataaaaataaaatattttaaaaaatatatattataaattttgaaataatttttatattattaatataataatattaggtataccaatataaatttgacacatattacaaaagtagtttatattgaaaataatagtttagtaatttagggttttagcgtcaaaatgaaataatagtcgaaggaatttagaagaaaaaaaaaaaaaaactcattttcttataaaatatttgtgacagtgtctatctttgtctgtggggtaggaaaatgaattatatctagtattgggcgacaacgtgtgggtcagccatgcgtgctatcttttcagtttattattacctttgaccacatattatatgatccatatcgatccatagagtactattgtccatatatatgaatcgtgatgattcaagaggatgatcatgttattttaaaatttcaagttcacagctgagatatatataataatcttaatattagaacacatagttataaaggatcgcagtgaacaaaatttattaattccaaatatatatattaaaataattatatatacattcaattatgagtactaccgacagttttgttgtcgtcaagatttgtcaactcagtgggaagtaggtgtctaaattcataatattatgattgaattataaccttgtaattaattaataataacctaggattatttaaaaaaaaatctggtttatttatttagtacgtactgataaagattaagtaagaaaagtttattcaaactaattaagtcatatagacaattaataaatttcgtggtgagggaggtaggtgaactcataaaaacaagcagagatcgtagtagacaagagttatcgagaggtgtaggtacatgacatatttatggacacatggtagcctaatgtgataattttgaccaaaatgagagaataatatatatggaatatgcatattcaatgagagcttctgattttgggtcacacactcacactactgtgcagatgccttgggatcgcacctagctaccttataaagtcgtgtactgcatgttccttctcaatcgaactatcgtatagtatcgtaggccacggaaagaagaaacaagtgatgatgacctaattaattaaccaattattcttgacacataatgcactgcttttaataggttgccactgtatgaggtccacactagctctacaacatccaagtgctactaaaaataaatattcatgttctttcttatgcaagaattttaaaggggaattaaaagcatcatggcgcatgagctcatgttacaatcacttaatttatttagtacatatataccattaaaatgctgtacaattttttttttttttgaacaatctatactaatttcttcatctactaacccactaatttataggagttgttgatatgaggcattgaaagttttgaagtagttttaataagggtgttgctatatttaaaattaagcaaatgtcatgtgcattacatatctcaatccatatataattattaagggtttttaggtgaaaataattaaacacacagtacatataaaaaaaaagagaagagttgtccgattttcaaggatcgaaataacaaaataataataaattaatatatataagaagtagtggatatgtgtattaatatataatatatagatctcttataattattaattaccgcgtggcaccatcaaatcgaatgatccacccacaaaaattaatgtcaataagtcatgaccagaccaagaaagtaaacgaccaatttcaacaaccatgctgtagaacgatcttcttttccctcctgggcatgcatggccagtttttgcaatctcacctcaaaatttaaatatatttatataaaaaaattaacaataataataatgtagggtttagaaaaagttagtaagtaagatcatggcaataaaataattatgcattctaaagggaatggataaccattaaataagacacgagatgatggaagaaacttctttaaatttcaaattcaacccttactttactttttttctttctcttttatcaaacgtacgtgtttaagcagcattagcccatatctttttttcttcttcaaaagagaaatatacatatttatatatttataagcatacaatatcacaacatgaaatgggggaaaaagcaaaaggtttccaatactactaataatgaaagggttagctttgatttaaaacctaacctagcaaagaggcccatgcatattgtcttcttctatctctttttttaccaattaggcaattaccactactactactactattaagtaatatattcaatgcttttaataattgcatgtgaactgtattgaccccacaccacattaagcaagtcttcttcatattccaattccaatctgtatcccattctccaaccttttctttattttgctctctaatattagtgggccctcttgaaccttaattggcccacgcgttatttttatttttgctctcttttctttttctcacctgcctcaactatatctgcaatatgtttttttgataatacattacacatcctgcaacaaattttggcttttaagaacctggtatacaatcacacactatatacagcacacacatatatataagaccaaatctctaattatgcattttactattctttcacccttatttacctttgtattcttcctattggcaaacaaggttggaaataatggtccacttaatttgtaattcaatttaggctggaaaaggacaatctcagttaatgtccttatactaattttgggtccccgccaccttcaaactttccattgtctttttggtttgatatttgaaagtgttgtatgaaactgtacatatatatctaattaataagaccaattctttaattacatggtcgatttcgtagcccagtaaaatcaaatgaaattcatgatgaggcgttacatttataaaatgtataatatatatcatcagtactagtgtttggttctagggaataaatatggcccactgccaacatttattttttcccttccaaataataatgatgataaaaatgaaagaaaacaactgtcatatatatattatagccatccgcaaatatcaagtagtacatttgcatgttgggttctattatcttaaatttaaacttaattttgtgaatatataactagatataaaagtcacaagcttatttaatttgtacaatacgactatttaaacaaaggttgggattctatgctactagtatataatatgctacaatacaatatattctggtgttttagtacataaatttaagattcttttgcttgaattctacttaataattagcattatattattatgcacattacaagagtagtgacaataatattgatacttaataattattattaatcggcacaaatgatcaaattactttgaaatatgatctataattaatcatatgttctgacatcatgcatataagattaacatcagtagtatataaatcggtgaagcaattgatgccccactcccaatcgtcaccctctcccctcaccaacaaaacaaaagcataataattttcccactcagcacgtactaggagaaagcaaactaataatatatgtatatgttgttcctttgtctatctctatatatttaatatttattttgctactcatatatttaataataatatatagattcgatatatatatatactattataatagaatataacgaatgtcacttaagtgctagaatgatgaagaatgacaaatttagacggttgcaaaaaaagtccaagttagacaatttttctgctttattaaattttaaagaatataattagttgccataatattaatttagatgcattttgcagtttcctagtgagcggcacatatatatgctaaaatttaagtagtttttattatttaaatgattgcagaagcatgcagtgctacatatctataatatttagaaaaaaaaaacataaataattttttattttgttggaattggttgattaatattttcacaataataatttgatcaaaatcaaatattttcccaataacattcaataatttgttcttagtaattattaatttgattttaataaataaaccaagaatgattaaatgtggtaattttatatataaaaataaattgtgtgtttgttccacatagctcatgtgtgaataatttgtagtatt

SEQ ID NO: 21122 - DNA, 2830 bp, Cannabis sativa
  modified_base (2772)..(2789): a, c, t, g, unknown or other
ttaaaaaataaacttttttcaataataattatagcttatgatttttttaagaccgcgcaacgcgcggcttttgtttcctagttttatcataattcttatatccttttaggtatctaagaaagtgtagaagcttatgcaataaaattattattattgaataattttatgtaacttattatcaggcataatcagtgtaagagtgatgttagttattgggagagattaaggaacttcatgaagaaaacttgtaagaaaggcttcatataataattgaggtacattaattcattaactatattactatgatatgttttcagtttgttaaaattaatatttcaactcttaatatatagtttattattgttaaaatgattattattttatcttgtgtttcaggtacactattcttatcataaacacaataaaagactatttgtcacatttgttcccaaaagatttgagattctattatcattattattattattagtgactcaacaacaaagaaataaaccatggtgaggttttgtgaaataattttcagttttttttttttaaaaaaaagaaaatcaaaaactcatataatacatagcatatagatacattagatttttcttttttgacacctataggctaggctatattaatatgtgaccagtttgaaagccttgatcttgtaaaagaaaataactctcttttctttggatttaaccgataaaaaattattattatttattacttaattaatatgcttcaacactttgaatttgcaaatgaaacaagctaaattcaaaatagtgattattattcttatttcatctacaaattttagtttcttaagtacaatttttacaaacaaaaaaacaaatgaatgagaattttgcctttttcttttcctttctaaaaatcatattattagttgagcttgtcatatataagaaaaatgtacaaagtactcttaaatatgaggaagtaaataatcttataaacaaaatcaaacaacacaagattaatcaatcattctcaatgtagataattaagaaaaatcattaataagttcttacaatacaaactaggccaatgccactctcagaaaaaaaaaaaaaatatataaaaccctaaaccctaaattctaaaacagaattaaagtgacacacatgatataaaaaccctcacatttttgtaactcagtgctacaataacttctccaaagcacaacaacacaataaatccttccataaatatatctataatatttcttaccactatgcacattcttaagatgtgttggagcatatagtttcatccataatgatagtagttcttactattgaattttttcgcaatatcagtatggagagaatatcatacaatacttgccgaccgaatttctccaagaataccaatgatattcactaaagataaacagattatggtgtattgtattattacgtttacaagctcgtatctacactctattgtaaacgacttgaaattcataagggtaaatagaaacccttcaactatcatcacgattttaaacatttcagcacattgagattcagacttcttcaatcttttaacttcatcatcctctagtttcattgagtctttaatctatcataataaattagtaacatgaaagttagaaaaaacataaatataaaaataataaaatgatataattatataaatatatatgtatttattaatttatatgaaaaagttacgtcaaaactactattttcaaaaatcacaaaaatttataataaagataataactaattgatagtcttattaagaaaatacacaacaaatttttatccaataccacttattatatatatgtatattacctctttaccatcaataaacaattggtattgatgatgatgatatagaatgatcaagatttgtttgacgtgttgttgtggtgcattgtatgatgacgttcataagaccgaatctacatacaatgcgccacaacatcacgtcaaacaaattttgaccatcttgaagattgaagatttttgcgaattgaatttcacactcctttgttctatcaacttcattctcttctagtttcattaacttattgatctatcacaataaaataaaaatacaagagttagaataatacatttttcaaaatattaaaaataacagagtaatcatataaaaaaaaaaaagaaaagaaaactacctgttcaccatccattattgtagctgttgtttctgttatagttatcattagatgagagtgtttgagagctttgaagatatggtgatgaagcagaagaagaatattgatgtatgttagagaagagatgtggaaaattatatgtgcgtttatgtatatatatacaactccacagtactacagatccagtttcttggtttcacatccatttgcttattcattaattggttttgtcttcttttctctatttaaggttaagtactttttcaccttttttctctctctgaattttgcttttggggcattaatttgataatgaaattacagctttttctttttttatttaagctaacttcttgatgctctttaccctgatttgtttattgtctactcctattctagttagggttttattaatcaattagggttttggagtaccatggttgcatgagcataaagttataaaattatggttaattaactattttcccactttgacatataccaaatcatgttctttgaattttttgggccgttaacaattcgtttgagctattgagattgttagattnnnnnnnnnnnnnnnnnnttcattcaattttactgttttagtgattgtttatgtactaa

SEQ ID NO: 21123 - DNA, 1650 bp, Cannabis sativa
aaataaacacgtataaagtttaagaaaccttacattgattgcagcggaaaataatgactccttccgttcagatctctagcccttgattcctttttgagaaggatgattccatatctgagttgaagactctcttagaggagagatagagaatggtttatggcctggagattatgcttgtcaccaagaacacagagaatattgcacaagttgccttcatctccagactgcaatctaatcttgataactacaagcaaaagcttcaagaagctcttgatggccagtaggccattagggaggagtacaccgacctatcttctaaattcacttatgagttatagttgtgtaaccctaagctcatttggcgtacatgggcaatgaggcttttgtggagagaatgttggactgtagaaaggcactttttgagagccggacggaggtagatcaagtcgctgtctatctaaggggttatcatcaggaactcatggtaagggactggctgacccacctgtggagatggtggctagccatgatattgtcgggcaggccgaggagcatcctgatgatggggccggcctagactctgccgatcaagattctgcggctccaaatttaatttcattagtagtatttgatattatgtgtgtataacataaacaatatttatatgttccacatagcctatggctttttatgagtgatggccatttagcttaagaacattacttacatttatgttctatgtggcttgtggcgttttagaacactgtttcaatttcatgttccatgttgcatgagacctttttagaacactactttatattcagcctcagggcctttatgttaatatctttgaccataaaccctctatttttgaatactactatggtttggccctattgctttttttattagggattgtgtgactataatatcctaataagtcaaatggtagataattagggtttataattatattatgggttaattagataataggtgggattatgatcctactaatctacttcaacgtaaattttaaatttgctataagtgagtaaataatcgtaatttataaattatgaagatttatatagcatgtgtgaattgaatataaggtatatttggaataaaaatatttccaggtttggcgaccttagagacacgatcaggggccaaaaatatcataacgggtttaattaatacaactgatggaaatattgtgataagttaataataaaagtattggcgtaattagaagtgtatgggatttatcttagtgccctaaaagtaaaaatttcttagttactaagaattaataggataacaattaataaaaaaaattaattaatataattattaatcttactgtcattattattaatatattattatattatattattattatattaatattcttaatatattattatatatttaaaaacgtaacaatacatatattataagtttataaactaaacttacaaacaaaacgaaaccctcatcctttgtcaaaacccactcccctttatatcaaatttcttcaaattttaacccaaaacttagcaatctaagctccaatagtagcaggatagcgaattctcagagctagaaagcttaaggtaaggtttaatttcgttttaagtttaa

SEQ ID NO: 21124 - DNA, 2778 bp, Cannabis sativa
tttttacaatttttttggtaatgtttaataatgtttcatgtaaaaatttgaaatatataaattaatgagagtagtttattattgcagtttggtaatagtagataaaataatttgttatttgtgatgttagaagtaaaaatattcactcatgttagagagagtagttgattttttttttattttttttttttcactttcatatgaatttaatttgttgggaataataaattattaaagatggtacctaatacagcttttttttatttaagggaattaaaggaaaaatggtgagttttcttgcaccaaagaacttagctataaattctcataatttgtagttttattgaaataataactttaattaatttaaccatgatttcgtataataccataaagtattaaacctacatcattattttatattaatagtctcttgaataaatatcccttcaatttgaaaataaataaaaaaataaaaagttccaatgtattaattacttaaatttagttataataccctacccatgaccccttaatgtacccacttgttatgtataatagaaattgtatttattaatattaattactaattataataagcaccacccttttttaattacttatttatttattatgtgacactaacataatcatgatttttacctaaatttggttagttattttcaaatgtaaatattttcactctaaaacttattgtttttttaatctaattttttactctaaaaaccttgttaaatcaaataagactatgaaacaaaagaagaaaaaaaattggcaacctaaaccacaattttggtacttttagtaatttaacttgtaaaattttaatttactattcaatatttagattaatgattttaaatctaaatagttttattctcaactttgtttgcccatataaaggctatcaaacaaaaggaaaaatacatttcaatcactataccacaatttcgattaaatatattaatttgaatcacagtattttactttatagttcgattgacaattatgagtttcaacataacaaatcaattaagaatattcctactctcaactttgtttcgttatatgaacactatcgaataaaatttaaaaaaaagtattttgattatacagtctaacttattaattaatttaacaaaaaaccttgtgtgaaaggactctcaaattatttggtcagtctttaaaaataaactttacaaaagtttactttttagttggattaatgatcatgagtttcgaaaacaatcaactgattaagaatatttttactctcaattttgctttatcatacaaatactattgaataaaagaaataacattttgatcactctaccacaatgtcagttgattaaaaagttgaagagagatcttgtatcgaacataaaatcaatgaaattttattagatatactgattctaaattttaaataaaccaaattgaatgagaacatttttgctctcaactttgtttgatcatacaaacactatactatagaagtagcatttccacctaaaccacaacttagttattccttaatttaaatttgtagtacattttcctatgctatatgaatccaatccttctaatatttgtgggacccaccatttgtttcatttgtaggaagatgggaaactttcaattttccttttccccaatatgtgctttactttaatctttagaaaagaaaagagaattattattatgcaaatcttggacattgttttacttttcataggcacttttgagtttttgagataaaatgctaaagtacctaataacttcaacacaaacaaattactaaggaaaggaaaaaagaaaacaaaatgagtaaatttgttgtgaaaaaagagaaaaatctatgagctaaaaaatttagaaagaaaattaaagaagacaaacatttgaaataagagaaaaggacactagctatagatatagggaagaaagaaagtaattttatccaaaatggtccctcttctatactctaatatgatcactagtccctaccatatttttatttatttatttaatttcaataattatcaaacaaatttggtgaaagaaaggcaatagtcacatgaaaagaaaaagaaaaatatatgatatttttgcacacgaatgggatgatgtcataattttcaccatgtagtaataggtagttaaagtgtcacataagaaggaagaaaaaattagattaatttctacatttataaaaaaaaaatatatataaaaataattatatgctataatttgatttttttttaataaaaaattcaaagattaagacaccaaattgatcactaacatctaatctattatgataggctcctatgaaaaacattggaatgtgattttacatatcttatcatttagatatacaatttataatcaagatgaaaatgattactaatctctttcattgattttttttgcttgtttgtaattggtaaaaagaaaaaaaaaatatttacaatccattgatgtgatcaaatatagatcccatgttccattttatttgatctctcttctattggtacatactaactcattctcataatattaaccaaatgtaattttattactatgttttcactagaaactaatacaaatgcaatgtatgaaatcatcgaattgggattaaattggatccaaatcaattgagtggaatttagatccaatcaatcacatgtggaaggaaatagatatgaagtacaagtacattccatgaagaaaaatattattattattattatt

SEQ ID NO: 21125 - DNA, 3180 bp, Cannabis sativa
taatatttatttgttatttaaaatttaatttaaatatacttttaaaaaaacgacacatgtatcttaacagaatgatacttatagaagttttaaaaatacagcttatgtattattaacatcaaaaattaaacttaagtatttatttacaactacgtttactaaaatataattgaaaccagaataatcaattgaagaaatgaatcagtttaaaatattaaataatcacaaataatattatattttgttatttactacactgactagaaaaaaaattaaaatcatttgattttatttacataattaggaaaagtaatcagaatgctttaatctaactaaattgtcattgtaaaacatgtaattattttaaatttatatagatttgaaagacatatttatcttttttatttttaattaataaaaatataattaatataaagtaagttaagaaaagagaaagatattctttattaaaatgagaagaacatgtcttttattttctccttaacttatgtagaccttactaatttctttaagtctaaaatttaataaacaaatgaataagaatcattacaatacaattaatttgtatttctttttaataaatttaaatatttataccgtaaattaactgacaaagagataaatagggtagtaaataatggcacgtgtgaaagaaagagtggcacgtgtgagaggaggagagacaagtgagaagtgacaagagagcttttgttattacgcgtcacatgtccatagtttgatcctcaatcttaggacctaagcaaatgtgaactcaaaactcaacccaacccaacatcctacaccttctagaactccccatctttttatttaccaaaatacccctcaacctctctctcatcatcctccacgtcaccacgcgtttttttattattaattagctcaaaattagtcaaaaataaaaaaataaatcaccttttaactctttccattcttgtaacttagtatcttatctgccacgattggttccttaattatttcatttatttcaaattggtccctaatttttcttggtttttgcaattaagccccttgaagtgtaaaaatttgttaagcgaagaaacatgaagagcattttaatataataagttatttgaccgagtcaagtgcattgactcagttagccaactctatgctttgcttgctactcaaaattaatttataatattcttgggaaatgcctttgaatataactcctcaaataagtaagagttataaccaagtcatttcctttatttatatttctttaagaaaaataataaaaattaattaattcatttgaataactcatggctcattctataattaaaagagggatttttaagaaaaaaacggttactcatatcttttatttgatttatcgcgtgacaagaaaagaaacataattaagtataaagaacgcgcgttaaaaccataattagacatttggacaccttttgcacgaggccttgttaagcactcgagcagtgtgcacttgtcttcaacctttcagctaatacgggaaagttaggttagagttttagtaacggacatatacatctgtcacccttgagagatgtacatttactttagttacgcgtgcccacttctattatttgtgatattatctcgagacattgtgattggaaactatattaacataagctctaaactatattaacataagctcttgaacaacttctcgctaagaacttgaaggcttagttacatgtcatgcaaggttcatgcaacatgagtattttattatattagtttatcgtttaactttaatgtatatcaagttctcattagcaagttgtaactctttcaactgcaaagcttaaaagtcatgtaaattgaaaaaattgaactttataagttgatttgtcaatactactaatttatggactataatcatagtaattgttgaaacatataaaaatttatattattgttatattttaaattctcttataaattttaataaatttctttgaactattgagacggttagatttaaagatttttgtcaaatttattcaattttactaatacaataattgtgcatgtactaaattatacttttattatgctgctcaaatgttgacatataccaaatcatgtcctttaaactttgattcatgttagaatttttttactaaaattagataaaatccttaaatctaacaattgtaataattcataattagtacatgtcaaaattcaaaagataaaaatataattaatcaaatgtgattaaagaatgttcggtagtgagtaagtgtaaagtaaaaacaatcaaagggaccaaacattaataacctaatactttagggacaatttggactaaatatcacaactttcataatcctcctttgacaaatccacacgcaattctcattctccttcctcgaaatttcttcccccttttcatttttttttctttcttaattagtatcaaaaaaaaccctttatttaacacactccctaatcccattcatctttcccattttcaaaataactcactctcttctcctcctcctctttcttcttccccaaaacattttttcacaaaaactcactaaagatctaatcttttccaattttcaacaatacccagattcgaattttcgattttgacactgaattcgagttgggtcttctcaattttcatcgttaaagatggaaaacaacaacaataaccagtcctttcttcaattcagtgatcagcttcgtcaccagacttcaaacctagctaatttttcaatcaacgattcgatctggggtacctcttatggaactactaaaaggactggagaaagaaggaattttgatattagggttggcggcgatctcaattctccatcaaccctaaatgggtcttcttcttcttcttcttcagtttcaactggcttcaacaacgatggttggaacagttttaagcaaaatgggtctgagtttaatgggttcactaacaacaacaacaacaacaacatcaattacaagccaaaagctaattcagagtacttcaatgggtttggtcttcctcagaagaatattggggttaatggagctttcaataaagggatttattcaaagtctttgaatcacaacatttataatgatattggtatgaatatgaacatgggtatgaatatgaat

SEQ ID NO: 21126 - DNA, 2607 bp, Cannabis sativa
ttatgttttatttataattttacatctataatataactataaataaattattaaaaaaataatttattattttgactcaacagatattttttttcagagtaaatgtgaaatttttttcttgatgtattcttgtaatttttacttgttttttaaaagtgatgcggaagaatgaatgaatgtaattgtgaaaggcaagtgtcagctgccttgtatttaaatagaattttcatatcttcacatgaaagaaccaggatacaatacaaccgccgataataattttcccgcatttaggattatatagaaaactggagaatttactgtgagcaacacttttttttccttttcttttttaaggataagcagacccaaaatttcttttatcaagaaaaaaaaaaaaaagcggacccaaaataatatgtgaaacaacataaagcatgaaagaatgaatttctcataaaatacagaagcttctttatttttccctatctttttcaaggatagaaatattttacattatcgggaaataaagtgatatcattttttgttttgttcattggtttagaggtgaaactgaaaacaagagagcaagagcaaatgaaataatttttttacagcttaagcagtcgggcatgtttggtaagacagactactttaatggggatgatgagaaaacatggattttaatgttattaacaagttcattttctgaagaaatgcatcaacaaagaaagcagtgttgtcattttaattgaagagtctgagtcgggttgttatggtatctctacacaacgggcatgttgagagcgttatcccacaatccttgcatgtcttcagcaacacagaaatatcaaagggttaagttcaaactaacacatttgaaaagagaagtcccatcctcaatttcatacactggaatctacactcagcacttattagaaccaaaatgtattcaatataggttttgagctcaacggtgagatgaaaaatgaataagcatacacaatactgtgtagttgaagcaactaattaatgagcaataaatttactgaagatcacttaccgtatggccacattgaaaagccatgtctttcgggtttgttagacaaatggggcataccttcaacaatgaagatatcttgaaatcagatactgctttctaagtagcataagtaaacaaagtgagatacgagatggggagacaggagaaaattacctgctccacgggtgctgaagatgttgcctcagttaaagataagtctgtcatctttgggattgaattgatagcattgtcatgatcaatcacttcttttggtggtggaagtaggctagcgcgctgaccacttgagtgttcgttactgcacaagaaaaaattgttttgcaacatttcagaaatttgcacagtagaaagtacagctagaaatatttaagcttcactgcttgagcttactaagcaatatctaagctttgagtggctctgtattgtattggaatttccatgagggcagcaagtgcaaaagctgtttccttctttgatggttctgtgttctccgacatgattttattgaagtttacaaactgcagggaagattcaaaacatcagatttttctttaaatggaaatacagaaaatgtttaaaggagattttaagagctgggaaaagcacatatcatataatggattgtgaaaaattaacaaaaaatttaatataaaaaaagaaacctaaagagaagctgtaagtacaataatgacctgaaaattgtcaaatgagcgctgaggaatgttatcatcaaattgttgcattgcgtcccaaggtccatcccccacaccgatcaaaatgattgaaagaggatattggctgtttagaatacattagtgatgtgtcaccaaacattgaaacttcagtattacccaatttactcacatatcatagctttacctagcagcgacaatggaattgacagttgcttgttcttgtggacttaaccttccaggtggtatatcaggattccgagtgacctatatttacagacacaaactgaagctttcaatcaaaaactataatgatgcataagaaaatataaaaaaaccacaccaacatgatcaatatgaaaaattaggatctgaaaaaataataacctgtccatctgcaattatgacaaggacatgatattgaccattgcttctgttgacaatgtcaatcgcagcatcaattataggcgcaaatgaagttggacctaaggtcaaggacatgaaatattcagctaattctggattgaaaaatgaaaaaccatttttcatcatggttttttcaagctagaccattttctgaattgtgaaaggttagttcaacaattatcatgtcagaaatcaagtatctattagtattcttacagtttcttcctgttgaaggaaagtgcataaaatataagaaaaacaaaatttgccaaaacctgacaagtttagtaggggaacaatctctctgtatcttctgagaacatcttcaaaaccgctgcaaggtcgatggtcagaataaaaactgaacacttgtttatcatgtgttgatgctgcaggagaaaagtttgacaaattactgatccataaaagaat

SEQ ID NO: 21127 - DNA, 3350 bp, Cannabis sativa
  modified_base (339)..(345): a, c, t, g, unknown or other
aaaaaaaaattgttgtgaagtgtaaaaataaaaaagcccaaaaaaaaaaggattgaggcttttaagtttggtcaaattattttgtttggatgtgatttttttttttttttttgagttaaatgatttgattgattactgcatagtaaataatttaattcaaaaagcattaaattttactatttcatatatagttttttatttagtttagtagataatttaatttaaaaaattaattatttttatcatgtcatatggtacattttttatttattaaagggcttttgactttggtcaagttattttgtgggattatttcacaaaaatataaaaataacaaannnnnnntacaaaaatacaattttatggaattttaaacatttttacgaattttttaattttatttacagaaaatacggtcttttttttttgttgtaatcttgttaatttgttgttgattttttgttatatgtatgttatcttttttttattattttcatgttacttttatgtagtttttttgttgattttatgttgttttcgtgatattttttgaaaaaccgtaaaaatgtaaaaaaaaacattatttgaacgtaaaaatgtaaatattttacaaaaaatagtaccttatgtaattattccttattttgtccgcttgatttttatttatttatttatttatttttcttatttgatttaggtgatttgattataatctaattgaaaaaggcatttaatttcaccatgtcatctatagttaattttatatttagttatttactttagtaactaatttaatttgaaaggtcatataattgtaccatgtcatgagtcattttttatttattaaataatcatagctaattctttttatttattttgttattaattttaattatatatatttgaaaattattatatattgagtcattgccacaattgaataatttttactctaattttagtcaaacttaagaaaattactattttgatctcactaatttaaactcattattcattaagtttgaccctacatttgtattttaaaatggttgtcaaagtattttaaaagtctttttctttagataaaataaaaataatttttcctacttattctaaaaaaacaaaaaaagcttttaaattataaaaaacttatgaataagaaattgaaattttttatttttaaatagttctaaagaattttgaacaaacaaaagcggttttttctttagataaaacaaaattagttctgcctacttattctaaaaaaattaatattacaaaaaacttatgaataaaaaattattttttatatttagttcttttgcaaattaaaaattaattaaatacaattcaaaataaatacaaatatgcactattatttgctctacatttgcatttttatttattttaattaatttaaattaatgtgataagttacttttacaaaattataaatatatttttaattaaagatatttaattgataagaaaaaaaaattatatattaattcataaaaaaaatataaaaaaatggtggaaggtgcataggcacctattctcacttaggggttagtatgatatataaatagagtaatttgtgatataaatatctaaatttaactttcagttataaataaatacttaaatttaagttttgacggtagtaatacataagttacaattttgaaacttattagaaagtaaatttatatgtggcagtctttaattggttcatgtcattaaattttaatttttattcaaaaatagatttaaatatactaataaaaaaatgataagtagatagtaacttgacacttaacgattaggtacttacgaaattctaaaaatataatttatgtattattaccgtaaaaaattaaacttaaatatttatctataatcgagagttaaatttaagtatttatgccgtaaattactcttataaatatgagaaattcttaaagcataagtagtttcaaacatcacaagatatatttttattagtacattgaatttttttttttttgcttttaaaaaaagtattatatatattttaatttaataattattataaaatattattcactatttataatgtagtagtactatgataatgtagtagtactatgacatagtcggcccaagagtgatgcatgttgtagactctcaccccattctagtccaaaaatttctttagagaaaaggcttttaatttattttttaaaaatactatattttatattttattaataatataaaggtctagttattttatccaaatattatattttaaattttggataataagtgacaactttaggtatttacaaattgagtttaattgagttacatatagatgatgatggcatgcatatttatttcaatcattaaatttttctaacaaaccttccacttcatataaatccaaccccacattattaaaatgagacaagtgtactttcactttcttggcaattatgctacacatcatttcataattattaaataaattaaaaataaaaaggaaagaaatttaaatgaaaattatgaaagttatgtatttttttaaaagtaaaaaaaggaaagatttcaaaaagttaaataaaaatgaaaacaagaataggaatataagaatctggtttgaattttcacgtggttaactatatccaaaaatatattctttaaatcaattaataaaacaaaaaacttaattaataatttttacaaaatagatgatattatttaattgttaatattattattatcataataatattagtgttatctaattaatgaagtctttaaacacaagttagtcctctatttttattgttactattaaatattagtgttatctaattaaatatgaaaatttaatctgtggatataaatcctacatgtaaccaccataataaaatataatttttttgtctaaatattgaatggaataggaacaaagacaatttgatttttgaatattaaatgaagcgcctcaacaacatgattaattttgtatttattttataaaattttttattataacatgtgtatttttatatatttttgtagtttattaataaatttttaaatattttcattttagtttacataattttttttatttttaattttatattttctaaataaatagattttctgtgaatattaccagctccaacgggaattcaacacctcgccctaacgagaaatttgtaaagatggggacaataagagtactcccccgcctattattcgctacatttttatccctatgtcgtaatacattttaaacatgtcactttacaataaattaacaatgttaccccttagcatttttctaaattaattta

SEQ ID NO: 21128 - DNA, 1524 bp, Cannabis sativa
tattgttattattaccactgacccattttcccatttgatctaaaaaacaaaagggttatcacacaatcctcaatttaagttactaaaaggtcagttactaacttctaatttggttaatataaagaaaacagagattgatattattgttaagaaaaggtcattcatatatagaaatgtagatgaaataaaaagtgtaattgcttttctgataatgaaaaggccaacaacatggccccctccatacatgtagtagcactggcatgaaagaaaaatctcatttattatgactagaaaacattcatgtttctttgttcacttctttaatcaagaaccctcaagaacaaattagaccgttcattctgatttgttcttttcaatttcaattcttcataattattatccatacaaatttgtcttgaaatatcaaaatttaaatataaaataaaatgaagagagaaagaaaaaaaaaagtagaggaagatgggtttgttgagttttgacctctttgagtccaagaaagagaaagtaagtgtcataggatctggtgaagaaagaaaagaagggtacgtgctaaatggtgttgtttggtttaaggcgtgggggaatctgtttgggtagtggcacgcgaacttatcgccccaaatcatgagtgagagagaaagactaactaacccaaaaaaaaaattatataaataaaaaaaagggggtctttttacacatcccaaaaatcatctataaaaagaagaaaaagaagaagaagaagaagaatagtatgtgagtatgtgtggccctaatagagagaatataataaaagaaaagaagtgaaaattgatgagtagtagtgtatggtgaaatgggaaaaaggagtaagcaaaacccaaggaaggtgtcccctaatgaagacccaaggcaggctcctttagcgccggtgtctccgctttgggttggttttgtttggttttgttcctttttagtatcattattatttgtgctaattaagtgtgctctcctctctttctctctcttgtctcaaactcacaaatttttgggtacatcagtaactgtaataataatctttattaacttataatgtgtttatatgtctccctagtttcattaaactattttttttttacgtacacccttcacacacctaaaaataaaaattaaagaaagaaaaaaaaaacttctttctagacaaaatcctttcgctgacattctgcactcctgttcccaagatttctctctctctctctctacaatttttgaccacccttcttttagtttctacgtatagaatcttaagtaatagaaaacttatggtgtacttatccgaaaaaaaaagaaagaaaaaagaagaagaagctatagttactatacctacttgtttgtaccctagctagctacaaaagtggtcacatttaggttaagcacgaaccatacaagtccactgaatattcaagtagtggaatgaataattaatggtgtcttaattgtttacgaatttgcaagtgttgttatata

SEQ ID NO: 21129 - DNA, 4322 bp, Cannabis sativa
tgttttataaaagtacagtatttttgtaaaaattaacttaaattctagtatttttttttttttttaagttttcttattttttttcttaatctgaaatatacttaaagttgatgcccctacgtatattgaaacgcatctgaaccgtctatatccactacatctgattactaatctcacggcagaaacagttccaacacgtcgatccttatgaaaacatttcagccaataagaatgggtctctggcttttatataagttaaatcccacctcttttccataacataattttaaacctttcttgtttactctcgctcatctgcaaattcgaaactcctattttcgtcttttgcaaaccctagacttcgatggcgccaaaggcagagaagaagcccgccgctgagaagaagccagcggaggagaagaagtccaccgtcgccgagaaggctccagccgagaagaagccaaaggctgggaagaaactcccgaaggagggcgccgctgccggtgacaagaagaagaagagaacgaagaagaatgtcgagacctacaagatttacatcttcaaagttctgaaacaagttcacccagatatcggtatctcaagcaaggcgatgggcatcatgaactccttcatcaatgatatcttcgagaagcttgcccaagaggcctcaaaactcgctaggtacaacaagaagccgacgatcacatctcgggagatccagactgccgtgaggcttgtgctccccggcgagttggccaaacacgctgtttcagaaggaactaaggctgttaccaaatttaccagttcttaaattagctgtcttgttcttgtagttttccttatcttgaaagtggtaggatgatataagatgttcatatgtattgtgttcctttactttcgctggtttgtgtgttcatctggatctttttgatcccaatgtatctttaatctagaagttaatagacaatgcttcacagtttcacatgtttttatttctcatgtttactaattaattagggttttctttgaaacggtactttataattaatttaaatggtacgtgatgtggcctactcaagtagtattgttctaattcaagttctttatatctctcaaatagcaattttttttttttgctggagattgttttcggttcatagcttgaatattgtctctgtagatctgaatcttgaatgttgtctttttggcgggtcaacaaataaattatgttttgttttaaagcatttgcccacttgttggcgccatgctgtgaaatttagaaagtaaacagctttaaaacttcgtcccaaccagcccttatttgaccatctcactgttaaaacgattttcatctgttgaaaacccttaaatcggtttttaagattacaagatgttatatggtgcttccccttttgctgagatctgttcttttgcctctttcattcatgaattttgagcacaagtctcccaattttgataaaactagttgtgttttccgctaccagttgtgatataatcctcaaacaatttaacaaaacacttcatttcattttggggactttttgcaagaatgcgtaaacatggaacatctgaaattatcacgttaaaaaagatgaaagaagctggactattaaaattgtgctgaaaacgccctccatacaaaaatatgattaaatttgacaacttcattttccaaagtgatcatttgtgctgtgaactcttcgggtaaatacaaagagagaccagcaactttgattgaggaagcatgcaacaagcaatatcacttcatatactccaattagcagcattggaaaatctgcgaagtgccctgagctatcaactacaatgctaataatgtcgccactatgttggtagagaaggtcttaagggagatctcatctggaagtcacttaacagtcagctccatctcaactatatagctgttaaccctcattctgtagtttccttttgtatttcctaaacacttttcttcggtattggctgcctttttgtttttctttggttttctgcggtttgttcaccctgctttgcatttcttgtttttatgcacttcctgctttgcatttcgggtttgttaatgcaggttccatctgtatccacatctccccatttctctgttggctctgattttatttcaaagaattgtgttcctcccttgggcagggatcacttcagaaaaaacaaaaacaaagaaaaaagagaacattaatatttgctttattaaggaaaacaaaggagtaagtttaatgttcttgaaaatgatactcccatagtccccctcgtggcattcgtatttttatcataaattctttgctcaatttttggttttttccactctcttttcttttaattatcgatttattgattgagttttaggcttctacatgtgttatacccctattgtaagacttggatgtacatgtctctatccgtatgatgaaccttattgtttatttgatcacacttgaaaaacaatatcagcaaagaagaagcttaactgtcctgtccatacatgaagaaagtgacatgcatttatgtcatttcttcaaagcaatacatataaatccatcattagtgctaacgaagttaacctttgagtaaatgagcagaaaggatcccattttacgagtaaaaaagaatcttattgaagaataaaattcttacctacaaactaaatcatatatcaaccttgaattcatgctgtaatctctcgtgtgcaaattgcaaccggatattcctcccatccagtaactgatcatgaattttagaagattagtagggctaattttgatgcaaagagagagagagcacaaatacagtgacactacctgaccatctatttctttaagagcatcggtggctgcagcttcagatgtgaagtgtacaaatccatacccctttgatctcccactcttgtggtcacaaattactttaactgcaacaaatatattttgacaaacttagcattcccttacaagaaaaaaataatgccactcttaaaaaaataaatgagatttacattaataccttctagtatatccccatgtttctcaaaggcagcctttaaaacaggttcatttgtatcataagatagacctacacttcaacaacacataattggattgagctatttaaatggtgaccaataaaccaaaattaaaaagcttgaagctttggagacctccaacaaataacttggccgagaagtgtcttgcccaaaactttccggtcaatgaaaatgtgccccaaacatgaactccaccatataagcctctcatggttgatttctgtgtaagcagaagcaatggtgagtgataaactaaaacgcagaggaggagatggaggctgtcctgtccatagtcctttaactacactcacattgctgggaaatgaaaaagaaattccagattaatagctctgaagatggagaaggaacctcaaagagaaataggctgggatttgtattttgtgggcagtgctttaatttcttctattggtttggatggaggcattgttcatatcaagatggcaggaaagcaaggtgctaaggattggaaccttaaagtattaacccccgaacttgataataccatactaatctagtttcaacatttcaagctaggatacgtttctaagctagagcacaaattagctagctgatcgttttcttagccaacttaagcataaaaaagaaaaagtgcaaggttttctcaggttagagctatctttttcttaacccatctccaatacaaagcaactttcttccaagatctggctcctcctaaaactttgaattaacgaataaacatatcacaattaaacaattaaaaatacactcaaacaattcatacccaaacaaagaggacaaactcaaatacaggcagccaaagcagcttaaacactccaagtgaaaccaaaagaagccaacagaaaattaaaatttgaaaagtaatgaaatagagtgaagtaaccttgcatatcaacttgtcttctctttataattaagactcagaccccattaagctcattctaatttaaaacctaatcaaaataaatcaagaaaatcaaaagggacattcatagattcgtcgctgcatgattggtggaaacaaaaacctaggtaacttatgagtagcaactagaagagctgtatactagtttttaggacacaagaaggaagatgaggatgagtatcgaattttaggcagagagaatcgcagagagggcctaggagttcgagctccattgttattatttttaatggacaaagttcaaattaaacaaaattactctacataccc

SEQ ID NO: 21130 - DNA, 3478 bp, Cannabis sativa
gaactaaatttttttgaaaatttattaaaataactctttaaatgttgcagtgtaaatttactcaaaacaaatgtaataaagaaagtaacatgatgtactagtaaaactaaactatgtgaattaaaaaaaaataaataacacgatttttacttaaaattatctataattacatttaaagatattgttgtattaaagattgaaaaaaaaattgtataatttaagtgtctattaaaaatcaatggttggttggaactattgcatgtgaatacacaacaacacattggatactttccccaaagttaagtatatacatttatacatatttgtgtagatacaatatatgcctttcatttatttttgtgactttaatgaaattttatactaagaaagagtatcaagtggggttggcctgttgactttaagctcttttttttttggcactgaagattgaatcacagccgttggatttggaataatctaaataaagggcatttgctaattgaaggaaaattactagccaaagagggtttactatatctcctcaattaagtcaacaaaaggtccctttttgtttggtttccaagaaaatgaatgagatttcaatggaaaattttgctcttattgcatacccatcttcacatgttgaggaataaagttaaacctataatagaatacaaagtgtggaagaattggtagaatagggggacaaaagtataaattttctttttgaatataaattttatttattgttgatggcaaattatttgacttttagtcaagaatcaattaatttttaatttattttattcgattaaatttccttaaataagtattttattttattttttatcatatagacactgcaatggtaatttttgtgccatgattcatggctaaacacacaagttaccttgaattattatttagatccaaaagtagattttaatgtaattcttaataatttaatggaaacaaactaaaataattcaaatgtactatattttttagaaacttatattttagaaattattggaatctgatcacaaaaatcactaaaataaagttaaaagtcaagcacaaaaaaagtactattctttgtgatgtgattgaaggtgttaggttatttaaaaaaaataattatcatgcaaaaattatttttaattttttttatagtagaacttctatttcagaatattttatttaaaaataatttatgtaaaacaattacaactaaaggtgtagaatcaaattatcaaaattttaaacaatcaaacaattagtcgtaacaagactaacaaatcacacacaataattggaagaaaatagaaatgtaaagagtgagaaaaaaaccagaaagcgattaggatagaaaaacaaagaaaacaacaccgagatatatattggttaaagtctaataaatcgatgtgatctatagctctactttaattctgaaacaccacaaatcaaagcttagtaattgatcaagaacacataatccaaattcttttcactgcaattcttgaagaaattttgaatgtcatcatggcgagattcgaattgaaaaaattcgatgaaacatgagaatttgcgctatagagagaaagtttgaaaagaatcctaaagcaaatattatttattgttattgttgttacatttgatatttggtattttaaatatttttagtgaacctctatatagacttctcaattagtgtattagatggagattttacaaacgaaaatccacattcaacaaggtcaatttcaaaagggttggggtactcttgtttggtcctacacctaattctattcctcttaggttaaaaaaaaaaagtatggacacaaatattttgaatgtcataataaattgtactcataagggcattcttcttttctcaaaaagattcaatcttgattatgagagaggcatataacaacatcatgaaagctcaaataggctgcaatttgcattgtgattcttctcaatgagttcaacatgggaatttttccacattcaattttcatttacccttttttttcttcatttttttttttttggtaatgtaatctttcttgggtaacaagaaagtgttggaaccattaagtaaagcaaatcaaacccttagcttacacattttatctaatgccttgatatgttgttaattccaactttttggaattaactctcttggcttcttcatactctcatgaattgatttcattaggagaacatacagcttcaactgataatctctttggtgtatttggacaaggatctgcaccgaagttggagctcgatgcagtcaccgaacatgtctgctgaccaatgcatttctgaaaacaaaatacaacaaacaagacattaggatccaaattgcatatgatttaaggaatgtgaaaatccatgattagtagaattttaagacaaagatagtttctgaattaccttttgtaagacatcaagagagtttggggcatgacaggctccattctggaagcttccacagcttccagttggagtaccaaagcttgcaaaactaatggcggaaatggaatatccagcattacaatgtaggttgatattaggctcgaatagctcatcttgatcaccattgcttttggtgtgccatttatcagaaaccttggcacaaatagttgtcactgatcttttcacaagagctattttcgatacatccccaccaatttcctcgaagataatcaccagatttttagacggcttcaaccaagatcgaggaacatggtacctgagttaacatataagaaagatataccttcaaaattacatgaaaaatgtatgtgctataatcatgttttctaagaaaaatttaccatttttgagttggttggttacaaccaacctgacactttggaggccggtatgtaccggcataactgcattcattacaatttccattagcatttatagtccaatatcttccaatactctgtccattaatccatatttgacccttctgcatgctcctcatgtccaacgccaaaggatcatctcctttcggtgcattaaaatatgccttataccatgtcatcggttgttgcttctgtgctactaaggatccactcatccaatcaacagcagaggttgaatcgggcgagcctagattcattgcttctccttttagcccaacctgcataaagacataaccccatcttgagactttacttgttctgagttctaaaaccaatgaaaagtggattgaattatcattatcattacaccttgtatgaccatctctgccatgatatatccatcttcccttgatcaagtccctgaaggactactggacctaggattcctgtgtgtcgtgtctcgaaatgtgggccattgttctacaaccaacaagcaggcaaaacaaaaaataaactacctcaacaagtagtgccataaatactgaattttttgttggaaatttcgtagaaataactaaccggcaatccaa

SEQ ID NO: 21131 - DNA, 4452 bp, Cannabis sativa
tatatatgaaagacaaaacgtgcccttttatgaaaaacagagaagcctgcttttcacaccttggttattttaagactcagcaaagtggtgatggtggtggaaataaatgtgatactacagtcagttgctccattgtgccttacatggaaaggccccgaacacaacttggctgtaagagatctcttgacttaaactttgtttccgatattcctctgcgcaaattaaggtttaaaggacagcttgaccaaagtgtcgtatgtgattctttcaagtttagtgagagaataaacagaattgatactgaggtagctttatttaatagcttttttagaggcctttctttctttgatccttcttctaagttgtgtcctactgtacctttcttttcatacaatcacattgatccttatgctgaaagaagtcataatgattggaaggaaaattcaagtcataatatcttatcaggttctccagataagttagaaattcaaagctcaaggacccagattgtaacctatacatgtaatagcagtttgttggaaaatttccacaacatttctgatttttctctctgcaaagattcagcttatcatggtagaaatattgttgatattctcaaggatgaggaactaaaagtgaaggatacatacacgtcttctgtcaagttggaagagcctgatgtaaatgttggcgttctgaaagagcctaatagaactctcatcacttgccatgatagtgcaaggggtaggattggaactgtatttcagagtgaagatatgaaggttgatactggctttactacactctcatcttctgctgctgacttaaattttagcgagatagtttctactcgtgctactgatgttgagaacggtgaaaacgatttaggaacacagttaaagccatcagagctccacctaaatcatgataaaattcgaatgaaaccttgcgacaacaagggtgttgttacatattataaaaacaccaaaaatgtgagctcaactgcagcttcaaaagttggacttcatgattctgaaatgcttcacgagcctctgcagtcaaatgcactcgccagattcgctagctcaaaatctctgttcttgaagttctacgtagattctaatctgccatcaaagcaggaactggtaaagaaatattctccgtttggctcagttgattatgtaaacaccaaaatcttctgttcagcagggtctgccaaagtggctttccttaaccaatctgatgctgttgtggcttaccaacattctaagatgaagaagcttttccctggtcaacaatacgttcggtattgggttgattcatttataaacacaagaggaaaaacgaaattgttgactaggaaacaactagaacctaaactaaaatcatgtcttcgaaactccaaatctcatgggaatgaagacaaaaaacgtaggaaggtgaggtctctaatggaaacataggccttggtaatcgaattctgctgacatgaaattggcaaaactttttctttttttgaccaggatagtgatgtttagaatgtgattctatatctagctttgggttaagtttagatgtctcttgaccaaatttggccaattttgtggatatgacatgcattaggtatagttcaatttatctcaaaaaaactatcttctggtaatgtttgttactgatcaaaagtgccaactggctagttcatagttcattaactatagttgcacttgtatgagacaagcaagtgtttattgtacatattcaactagttcatggtcactccttgtaaatcatattagaattgacacaacattattaggcatgagcagagggcactgatataaaaattaaatttagcaaacaaagagaatagcaatatttacatatttttcaaacataattttttatgtaaagaataaagttacaatatattgtatttttttcatcattattattcatgagttaaaacaagaacagtagaacactgtcattgttacctatacttttatacacatttaatccctgtcattatagattaaaattccaaaaataacttacaataaaacctctaaaaaaaactaattaatagtaccttaccaaattatatcctaattctcacattaaaataaataaatgataattctatcactacttgttattcgccttgccaactattcttgcaagattatgatggttgcactttattacatccttaaatcgtattcataattcatttttgtaggggaaataccatatgcaaaaaaatataaattttgtaataaataaattattaaatattaggcaatatataatgaacatagttatatattagcatttttttatttttttatttttacactttaaagccgttttcatttttataaaaaatttacataacaactaataaaataatttaaatcacaattaaaatttacatagcaacacacataaaaactttcagagcaactcaaattgtaaatttttaaaaaaaattaaaaaatacttatatattttgcaaagggatgtataagttttgattttaatgttattttatatatataaaaaagcattaactaaacgaaagggtctaaatgtaaaattattatcaaataaggttggaaagtcaattcaaaaggttgtggtgggctttttagagaagttccgaaattgtattattttctaaaactacccaaaacccaactgaccaattggcaaggaagggtacattctgtgacctttccaacactaacaatggagaaaacagaatgcaaataagggcaaagaggaagaaggttgaagacgcctcagtactgtggctcagaaccccaatttctcatttctcagccgaccagctaaaccaactggtttctcacggtaacaagtttctccttaaaccctaattttatttacaagactttcatttagggtttgagtttcgtttttctttttcttttcggaatgggaaacgagtgaggtttggggtcactgtgttactgatcttagtgttttgtttctctgaatgtggaatctatagcttgagatttggattacagttgctttgacttgaaatttttggttattttatacagaactagaagtagtactgatgattgggaaaaatttagctgaagctttgctgtaagttgaagtgattcataattgaatttagagtagcttattattaatcataagttgggcattttttttaaaatgtcatttttattgactcagaatgcaattgtaaattctttagggttatacattaactttcagatgagtatgaatactttcctcaataccggtagagcttgaactccacttaaaaattaattatgagtatgacttttgggataggaaaatgacattttataggatgattttcatccttttcttatatataatcttttttttattttcatttgatagtcaccaaatttggcttggtgatttatttgactagacacgttgtgataagtgccattgtcacatgttttgctctattaaagttgaagttaaactgttataccacagaaactgtctcgaggctgaaagcctttttgggctgtgtgtgaatgaagtctgttaatgagcagttataaattcggatgcaatatgtacacatgaggtatctgacttcacacttgacttgaagtctcttatatgttatttaagagatatttcattaaactaaaaatcggagaaatcctaggctttttacttgttttttctaacattattaccgtgtaaagttcgctatgaaaaggaaaagtcaagaaatcagctggttgaactcttggtatactactactttacatgctgtttttgagtttttattcttgagatagtacagtttacaatgtcataaatttgaggcaaattactaagggttgtttgtagatttgttgataaaatcatgataagaccagccttataagttcccattcgcaatttttttgaaaagagagaaataaaaatgaaacagagagagtgacaatggacatgggaagaaacttttatttcgatttttatagtactgggttgaatgggccacgcacaaagggaataaagcatcccatcagacaatgtccattagatgtacaaatttaataaattggtattgagtgaggaagataatcagccagaatcgtaagttaggttttcaagaactttttgtctgtatgaattaagaactcaatttctggctttaatttttaaatcaactagtacattctcatcaaaaaattacatgctctggtcctttggaatttggtgtctgtttggaggatctctgaatagagaatcccaggtttttatggtaaaaagtgatcagttgctagctaatgatatttgcacttggagaaaaaaatgtagattatgcttgatttcacatattatgtttatcaatgactgcttacttgagtctcccattcaagatgctttatacttgatcggcta

SEQ ID NO: 21132 - DNA, 4458 bp, Cannabis sativa
tgcaacaaataaaaattatttataccacaaattatttttaaacttaataattgaaaaaattgaaaatagtacctgaaaaaataaaattgttataaagtaccaagtagcatgacaccacttaaaaataatgccttataattaatgaacaatattttataaaaattaatatatattaaattatttaaaatctaatatttaattaccatagcttaaacacaattatatgaaatagttttattttttacacggaacacgatagcgaaacctcaagtcttaaaaaatagcaaaaacaaaagaataaatacaaatacattacaaataaataggtaaagcaaagcgataacattttgctttttaaacccttttaaagagagtcgagtctgttcgttccttcttagcaacgagttcaagatatatagctaagacaatttatacttctcattaaaaatgataaaccctcacgaatcccaattaaacaaacccaaagaattatggccataaattataataataataataatgcacctcctcctctctaatatacaatatttgttttgtttatcccacccacatttattttattggagagaaaaatccgcaggttcaggcttcaaaataatggacaagaaactgtaatactgtaactgaatgactccacatctcactcaaacaatctcagatcaaataagattaattgtaaaggagacgtacggatgagtatcagcttcgcctcctaaaccagccattgctccgacctcatcttcagctttccaatatgtgctgccccatatcataacaacattgtcagctataaacactagaaagactcgattttatgttacttggtttttatcagaagcttgcgataataaaggctaaattgtattacatgaggttcacttttaacaattttagtacacaaaatagtattatactgcaaaatcgagatacactgaagatgtatttaaagacaagttaaaaacatactgtgtattatctttacgtatgacttttcttagaattaacgtgagttattgttaaagaccacttgcctgtttgtactgtcgcacaacccttcaaggatatgacgtactttcttctcgcccttcagagatggagctaaaacgaatgactggaatcataattaaagcagttagttaggcaaaacacaagagtttaatgagaaattgtggtcgaaaaaagaaaaataagaggttacttaccaagaaagatggtggcagcccatatctaagaatgctctccgaaaagatccgtacagcacagaagtgcatccaggagctgaaaacctacagggatgaaactcaacaaattatttaaaaattaaacagcacagcctacgtaggaatacttggggaaatcctataaatatctatatcatgcatcaaaaagatcattattttcacaaattttacttctaacactgccatgaaattttatagcttaaaacaatgtaagtaaaaaaaatatacatacctcgccataactggtgtagcaccactgtaaaagagagcttctcagaccttcttggtcttgcaccaatttttctagctcctgctttcgaccttcttgagcttctggactatattcaaattcacgaatctaaaccatgatgaacatacacaaatcttagtaccagcaaaatctcagaaatattaggatcgacctaccttttggaatattaaaaagtattgaaaaacatatgaagatatgttaacaaacagaggcattgagatttatgcacagagattttaagaatccataagttaactacaaggccatgctcaaattattttccggaaagaaaaaaatcgtatgtaatagtaaatcaacaaactcacttgaaagcctttttcacgtgcacttgttttgaaattgtctgcaacacgattgaatagtgttacagtgtaaagagcatattcattatcttcatacaggttctttgaggacctgggaacctggaaaaagcctataatgattaaaaagatattaagattgatgagacaacaaaacagtaagtgctcatgagagaatacaattcattcaggaatttttatgatggattagtcgaacattgtattgagcaaaaggcagtctatgtctcataagtagaagttggaaatttgaaagtagaaaagtaaattaccacatagttggtcagtgtctcatagctcgccagccaatccttttgtgaatacttgggaacaactgcaagcagtgtgaccagatgttctgaagaaacgatatcctctggtttaactagattagaaagatcacggactgctaagctgaaaaaaggcaggaggtaggtcagttaggacatataataaatataaatagtagcctttaaaaccttagttaatgacttttaccttccagcttgctttcgattgatagcattaagctgactacgcacgttgttatactcacccacacgcacctaacacaaaaggaataagattaaattttttgattgggtctatatatacaaatacatatttatatcatcatccatgtaaggaagctgcttttcagtgaataggttttacttattgcacaagatgcgtagacccggagcttcattcttttcatgtgttctaagtgagaaacctaaatgatttcaatagcaaaggaactataaacctcacaagatctattccttaacatcttgaattcttttaatatagctatcaattatcaacataatctattcaatatcactgttaaaacaaatttattctttcactattttttcctaattgataatgaaacaaattgttttcctatgtgctctaagtgatataaacctaaatgatctccatagcaaaagaaagtaaaaatctcaccgccaataagagctctgcattcataacttggattgtttgattttgctatcaagttatcaacataatctactcactatatttttacacactacttattcttccactctttttcataatttacaatgaaattaattcttcaactatgtgttcaaagtggtatcaacataaatgatcccaaataggagaagcaaccatacacctcagccaataagagctctgcatctacaacttgtatatattttgatctcactatcaagttatcaacataatcaattcaatattttgtaaaactacaggtttcttcactcaaattcttaaccaattatttattttttctacaagtgctaagggctaaaaacataaatgaactcaacagcagaagaaactataaacctcacaagcaataagagccccacaacataatctctccaacaattttttgttaaactactttattctttcacacacactcatttgccatatcaatcaataatgaaatcaacaaaaatcacatccaaatgaaataaatggttctgttaagataagaagccttactttaagatcatcctcaatcttagccacttgactgtgtatgccatccacaatctccctcagaggagacatggtgggatacttagcttcatcccaaacaaacctaaagccaaaacatcataaaactcagagagcgttcacagttaaattatcgaaatcgaacctcagacataataaaattgatatcaatgaatacagaagatactttaccttgtgagatacgaatcaacaggtactccatcaacagtaagagagctgctctcgccacccgaaaccctttccagctcctcgatctgccttctgatcttgtgagacactccttcaacgaagttgtttgactgcacaatccaatcatcgccaaaattcgcgaaatataaacaaatagaatgagaagaaaatccaattcaacaaaaattcaccactaaatcatcaaaatcggatgaaattcgtgcaattatcagtagattccagtaagaccgaatcaaattcaaagttatacatacaaacacatatatatgaaatatcagaatggaatctccaatgtaaattaccttcacgagatcatcactgagagagagaagcgagtccagcgttccgacgcgaagactaggaatattgaactgaaagaatgaaggaagaaaaatgtcaaagaaaagacaagaaaatcagatccaatcgcaaaatgaaaaaacactgactctgtagagtggagtatcaaaggagtgcttagagatttgttcttggagacgattccatagagaagaagcagatccctgaacaggaagagaaaccacccaatacctattcgccattgatacgatttacagagaaaaatttgaaccaaataaacactaactttctttctctttctctcttctatagatcaaatatataaatatcaaattttatatatcaaatgagattttatggaaatttatttatttattttaataggaggaacgaagcttcaataaaaaaaggaccaaattatttgtccttatcagcaaaaaggaagaaaatctgtccttaacagcaaaataat

SEQ ID NO: 21133 - DNA, 1628 bp, Cannabis sativa
tctaatattattttactccattgatgactgtgttcttaacttttcttaaactagttttcatactcagttctttgcatttgattgtataactaaagtttaatttacaaattcttactgtcaacagaagcatgaggtcattttctatatatatataaactaattggacacaagtgacaaaccccaactgatatattgaagtaatatataatatattatcctattttttaaaataaataatttaatttttagaaaaacaaaaaatgttttctggtgcgagaaggcgcacagtaaagagctcctcattagtcatgcgcatgccacttgcatagtgcaccaatgaggcacacaatataaacctctcctataaatgttttattatgcatagtaaataatttaaagagtatattggggtctaaagctttccaccaacataaaagaattcttaatatatctactattttgttaacaaatggattgacactattaattgcattcatatatgaaatgttttggtgaaaataataattaataataggaattatttcataaatatatacaaaaataaaaaaaaaaaattacaaaaatacaattgttaaattttaaatatttttacgatttttatgattttatttacagaatatgcggtttttttatgttgtactcttattaatttgttattgattttttgttaaatttatatgttattttttgttattatttgggtattattttcttattagttttatgtagtttttttattattttcgtattgtttttataaaaaaaaaggtaaaaatataaaaaaaaaattctttaaacataaaattataatttttttttttataaaaatgatacattatgtaataatcctttaataataatgaaagagacttcgaagttccaataattacatacctaatatataagttgtacagattattaattaatatatttatatatataggtaacatataaggcataggagcatgtccaatttcaaaggaaagtcactagaaatttccctcaaagtaatattttcaagatatataaattgaaagtatgttttatatatgcaaagttgccattaattatatttttgttaatgtataataatcatagagtactgaaaagacatatagattaatttggactgaatcaaattctcacttttaccatcttatggaaatatagtgagtaatatattctagtaaaaaattatataactcttcaattgtagtatcataaactatatatatgtatacacaatattatatggatatatctaaatagaatataacgatgggatgatcattattagaattattagtgaatgggacaaagagagagaaagggacattaaattttagtttttattgcttgacatatttgatatatcgaagacaagaatttatatcatgatcatgacaatgatgaagatatatatataattaatacttggggttaaattaattaatttctttattattagattaatggaaaaggaaatatatgattcatatgatgctcatcatcatcagttattagcttcctaaataataatattttctgtacttacttaataataaaatataaaaaaattgctaaaaaaggacatcgatataaatata

SEQ ID NO: 21134 - DNA, 2331 bp, Cannabis sativa
ttttgtaagtgaaatttcagtatattggcacacaccacaccaccacaaaatactttctcaactaaaagaaaaacagtcaacacactactctcttcttcttctcattttctcttcctatcatttccagttcagatgactgtaaacacagaagaagaaaccgccaaaaaccatgaccaagatcaacaacctaattacaacgaagaagaatcagcaaaacacaaacccagaattatctcagactctgaatcaagtctctcactttcacccctctctaaccgttcctacaaaacaccatccccttcggccgatcactctgcctacttcgatcaagcccacgaggcccatgagtattcttggatcgagaacatgcccactaagcccgcttcgcctctggcccagcccaaccgctcctttccggctgaacctctggttgtgaccgaagcattcgacccagaagctcatgacggcgttgtagtttcccctgttgaagaagaaaattcagaacgagatgtcagtaacggtaacggtaacggagagggaaaaggaggtgggcttggtagttttaatcggcggaagctgaggccggacttgccacccgttaagaagaggatgaaacatgggttggttaagagggttttgttggggtttagggtttgtgggtttgtgttctgtttggtctcattttctgttatggctgctaataggaatcaaggttgggcttttgattctttctatcgatacaaggagttaaggttagtaaatttaattgcagttgtcagactgaacaacaaccttcaaagacagaaaaaagttatcttctttgttgtacttttgaaatttaactagtaaaaaatctctcttgggtttgaatttttcaggtactgcttaggagttaatatattgggatttgcatattcagggctgcaattgtttgatctgatttatttcataagcactgagaaaaacttggttcaacacagattccgatgttactttgatttcttcatggatcaggcaagtcaataaatgagcaaaaaaacaaaggtttttttcctcttattttttaatggtttattagtaaattattgttgctgttattgtacctaaccctggctctttgcttatatgctttggtccacaaacaatccccactctttgttggggtctgaccactctttatggtgagtcttatcatggggaccatgtccttaaaaacatggttttcattcaagctcctgtagggtttctttttaaattcagcttaagaagtattacatagccaatggattctataagtcttagcctttttgatgaacttttctccaactttttccataaaaaattccaccttatcctttcaatctgtgtaatttatgtactttgcgtgggaaaatttgcttcttgaagaaaaagatttaacttttatcctaaataacttatgatcactttaatctttagtttagctttgttatggagtacaagttactatactaaagagattacctttaattataccactttagtgcatatttaaaaggctgaaactccaaattgacaatcccaacagaacctttttttttagttccaaaagccaaagggcacaattctttttacccacatatagattcttacaaacaagcttaagcaatatgcaacagtttggtgtgtctcattggactttgtggacaattctcttatgtcctgttgtacttagattccatgcaccaggagagggttgtcttttccttttgttatatagtttatggttaaaatgtcacccatgtggctatcatgacataaaaattgactacaaattgattatttttaagggctgaactaatttcttatttgtttatgctgtttgaaagttgagactgtatgtggacactgattatacctttttttcccttctttcttcaaacaatgggcttgtgtttgggaattggcagatgctcgcttatcttctaatgtcggcatcttcatcggcttctactcgagtagatgactggcagtccaactgggggaaggataagttccccgatatggcccgtgccgctgttggagcttcttttgctgcttttgtttctcttgcttggagctctgttatctctggctacattctctgtactaaagctttgtagtcaccactccctgtgttatcgattacaataactatacagttttcctcttaggtatctatacaaattacagtacattagatttgaatgtgacggattctcagaattgatctactccttaaaggataatcttttcttgtatagaaataaggtttctctagttgaactctgagttaatggactttgtaaaata

SEQ ID NO: 21135 - DNA, 6954 bp, Cannabis sativa
  modified_base (5658)..(5666): a, c, t, g, unknown or other
aaaaaatatattatttttgaatagaaaattattttaaaaaaaagttatccatgaatttctcataaacgcaagaattcagttatataggcacactttatatataatagaaatagatatataaatatatattaaaaaatataaaaattactatacacaatattatgaagataaaagtgggaccatttcgcgtgacacaaatagtgtggcccatacacagattttatttgttactaatttggtctgatgattattttaaatttttgagtgctccgttaacagttaatttagttaataagtaagactatacttttttttttaaaggtcagtttggcacggctgtgctacgagaaaaaacagttataactgtactgtgagaaaaaaaaaaagtagcatagaaaaaagttgagtttagcgtttagaaaatatacattttaaagtactgtaaatttttaaaattctactgtaataatgagaatgctataatctagtttattataatcataaatctatataaaaattatgttatgtaaaaattttattttttatatattttttaattattttttctcatagtataaatttatacacatttaataaaaataattgcttataaaaaaactctaagttgatgtggtttattaatagtaaaaataaaaaatataaatataatgtactttttaaaacaaaataaaaaataagagatttaaatattttttccttcaaaaaagatattttattttttgtaatatataataaataattaaatatatttttagtggaaaataatttattatagagttttttttaatcaaaacagttttttttaaaaggtgagctttaatttttagttgtagtttctttataaattattcaataaactgttttttaactccttaataaatattttttttattacaatttttttaaaaaataatttttaatttttctaaaagttgtacaaagtgactttaaattaaacatggtatataatgttaacgttttaatttcacttgttaaactttatttgaaggagaagtcaattacttggacctgtgactgtgagtgtgactctatgaatttgggaattatgtttataaaatatatataatatagtaatgtgacatggtctaaagttgattgactaattattaaagaaaaaaatagtttaatttcagcacaatttgtagtttttggaactttcgtggaagtttccattttcacagttgtgtgcattttaatggaaaataatttggagatattagagtgatgataagaaaaaaagaattatggatataataaattataggctaattaagattattttttttcagaactttaacatgtactaaattatgtatcttaaacttttaaggtcattaaaaatgctccttgaactttttaaattgttaaatttaaggacttttatgtaattttaataaaaaaaatttaacatatatgaaaattcaggggtataatttagtatatgtcaaagttcgaggggcatgatttgatagatattaaagtctgtggagcatggtttagtacaaaaacaataactgaaatagtaaaattaaataaaattagacaaaagttcttaaatctaacaatctcaatagtataggaggaatttttaatagcaaaaaaagttcaggggcataatttagtacatgttaaagtttaggggggcaaaaattctaattaggctaaattatatttttaaatttttaacattgttaattttgtttgaattattgagattattaaattcaaaaaattttgtttaattttactaacagatgcttaatatatatggtaattgtcaatgtactacattgtgtcattcaaattttatgcactaaattgtaattctgaatttttgtccaattcaaacgtttgttaataaaattaaacggcattgaacggaatttttcaaattcaacaatctctattgagtttgaggaaaaattttaatggactaaatattcggaaaacaatttaatttatgtcgaagttgaaatgaattttttttaattaatgtgatacatatttattgcacatatatataacgaaatttattataccaagctagtaacaattgtgactaaatgtatgctaatgaaaattaaggcttagttataatttagtagtagataatatttactatatgtggtgcggtaaatttagtagtagataatatttactatatgtggtgcggtgtagtatttgtttgagttaattacgtgctggtttggcaggttctcatattttattcaataataagtaatattatatttggataaaatattatattatattaattattacgactataaattttaatacaatgtaaatcgtattatttaattcataaaaaattattcgtattaatttgtattataatatttacaaaatattcgggattgagaatcccggtcctggtcccaaactcttgacccagacctggcataaacagcaaccctgttctcgaatctcagatcctaatgccgatttcgctccagactcaaatcccaaatttgaataggggatcgagtttatgataaagataatataattttattaatataaatcaatatcaaatataatattatatgaaataatattaatacaagcacaatacaatacaaaaagcggtaagagttcaaattaaccttatcatcatatctcttttattgttttcagaaatatatctagctagttctaagtattgttgttgatactttaatttagtgtggagctttattattatagagataaaaaattcttcagatacatttattaatgacctaattaattaaaaagatgaggtaatataaggtcgacatgatctattttttattggtgaaaaaattatagagtaaagacttgttatattatttaattaagtttaaaatttagtttcatcacgaaatatcattaatataaggtttttttttcatttaatttttttattaatttagcacttttctcttatttgctcatttgtgtgtatttttttctcaaaggaatttccattataatttatatatatgtaacacatatagtaatgtgtttaataatttattcacaactataatataatttataggtcatttagtatgttccgaaaagaatttgatccattatagttttttattattattattatttttatttttaggaatgaacagtcaagtgatgtgaaagtgcaatattgtcataaaattaaagtactttttttttttagaaatcaaagtacattatataatacttcaccattgtattactaattaagtaattagtttcataaaatatatatatatacacatatagtattattaaataactccatatatagcttatacaacgacaacaaataatgttgtcctagtgtttttatgggttatttttttttttttaaccattttctattcatttacatttacattttttttagcaaataattaaatttggaagttttactattttaaaatgattttaaccataaacagctgtaatgtcataatcttcaagacaaaaaaaaaaaaagtcattatcggtcgaattgtttaaaattaacaatgatgaaccttctcgaaaacaaaataaataattataattaatatattaattttgtgccattggttcattatcatatatatacatatttatgtgacacagcatatatattattatgttttttcttttttttttttttaaaaaaaaaaatcacatttcacatctatattgaattctttaatcgtgtactattcaaattagtggcaatggcagccacaaaagccaaaaactaaattaataatcatatgatgtaatattttaaaacgaataataataaaattaaaattgatcgatggtgaaatatatataaaacgacaaaaaagagaatattatatatatgctatttcaaaatttgagaaaataataaaacgaatttctgaaaatcactgccgaaatccattgaactttgataaaaaaacaaatttaaataaaaatagaatttaaaagatactttaataataaattactatttttcttttgaaaggtaattaatattcttttgacactcaccagtcaccactatatataaaagtgtacatttttcacttagtgggtttttacttttacatggatgataatgttagttaagttgataattacagtttaattactattttattttttgtcattattcagcattaattattaattaattacttttatctctaattattctataattatactagttatattttaaaaagggtattaacttataatattgtaaataaaagttatttggtggagtttttctttaccatagaataaataatgaaagataattatatatttaatttaattagttaaagtcattcttttgttttatttaaaacatatattatattaaaatgttaaaaaaaaaacatacatttatgagtttatatcattttgagtgtttgtatataaattttagcttaattcaatatgcataaaattaagattctcagttttaaaaaatacatcatttaagtaattattaacaaaaatgtgaattttttgtaagttatcatgttttcatatctgaaaatatatgcatccatattcaagtaattatttaaccattttagagaaacaaatgatccaaaagtacattcttaaataaataaataaaataaaataaaagctattaattatatactatatatattgtctactataagaaatatttatataaaaattaatttaagacatatagtcaaattaatttatcatattgatattatatatatataaaaaaaaaacattccacaaaagagaaaaaataactgaactagagaaaagaagacaagtgatatttacccctataaaattataaatacacctaatacttaaaacaaattctaatatttttaaatattttcttttcacattattttgtgttaaatttaataattatttccatagttttctaaaagttatttataattatttttattttttcaataaaaattcatattatatattttttattttaattttttctctcaatatttaaaatatattttatttttattttatatgtacattttgaaagttataagagggaagaaaaagatataattttttaaataaaataaaaattattaaataaattaaactagtaaaggtattttcataaattttttctccaaaaaaaaattatcacatattaagatgattatgaatttacatgatttcccttttaagtgaaaaagccatgtatacatattattattattattattattattattttgagagatagttagagtcggcgagttgaaataggtcataggtaaaatataatttttagagtttttactataaagataaataatatttttaaaaattattataaaaaatatgtatatcttttaaaaaaatattatttttatttggactcttaaaataaataggccctaagtataaatctaatccgcttatgtctgtgatcgctctggagatagtattatgaattattgatattgttgggagaggtttataaggttattctttttggtagtggatctgttgttattatatgttcttaaatttaatatatggatatatacattataaattacaaattattattattattannnnnnnnnttattattattattattacaagtggggttaggttaggttggtcacgctctgtagttggcttcatatatcaagatgcatttatatatatagtgatgttatatgatatattatatgcgatgatgaaatgttcataagttctaatttggtcaaagagaaattgtatagattgaataaattttttcatgtctaaattaattgaacacgtttttttctttttatttcgtcaaaaaaattgactcttcttaaattacaaaaataaaataaaataaaataaaagaagtggtcgacatcttagtggcaatcccacttgcatgccctcgtctcaacccccaatcttcattttccttttttttttttctaatattaataatgaatagtaataatattaatattaatattaatattaatattatattatattaaacctattttaagataataagaaaaataatagtaattatataaattataataatgtagttgtagaagatggatacaaacaatatttcaacgatggggaggtcatatcttgttgattaattcaccatttcaatcactatgacatatatgcatgttcatattattatatcacttcttgagttgatttttattatttaattttaataagtaaaaactcaagtagcattttgatagagattgtgatatggactaattcagctctagaattaaaataatggtttttttttcaaaaaaaaaaagtaaaaacctaattagtagcaaaataaaatttatagttcttatttcctcaaaaaaaaaaaaaaaatcaattatttaaacaatttcaaatttatattaatgatatttaaaattttcaaatacataaaaaaaaatatattatattttgagactattatttagtgtggtgtaattatgtttataagaatggtaataatcttcaattagtatttttgaaatttttagttcttaaatcttggaaatatattattttgatactagattaatcactcttattttaattatttgtcatttatatatcaattatcagggccggacatttacttgtgcaatgagtgctaatacacaggatccacaaattaaaaaggcctaatatgactttttaggatattttttttaactcaatcttccactaatttgttattctaaataaaaaaaaaaaatttccttaatttcttttctttatttaatgccttttaaattttttcccataatatttgatattaatttgaagttgcattagaaataacaacaattttaataaaattgtttaagtttttgggtgcttaat

SEQ ID NO: 21136 - DNA, 4745 bp, Cannabis sativa
  modified_base (67)..(72): a, c, t, g, unknown or other
  modified_base (4341)..(4343): a, c, t, g, unknown or other
gaaaactattttaaaaaaacaaagtcaaacaagccaaattttttcaaaaaacaattttctgtttttnnnnnnaaaaaacagttttttagttataataccaaacatgcactaaatttctgaacctttttttttttttcatttcgtttaagaactgagagatagagaagttaaggattgatgaaaagataaagggaaggagtggtaggaaaatgggaggctaattgacagataatgggctaagtgaaaaaatttggcgccatttttcttttatacaatcatacaaaaaaaaaatgtgaattccaaaatggtaataagtataatcattttgttttaatgatcaaatattatcataatgatttttttttgtttaattattatattatataccttcgttttttattgctaatttttttttatttcttgaatattagaaaatattaataattttatatgttgtaattaaattttgaataatcaattattaatatgtataaatttaattatgggatttataaattaagtttcaattaatccaataataaaattttgagaactgaataaatactataaatatgattgaaatttatcaataaaaaaatcgcatcacaattaaaagaaatattttattttacaaaaatcgagttcattttaaaatgtatcccatacgtacttaactaaatgactttattcaaatttataattaaataattcaaaacatacatactgatcaggaacatttagaacaagtgttaataaatattgtaataacataataaaactatcattattaattaatttttaataatatttttattaagtcatcaacgataattagtatgacatttattatttaaatgtcattaatatttttcatgacatttctcaacaacatttataaactatcactactacaaacatatcttttaacttcgtttttttagtttaataaattaaaaatacgaagttaaaattattttaagtccagtatcatcacttttagtttggcatctaataaaatttgagttatattttcggttttcctaaataagcgaagttaaaagtaaagtataatttctcaaaaaaaaaaaaaaaaaattaaagtataattttttattaatttttgctttattgtaaaaagagctttgtcttcgcttattagcttatagtcgaagactaaagtctactttagtctctaacccacgatacagctaaaataaatcaaacctctcacttaccccaaatcagacccttcgcttacccccaaatcagacctatcccaaatcagttactccatcgcttacagctactcccaactcctccgacgacgatgacggcccaaacgaggtctagttctcctcccccaacaaccccaaacaacgacgaggacgtctctctctgtttctatccccgaagtctcttattttctctccatcaatggtcacgagaaggacgacgacgccctcatgctctctctcatctgatctacgacgacgccccgatggtaagagaaaagcttagatattgagtttgtgtttcattttttctgtgattttcttccactatttagtttagctttgttaatttgacacacttgctacattacaatgacaaattagaagcaaggaaaggggatcccatctcccataggcctttagtgtgctattaagagaaatatagttgtactctgatgttcccgttatcaaaacaactgatttcagtgattcaggatattcctgcagtgatgcatcctgcattagattggaatttttatgtcagattcacaagtgcttaactgtgtgattaataagaaaaatagccgaaaacatcttaagagttgatgatctatttccgagttttagaaaatcagctttgagatatcaatgaatatagtgcagcaatagtctttcactgtcaacaattgttatgagtaggttacctcagaagaataaaaagcaaaaatgaatatgacaataaatattaacaagtaactaattataacatcaatcaatatttactcccacagaaaagagagaaacggatctgaaattacctgcatattataatataattttaattgtgaactcttttatgtaatggtaagctaattacaagaatccaatagtggttctatttcttgttctatatctatggatttagaatgacaaatcaagaatttggttaggcttttgattaattgatgcattgtcctttttctctgtagtgctgcgtgtactactgagtagtttttaatgatgctgatgatgatgttgttggggaagaaattgaaaagttgttattccatttgatggaaaagccctaatcaaggtaattcttttacaaggtttttttatcaagaattttgtattaattgatttttatttgtgtgtatttagagtgtaattttagtatttttatttaatttattccatttgattcgagaaaatttggaaattaggaattttagattgtttatcttttcattttctttgtttttggaaaatataaaattagtaattacttttttgttttgatgtcactcttgtttaagaaattgtgtgaatattacttttgtttttgggattttgattttatgttgttattcttgtttggtgtttggtgttttgtgaatgtgaacttaatataaatctagatatatttttatatatatatatatatgtatcttttgtgtgagggtgggttatatggttggatttatatggttatagtgtgagtgtttgttattttattgtacatattgcagcccaaacattaaactttcgtctcattcttcatacgaaaattacattgtggtgtaatataatatgctacaaacaaaactcaatcatcattggcataatctcaagatgaggtgtcttaattgggtttttattgtatataaaaaacaaatgtattttgcttcaggtatgtaggatattgtggtttcttaattagtttgaaatatagcacatgattcttttcttgtaaattagcattttaaagtttcatgaaatataaacaatttgagaagaaaggaaagagtttggccaagtttcaaaacacttttggctccatttaaaagtggtgtttgaagaaaaaaaaaactttgttgatcttttcacaattactttaataatttttaaccaatggtaatcattcggaaaaaagactttgtttgtgacccgtatacaaggagatagaataatttaatttatgctaatcattcggaaaaaaaaatattgtgtgtacccatatataagcttagaatattttgtactgtggaatgaatgctttgtatctttgacacttttggattggaaatcttactaagttaatacagtacagtagtcaatcaaatttgattgaaaaaacttaatggaatgtatatatattgctacccacttgtttgtaggttttgcggttgatcatcgagggtccaaatttgaggtggaacacaatttctttcaagtgtttattggtttgttggctacttagaggtatattttttctattttataattaattatgtattaataagcatgttagatgagttttaatatcttaaatatttatccatagtgaagtaagttctgcggtcggatgggtggaatttacttttttatttttgtggattgttatatgttttgattttatagttaattctttttaaaaatttattgttgttatgctgttgaaatttcagtataatttggataaatgttttgatttaataagatgaataacaaattttagatgttcttcataccgtggaactacgagtatgtacaagtactatttaagaactatttaaatatagttttatttttctttttaaattaacacttaatattttcttattaatttcttaatagttgtcattgaatgcttgagatcgtttgtgtcgcgaagatcgctcacttggatcctttgttaaaacattgtgaaagctctaaattcattcgttcttataaaagaaaaggtaattaaattataattaattcatttatgtatacccgtaaataggatactataattataattaagagacatataattaattttcattttaattttatagtttggaatgaagaaagcatacgatgcggagacgatgttgctaccactgcaacatcaatggttatcgaaattgacacaatatttgtaccagttagctttagacttttaattttaggcaatacttattttatgtataatttttattagtaaggatttttcatattttgtaatgtatactttaactttgttataatataattagaatattttttgtacttaattttgttatataattaaaatgatttttatttcatagaaactatttannnttataattagtttataattgtttccaaaaaacaatataatgtataattaaatactaaataaaaaattaatatatattcagatttaaatattaattgaagaaaccctacgtcttcggtttttatataataatcgaagaggaaggtcccttttctcttcggttattatataaaaactgatgagaaaagtaacctttgtctttggtttttttatataataatcgaagagaaaagtgacctttttcatcagttattatataaaaaccgaagacataggacccccttacgtcttcgctattttaggacatacgtcatcgcctcaaataacttcggtagcgaatttttataaaaaccgaagacaaactgacttaaaaaccgaagagaaagaccctttttctagttgtg

SEQ ID NO: 21137 - DNA, 4791 bp, Cannabis sativa
gttagattaaatttgtgttttctataatgcaatttgagtcattgatcgaagaggcatgtagatcgttacgctttccttataaatagagtgagaaaaaatgattcaccactttttcccatttcatattttgagttcagactttctaagagagaaaaaattgaaaaatacttttagtgaatgtccaatctgttcgaaaattgtcttaatcttcttcttcaaattcatgcaagagaaaacccaagagcagtaccaccaaatttgacaactcctcttccagatctgttgaggccaccggatctctaagaagagatcaacagactaattgcttgggcttgtaagctttaggccaaacattgtcgtctcaacgaggattctattatgattttccactgtaaatattgccacccccacaatttttatcttcctcaagtaagtactctcaccctttttgaacttttgatttcttttgtggttgaaatgcttgttcaaattttaggtagggtagatgtgttctttgttgatgatttaggtgccaattttcaggtgggatataggatatagtatgtgaaatttaagttttccagagtcctctagaacattcttgagaatttatgtacaattggcatgtatactgtctaaaaattaggatctgtgaactacgttggttgcccatttcttgtgaacatcaggtatgaaatgtcactaagcatattcaaatttaaatttttctgtttgggacccttacggttccagatgaagcatttaggaaccttcagttttttctcaagttcccgatctaattatctcagagcaaagttcaacaggggctttgcttttggataacaggtccgacagggacttctccaagcagatttttaggggaggattctctcgtatctctactatttctttttatgtgggtatatatctgcttggtttttcttttgcatttttctctagttgatcatcatgttggacgtctttgaccttaaaacggttgaactgattgaggagcaaactgatgatgctacttcaaaagtggtaccgaatgaggagtgacttaaggaggtggcttcaaaagtggtatataatatttccctgtgcgagatggaccagatccccaataagttccataactacgaggtgttgaagcgctattccaaggaatgagaggttcgccatatttcgggtcattgttggaataggttgttgctccatggggagtcacctactgcgtgcgtggacgaatttgttaactggatctgggcgcacatcgtatatggagtgcacttgccgctgcgatgttactttgcaaacttttgcccagcactaggaattgtgcccttccagctcattctgtagtcatacaagctaatgttcaaatggtacatcctttgcatagattggaaaatggaggttccagaaccagagataacaatgtacttttatagtgtgaggtcacattccatatggaagaacagatctaagatcgggttctataagctggagaggcgctccaagatggtttacccaaccagtagtgtgaagcatgtcccagacttccaggactattggttctttacatttggctttcctttaaagagagctcctacactgtcatttgacttcttggttttgggtatgcgtcattgtttttcctttctttcaaattctttccgcatttagaaaatggcttgctaatataaaaaattctatcattcagccaacatttcacctccaggtcctaccgacttcttggtggcgagggaggctttgtagatggggatgccttcagcggcactgaaggtgaaagggttggtcaccatggccaatcttcaaagagttgggttgatagccccacacctaagcagtgactacttcgatgcttgtgacctaacttaggactcatcggttgttgaggaggacattatcaagattatggttgatgagattcggaaggccaccaaacaggacaaaaagtggttggcagactggaatgtgctcatccagacctagtgagtaaggagaacaaattggcagagcgctttgctgctattatttcaaatgagggcactcagggtgccaatactttaagaaatggtaaaaccccattcaatttttatcacactctacgttcggacatgaaggctcagatcaatcaagggggctttgatccttattttttagaagtagatctccttaagtgtcctatgataaaaaattacgataaggtagacaaaattatgaggagcatagaacatttctatctcaatttgtcaagatagatcatttcaacaaataaaactaatgggaaggggagagtaaaatagaataatgaaatcatgcaatgtgtacatattggcagatctattcagaatttaacagtaaaaaaactaatgagaaagtggagagcaaaataaaattgcaatttagagagttttattttaaaaatttgataatagaaattactcgtgtcaaacttcaaagttaaagaaatttacctacaaattacccaaataaaatataattatataaacaaaatactaacataaaagtttgacacgtacaaaatacaagctttatacaaataaagcagtgtaaatgttctatttaaattcaaattataaattaatgagtatttgaaacttaagtacactgcaacaactacataaaattacataattatacagtgtaaaaaaaatactgattaaaatgtaatgtaaatcataaaaatggtaacaaaataaattctcttggacggcaaatgatatattttataaaatattaatatctcacatgcatttttttttcttcgaaaaaaacaaggccgctaagcctgccatcattgggcaatattattcacaatgcttttgttgttcaccaacgtcatgttttaaaaaataaaataccaattttactatgtgtgtatgtttgtggtgttagaaaaaagaaatcatcagtattataaggttttcaactttaataattttagtataaataaggcttcactcatatccttaatcatcacataataaaacagttcattgtcacttcacattaagaagagtaggattttgcaaatagcaagaaaaataatggctaaatattcgagcaaagtgaccatcttacttagttttgttgcattattctgtgtttttgtactgatatccatgcccattgcggagagcattcaaattggaagtaagttataatatagttaaataatttggtaattgcattataaattataagtttaattctttttttcttttaattattattacaggtggttttgctggtaagaagaatggtaagctggtatgccaaggaatatatggagtacaaagtggtgacaattgtgctggaatagttaaaatgtttagcttggattctgagaccttcacctttatcaatcctaatcttgtttgcaacaacatctttgccggtcaatgggtctgtgttagtggccaactcaactaattacttactatcataggcatagcctcaaaaaaaaaaaaaaaaataaataagagagagatagagacaagtgttttcttctccatattatgtatcaacatatttcctaattatgcatatgattatgcatggttgaagggcaatgtgtgctttgtttgtttgtagtcaatatattatatatctttaatttctttcatagtaaaatatttgcaaatgaagatgcccaagtgttgttttcttcatttctttacaattccattgcttgcgtgataaattagatcgaactatctaagttttaaggcatcaaaaatcaaaatgttcacatctttctacactcacaaaatttacacacaaatattaaataattcatcattatagcacatcatagtacactgaattttgtgtatgaattgagagcagttacagaggaagagttttctttgagagggataattcaaattataactttgccttactaaaattttacaattttcaaacattaatatgttaaaataaatccatttaagaaaatatgttataaaaaattgtctatgattaacaaaaaagctatatagtgagaatatttttaaacttcgactaattaaattacataattgaccgtcaatacatattaaattacaaaaaatctaaattagtcaattaataaaacaaataccacattataccactacttattaaggtcaatgttaaataaacttaccttccaattgggattttatcttaggtaaaatattggtagaagttattattttatcaaagtataattttaaaatttattctttttaagtgagtattttgcatttaataattatataacttgtatatatactaataatcataccatataacaaatgaatttattagtatatataattaaattgagacaatatctacctataatctataactattatagtgttaataattttggagagttatatttacactccataaaataataaaataataagtatgcctcagcctcattattgaaaaaaaaaaacttaataaaaaccttatgtattatttattttatgaaattaattaggtattttatgtattatttatttctcttaaaaaaatctaaaatattctattttacaaaaatagaataaaatattataaatatttttaaagccacaaaattaataaatactacattgaagctacctatctaccaaatcttaatcaaattttagtaatagagtaaataccacatttggtgtagttaaatttatcaaaaatgaaatagtaacattgcaaatttatcatttttaataacagaaaatgaag

SEQ ID NO: 21138 - DNA, 3863 bp, Cannabis sativa
taaatctaattatattgaaataagttttatttagggcaccaaaacccaacagttttatcaacataattgacatattatttgaaattcggtttctaaagttggtcttcatgtgctaaatgattgtggcaatccagttgcttttaataagactttgataaatctgattcctaaagttaaaagcctcactccatgaaatattttcatcaaataagtctctataatgtcatatacaagcttatctctaaggtgttttttattctcttaaaggatgttctttctcatgttatttgtgaaacccaaagtgcttttctccctaatcataatgttctggtggcttttgaaatggtccatagtctaaaacatcgtaagagaggctccaaaggatatgtcgcactcaaaatggatataagcaaagcttttgatcgagtggaatggtctattctagcagctgttatggaaacaatggggtttaatatcagatggatctctctcatcatgacgtgtctacacacaaacaccttttcttttctcattaatggtgcaattcaagttctgtcatatcgcaaagaggattaggccaaagggacccactctctccatacctattcttaattttctctgaggggctttcaagacttttacaatttaaggaaaagatgggatgacttaaagggttggttatttctcgtacagctccatctatttttcatatattttttgtatatgatagccttctttattgcaaagtagatgatcgatcttgtgggaaaatcaaatgtactttggatatttatcatcatgcatcgagtcaagaacttaactttgataaatcggttatgtctatttcaccaaacacctcacaagctgcagaatgatccttccaataaatctttgggattttgattagtcagtgccatgagaaataccttggattacctgcttattcagagagagataaaaagtaattattttttgatattaaagagcaaatatggaaactaatgcatgcttggaatgattagattttttctattggagggaaagaagttttgttgaaagcagttgttcagtctattctaacttgtgtcatgagttgctttaactgccatctactttctataaacaacttgtgcaaatgatggctaagttttggtgggattcggtcactaacaagaagaagactcattggacaaaaaatagaaatttctctgtaaaaccaaaatgaatggtggaatgggatttagatcttttatccacttcaaaccaagatttacttgctaaacaagcttagaaaattatctaatttcccaattctcttcttagtcgtattttgaaagggaggtatttttcatataatgatttcatggttgctaagagcagtggtatgtcttcattaacgtggtaaggaatttgttagggatgtgatcctttagtgcaaggaatgaggttgaaagtgggtgatggttctcaaattagtagtggttttgatccatggattacaagaaattttgtctgtactcctttgagatatactagctgtcctaataatataatttccacatatatcactgctagtaaagaatggaatcttcatctgctgcaacacgatttttctccaattgatattgattatatcctcacaattcctctttcactctttagtaccaatgataagtggatctagcactattgtaattcgggggagtattttgtttaatcggggtatcacattacgtgttcattagaagagcaagatctttctttgagttccacaaaccaagagtcttggtggaaattattttgggttctaaagctaccatttaaattgaagatatttgcttgaagggtgatccaaaatgcccttcccattgcagtttcgttgttacatagaaatattattgattcagctacttgtagtctttgtttgaatgcttcagaatcaattgggcatgctatgtttagttgtaaacatgctagatctgtttgggaaatagcgggctatgatcttgattatagggcagctagttagttgaaggatggcgattatcttgtctatttgtcttctgttaaatcaaaatctaatcttgaatagattctatgcactatgtggttcatttggaatgataagaacaacatcattcatcgtaaactcgcacaaaaattttctaaaattctgagcaaattccaagcttatctttgcactttgcagcaacgttctaccattcaaaagcctcttggtttgatctctactgttgttgccgggagagtgccatggcacccactacttgcaaacaagtttaaaatgaatgttgatgcttcttatgatgcctcaaagaacaaaattggtttgggtgttataattcgaaacttttttaggcaagttctggctgctctttctaagtctttgattggcaaatatcaacttcaagagatgaaagccaaagcattgtttcacggattagtttgggctaaacatcataatttcacattgaatctaattgaaattgattctatagtgttggctaactctatttattgtcaaacattaagcttttcttcattttaagacttcgtggttgatactaaaaatcatttatgctacgtcctttctatttgtgtatttcatgttcggcaagatactaattaagttggtttggctaaacaagctttagtgttgaataatgattgtacttgagttaggagaaattccctctgtcatttttcttttttataaataattttttttaatttataataattaatcttttcagaaaaaaaaaaaaaaaaaaagaaagaaagaattaatatagtgcattaatattaatatgatcaacacacaaggataagtagacggaagagaaaaggaacagaagaggataggaaattaggtatgaggatctgaatccctttgatcccaacatttcacaatctttctaaagaaaaatcatataatctctcttgaatgacgtgttttaacttttaaggtttcaattaattatgaacatagttatacctagaattagaagccaagcatataaccaaacaatcaccatcccaaatatgtattatttctcccaaaatttaacaaaaatagataaacaaaattaaattataagttaataatatgttcttgcattaaaatttttactcaattgtgtatcaatttttttctttctttccctttttttccaaatgaaaaaaatatatatattttctttaataagaatgggttaatcatatttattaaagaaaactaatgagttaactatataagcgtaacatcgacaaataacccttttattaaactcagccaaaatttaataagtatagattactagattacaatcaaattaacttgtttctttcttcaaaaaggaaaagataatttctttagaaagtttcacatgtattctaatgatgtatatacatacgtacgtgtacaccttaatactgaaaagagatctccacgtcatgattcacgaccgtgtcatctgtgacccccaactaatcaactaacaacacgtcaattctgtctaaaatttccatagacttggaaaaaaaacgaaaaatgaaaaagtaaacgaagccgtctactttgacacaagcgaatttttccaaagcggtgacacagagactgtatgaccagccggtgagaatatcacttcccacgtctctccaaatacccaggcataggactcgctctcggcgatctcagcggaagctcagtcgtctgcttaccgttactatcgtagtagataacgccggagaaatctaaaggctgacacttgtcacccatcaagatggaccgttgccaaacgccgccgtctccccagtcgtcctcgccgcggtgtcccgctccggtg

SEQ ID NO: 21139 - DNA, 8102 bp, Cannabis sativa
tagagaaaaattaaagttttacaaatattaggtacttatgccgctaaaaataaacatttggtttatgtcacttacaaacttaaaattttaaatacttatgccgctacttactcttattcatattatacttatacttcatatcttctctaataattatccgttaaatagttagttttaggacatagaattcaacaaaggtgtctcaagcgatgttaatcaaaccactaattcccatcaattcaaaactcttgtatccaagatgacttttcatacatttcactttgcttttggtctgctgaccttgtatatattgtttttgtatcaactcatttcattcagattgaattaaatgaaatgtttgatctctaatatatatagccacactctttctcggtgattttcctgaaaaagtcgtcgagaaagggaacatgaaggttttcaccatcaagaaaagtatattgcctacctatttcggcaacttagcttatattttgtcgtaaaaatagtcttatatataacagtatagtgaacaaaagattaaagaaagtacgaaatataaccactgaagaaagcacatatatgtgactgaataaatctgatatatatatatgtcgatcgattgctaaattataaatttataatacaatgtttttcatacaaaatccaacattaaccttcaaagtaattttatacaaatgaaataaccaaagaataaaagaatcctacacactaacaaattaaacaatacaaacagcaatacaaattgatcaaaacattctagctagttaataacaaacttgtatacagctaattaagagcctaactttgatttaggtgtggttgccgcaacagtactggatccttaagaacccgatggagagagctcaccgccggctggcatatcggccagagcagccatgaaacggcgaattgagacagagcgagctggtcggaagctatgtgacctcttcagatcactactcgaaaatacggtcgaagatttcgaaaggatcaaatataccaaagcttgaaccataaagaatattgctatctttatcaccatttccgatcctgaaaagctacttccaataatcgaatccatcatacaattaacagggagttgttcgaagatgttaaatatttctggcctgtcttttcaatttgttctttgttttctcttctttctcagatgagtaattgatataatgagcagccaaatgtatggaatggtttatataagggatggagattggagtgttgagatcaaaaattggggagcagaggaatttcgaggaataaacgttgagatagtctttggttgactcagtcgccatgcattgcacgaattattatttgagctatttaattgattaattcttaatgtgattataacacgtggtgacgtggattgttcttatttcttatccatttacaattaactattaaacacgtttgccaactttgttgggaaagggtaggtgggccccattggagttgctattactgtgcgcttggtcaaatgtagctgcttttcgctctatggcccacgatggcttagccgtcagtcaatgaaattataataatacttacttatagcttgcatctttggtagagaccaaatatattgacccaagcttttcgtttcagtgccttaattttttttcattaatggtatcactaagtttacaatcacaacaagccaaatgctcaatggtcattcagtgctgtagtttagattagaaaatgatctacagtattaattggataataatcttgtattaatgagaatttcttttgcattaccaattattttttcttttgcaaaataaacattttcaatagaaaaaagaaaaatacagttccatagaaagtaaatgaaaatactatattatttctctttattcttcttaagaaaaacaaattattttagcaacttaataattatttattctttataatattagaaattttataatgcattaaaaaaaaatcaaaacaaaccaaaacatatgatttgaaaataacttaatactcacgtatatatttatattttatttatacgaattagtatttaatggaggtccgggttttgtttttgtacatacagaccaattatttcatggtttggatggatatatgttgttgtattcaatccaagcaagcacactcgtcattaacttgtgttcgaggggtattagaaaagaaggaaaagaggagaggagagataacaaagtatatttctcgttgattcaactgaaaagatacaaagcaggggagcatatgtatattgctcaataaaggagtacaaaccagcaagaaggtaataacagaaagcaacttacaaactgataaactactacagcctaacaacctttctaactaacaactgaatcttatcacttcccctcaagatggagatgtaatactcattaatctcatcttgtctttcaagttgttaaactaattaggaaataaagccttggtaaaacaatcagcaagttgttcctttgatgatacatggctggtttttatgacacattgtcgaaccttttcttgaactagatgacaatttatttcgatgtgtttagtcctctcattgaaaacaggattagctgctatatgttgagcagctttgttatcacaatggaggatagccatgccatcatgttcagcttttagctccttaagaatagacaaaagccacgcaaatgcacaagttgtgttggccattgacctatattctgcttcagcagatgatcttgaaatggtttgttgtttcttacttttccaggagattagagaatctccaagaaatatacaaaaccctgttgtggattttggagtatctagacaagcagcccagtcagcatcactataagctttaagcttgacttctgatgttgtagggaagaggagcccctgtccagggaaagttttcacatattgcagcactctctcagctgcctttaggtgtctagctttaggaacaacaaggattggctcaatctattaacagataatgatatgtctggccttgtgattgtaaggtattagagtttacatattattcttttgtataactttgggtcagtaagcttgtcttccttttcatcttggctcaactttaagtttgcctccataggtgttgtgacaggtttgcaacctaaataacgaagatcttcaagaatttgcaaagcataaggcctttgcgatatgaaaatccctttggcagatctagcaatctccaatcctagaaagtatttgagatttcctaggtctttgagtctaaatatatcattcaactttatcttcaaggcttccaactcatctaaattgttgctggccaatataacattatcaacatagataagaagaatgataaaattggtcccaacatgtctcataaagagagaatgatcagttgcagaatagtggaaaccttcttccatcaaggcattagaaaatttttcaaaccattgtcttgaaacttgctttgaaccatacaaggacttcttgagtttacaaacagtatttggtggaatctcccccttaggactataccctggaggtaaagtcatatacacatcttcatgtaaatcaccatgaaaaaatgcattgttaacatcaagttggtgaaggtaccaaccattgatggcagcaagtgctaacacaatcttgactgtaactaactttgtcgcaggagcaaaagtatatgtgtagtctattccttcttgttggttgtatccctttgccacaagcctagccttaagcctttcaataacataacaaccatctggtaatgtcaccactgtccaagtattatttttctcaagagcatcaatttcacaatccatagccctatcccattcaggaattcctttaccttgactaaagaattcaggttcataataacttgatatagccaaaacagtagcacaaaaatgactcttcaacctactataatcaagaacttgagaaataggataaggtgtgacagctttattttcctgatgcaaaacagaaatattagcattagcaagataatagtgataatcttgtaaatatgagggtttatttatggttttaagtacaggtctgatatggagagtactagcatggaactgatcatggattttgttctgctgattaaaatcaacatcaggttcactgctggtttgaggaacaataacagcatcgggtatttgatgtttctgattaatagcagtatcaacttcatgatcataggtatcatgttcctgctgcatatcagcaataggtgcagaaacatggtcagaattatggacatgattgctgctatcataatcagcaacaccagtaggtaaaccagcagatgcaagattagagttagaaaaaaaatcataatattcctttgacaaagaattgttgttatgaaaaggaaaaatagtctcatggaattgaacatctctagaacaaaaaattttgtgggaattaagatctaataacttgtaagccttcatcccatgaggatatcccaaaaagacagaaggtgcaaccctaggagaaaaattggttcttgacacagataatgtggatgcataagcaagacatccaaaagcctttaaatgatcatagttgggagctttggatttcaaaacttcaaaaggagagacatttttcaagttgggtgtggctgttctgttaatcaaataggcaacaatagcaacacactcatcccaataggttataggcacataagactaaaataaaatagccctagcaacattcaacaagtgttgatgttttctctcaacaatagaattttgttggggtctatgaatgcaagagtcatagtgaataattccaagagaactaaacaaatttgtaaatcgtagttctttggcattatttgacgtaacacccttaatggttttgttgtattgggttttgatcaattgaatgaaatttggaatagcaatttgagtttctcccttggttttaatgaaatgcaccccaagtatatccagaatgatcatcaacaatggtaatgaaatatttgtgccccccaatagtaagagtattatatggtccccatatatcaacatgaatcaaatcaaaacattccttggcaatattgtgtttagaaataaagggtagttttctttgcataacataatgacaaatagagcaatgaaaatttgaacaaggaacattttgaaattgcaaacttttattcaatgaatgagttttaatacaagatgggtggccaagtctatagtgccgtatagtatcattggtaattcttgaatcagtaactaaaggaaaaatgaaaaggttggttttctatttagaaaattcagatagaagagtttgccaattctttcagccgtctcagtcaattgggtcctcaaagtgtcctgaataacacaatgattatgataacatgtgaatattcatgtaccagagtcaagaagtggagtaacagataataactttaattggaaatctggcacatataacacatctttaagagtaagagttggggacaaaattatagtaccaagacaagaaactttagttgaggacccattaggcaatttaatataagtaataaagtcattagaataagtatcttgaaatatttcaagattacaacatacatgatgagtgtcactggtatcaagaattcaagaaagatgagtattggaaagggttttaccataaaattgagaaataaagggatgagatgattgagatggattagactgttcagaaatcttttgacttagcatgctcatgagtttctaacattgagcaaaagtggccacaagatcatgctccacattttggatattaccagcaacagcatgctcctctccttgtgcaccaaatgaatttgctgaaggtccctttctaggcccaggagcatttcgattagggaactttgcatgtagtttatgccctggtggatacccatgaagtctgtagcacttggccataatgtgtcctacaactccacaatgatgacagatcatttttggtttgtggggttgtacactttcagcaaagtgtcctgaattggaggaggtagaaggctctgcaggcttgtcactttcagtgtttctagatacaattcccctttgtctttcctcttgaacaacaaaggcaaaagccttgtcgatgttgggaaaaggatcctgcattaaaatggttgatctagcattgctataggactcatttaatccaatcaagaattcaaaaaccctatcctcatcttgatattcttgaataaccttcatagcacaacaactacgaacaggttgtggtctaaattcctgaattagaccccaataagattcaatcgagtaaaatatgtagtgacagagttcgaaccttgatttaaagcttgcatagatctcttggcttcaaagacttttggagcattcttttggagttcagaccatatccttgttgcattatccaagtacatcacactatctgcaatctcacttggaacagcatgaagcatccaggatatgactaaactattgcatctgaaccaagcatcatactcctcatcatctgtgtctgtttcaggcaattgaccatcaaccatctttatcttgttcctagcagcaagggccaccatcattgatcttctctaagagctgtaattttcacatccggtcaatattgttggtacgaggctcgaaacagactgatctccatttgatacgtagtagggactgcgaggatcatcaataggagatcgattgtttggttcaagaacagagaacctattggaatcatcaacaacatttccttggcttcttgagctatgagtttgagctcctccacgagccataacaatggtagttaagaacagaaaagaacctaaaagaaggaagaaccacacagcaattgtgactctgataccatattacaaaagaaggaaagaaggagagaagagataaaaaagtatatttctcactgattcaactgaaaagatacaaagcagaggagcatatatatactgctcaataaaggagtacaaaccagcaagaaagtaataacagaaagcaacttacaaactaacaaacaactaacagcttaacaaactttctaactaacaactgaatcttaaggagggggaatgtaaatatattttttgacaataataattaatgtgtatttaattttaactaataatacgagtcgtgtctaacaagttcgtgtctaacaagtataaggtgatatattaatattattattaaatattattataattaatcagtataatttaatatcatgtcgtacatatttgaaattaataattattataaaaaattataatttagaaagaggactagactgtcaggacattctcaaattgaacatagctactctttagaaatatatttggactatggcattgaaaaaaaaaatttgggtcaagtgggtacataatatacaccaacttttttcaatacagagattatcttttttcgactttcactattttttccaataccatctactttgtatcaaaaggaagatttaaaaatttaattgacattcctatatttattcttgaggagtataccataaaaaatagttaccaattactttgtaacaattatatccgaacccaatggtatttatgagtgtaggagagactcaacctaccgaaacatagtgttataatatggatggttgttcttgaaaaattaaagactaaacaaagattgttgaaatttcagatgttggataacatgcttatcatgttatactcatgaagaaggtatgtatcatcttttctttgaatgttatcttagcaagagatgtttacaaaaggtgaaagagaagacgcgttggggagctaaaatagataagaactctgttgcgatgggtttctcgagctcatatgagtaagttctaagaattagtctatgccgcttctgtggcaacggtagtgtattatgtttggaaggtttaaaataaagcattttggctatctaaagtgagaaggatagctttaattgtgcataatagttgtagtgatgtaaaaaatagtgtgtgaggtgttatgccaaaatcagtgagtagcattgataaagtggttt

SEQ ID NO: 21140 - DNA, 1412 bp, Cannabis sativa
aataaaactcaatatttttttatctttttttgccaaatttttttattattattttctttgtaatcgatggaacaacttcagcccaaataatgtaaaaatgagagatttttttttaattaaatagaaaaattaagcataaaaattcaaaaaaaatttaatattactcattcatagataatacacattaaaagtacacccatatatattatattcataatacaaatacaaacaaacaacactaaaagaaagtagatttttatttcccttggttattcatagaatctgcatattgatgattttatatattgtgctcaactatagtcacaataatattaatcatcatagcttatttcaagggtaattatacatattaattttgtttaattattttattattaattaaggaaaaccctcgattaaggactttaaaccaaacatacgtgtaattttaatacgagtgaaaccagcttgatagaagatattttcgtaatcctttttagttctttctcttccggtgagagcagtcataaataacatgtcaaagtataacttagcttccaattctgcagcctcatcatttttggtatttatgacattattgtctattaccataatctttcctccaccattccttgaaatagcttctccacaattcttcaaaatcttcacacattcctcatcactacaacctgataaaacactctataaaaaaggaaaacaaaattatttaaattcttaaagataaaagaaacaatataacactttatttgtgtatacatataagagaaatgttaaaaaagtattaatgatgcctaacactttcttaagtatcatattaatatttagagtcggtcctagggataggcgggctaggcccctacttagagcccacactttttggaggcccaaaataaaaaaataaagagttttattaggcttttatttaattaaaattaaatgtattgtaaacaacaaatatttataatttggttggttgaggttatgggttcagatctcataacacttattttttttttatatattttttaaggccccaaaatttaatttgcgttaagcccatatattctcagggtcggccctatcaatattgtacagttaagtatcagctccaatgtatacgacaataagttttagagaatatcgtcaatcaatcgtagaacgccacctctaggtagtgttaaacaccacatgtgccaaataacaatgctctacatataatacagggaaatttataaattatacaaatacttaaaatcacactattttttttttataaatttatagatttgtaattttttagaagaaaaacaactttattgtcatgttatcacaatattatactagatttcacaatatgtaaaacaacactctatttaaaaaaaaaaaaaaaa

SEQ ID NO: 21141 - DNA, 2779 bp, Cannabis sativa
atacaatacgacctaatacggcttaccaaacccataatatatatatatatgtgtgagagttgagtgattaatgtaaattgaagctaagaattaattaaattgaatatataatggtataattaattcctagaaccttactaatcaccaagaaccgtcatgcatgactccaacattattagtacttcatttattattactatcaataaattaatggtatttatatatgaaaacattaacatctcaactctcacttacattttaaatctatatgtttgtataaatatatataaattaatatatatagatatatattgctcccactaatgttggcccttgatagacttcatttactaatttaactcacaaattatctttttgtgtggtgattgccctaacatgctttccaattgcactaaaatttcaaagagcaatgcctttaaaccccaaatcactatttcttcttgttttcaagtatctctccaagagacattaaaaggattgttacaagaatcaaccccctttcacaaataaactcagcacacctagataattttttgaatcacaacttttagcaaaataattatttaggaccaataagaaattatagataactttctagaactccaaaattcagattcggctagtcatctttttaacaagattctcacaattatttttagagattcttttagcacaaatttttatcccaatatacttgaaagtaagggtactcttttggaaaccagacataattctatcaagagtaatagagtctatacatgctccataaatcgctgacttctcatggttaggtttgagaccagaagagtcagaaaacaacttgaagcctcttaataaaaaagtggctaacttgatatctcctttacagaaaagtaataagtcatctgcaaaacaaagatgtgtgaagctcaaactttggcatctcgggtgataattgaaattcgatagcttcccaattctagtcataattctggagaaatattccataccaataaaaaaaggagaggaggcattaggtcacattgtctaagctccctttgagattgcaagtaaccatgtaaggttctattaatcataaaagagagtcgaggatagtcacacaaatcatgataagatccacaaatttttgaggaaattttaaggcatctagcatttctctgagaatttccaaattaaaagtatcaagcgccttttatatatctattttaaacatataagcagacttagcagccttcccgtcatactctcttatcatatcctgacaaatcatgatattgtgaacaatttgtttgcgtttagcaaaaccactttgattctttgagatgagagttggcgaaatttctttgagtctattggatatcattttagtagaaattttattactccaagtgaaaaaactaccattaaacttaacatcctctaaaccacaaattttaacacagttttgaaaaggtaccatctctctagagtttcctttataattcagcctctcctccattgataaaactgagttaaaatcaccacaactatccaaagatctttcttaatcactaccatattatttagatcattttaaagtcgctgtcacgacccttgctgtcattaaaagtatacacaacagtgatagtaaaactgttctttctttttgggttcacataataatgaatctattgactcgtaccccctatgttcacataaaaactaataggattctaagcaaccaagattcttctattcggatgatgaaaaatgttagaagcaaaacgccaaccttgaaacatattaaggtataaagctatcaatttagaggctttaacctttgtttcgagaagaccaacaaaacaaatattcttgtgatggatcattcaaatgccctcttattgtttattaatttttttatccctcgaacattccaaaagaagagtttatctctttattggtggagggcctccccctccatcaataatggacttcatgttacataacaccttcccaacttatacctctttcactgttatctcctataaagcttcaaacatacattgcttgtttccactttaggaggagcttcaatatgaatttttttcactttaattgcttggaaaccttgttcatctactttcgtattatccctatttgcattagtgactggggctttaggatgtcaattttttttctatttttctatcttttctttttttctgcaagcctcctttgcgtgtccaattcctttgctagtttcacatgtatctggtttctactcataaaaaacatcaatgtacaccaacttttctttttcattctcaaagcttagattattatgaaggcctttggagatgtccatttcaatcaagactcgagcgaattggagcctatctagattcatagttgcttgatcttgctttagcatttttccaatcgtattgactatttttaccatagcccgttctccctaatatttcaattcaagttgtctcaattgaatccataaaggaactttccatacttcctctctagtgaactttgaatcggggtctcaagccttcagaaatcaaaggttttctatcaaaaaattaatatcctccattcagaaatgaatctagcctcaactgagtgaaatcgaaccagaaaaaatccaatgagtcagcaaattcactcggtctatcctttgttatggccaaacacgtctaaagaaactctccatttgaaagagaagcgactaattcttttaacaagaaaaccaataacagaaagctga

SEQ ID NO: 21142 - DNA, 3093 bp, Cannabis sativa
gagattattcttgaataaaatatcttaaatatagattctactatattagttagcgttgtgtgtcataaacatgaccccactcaacttttaataaattaattttttgtaattatttttttaatatattttcatatttggctccacaaaatattttttttcattttttgccatatttttatttttgtctttgtaaaattataattttcatttttattttacatatttacatatttattctataaaaatatttatttttattctcatatatttatttatatcttcaaaagatttatatttttctattctataagaatatatatattttattaaaaaattattttcctagaacaaagttcttttttatccccttaacattcattgttgcctccgccactgaattgaaaaactattaattgtggtaattgcattacataggatgataaaaaaaatatgatttgtatcccacatagctagaaagtgaaagtgtgttaaaatattaaattatttaaaaatatgattaattttagcaattttttaagaatgtataaatctatttgttaaagttgctgtgttatagtccaataaactaatgtaacctaatatattccggctaccaagatattcatattgtgaaggtgattatattttcatataaaaataaattttaacgttaataaattatttaatacctcatccatcttgtactaaaatcccatccagattcagcagctgaagctacttcacaataaaattgttgctttgcataagggttagagatcatcaaagcattttctctgtcctgaaaaagattgtagtttataaatactagtttaataaaataataaaacacataatcttatgaatacgttaattattacacacaatagttgaagactcgggtctgggtttgttccacatagcataatatcgacttaaagtttgatcacaagtttcatcaacttgaattctcactccatgtataccttcaacaacaaattattgaaaaaaatttgataagatcaaatatattttttagatagaaaattaaaaatcaaataattttaacaataaaagtatgttgtaagccaaaataccagaattccaaaatttatattctttgattagagaagggagagatttttgagccaattctagatctttagtcttcttgtatatttcacaaaccatggcactaaggagtggaggttggctgcaaaagacaaaatttaatatttatatatattaaaagagcggtaaatattactaagaagtatcatacatgatataattaaatattaggtccaacatattttaatttaataattattatgaaaaattgacaatcattcatgagaagataccttatggtagttttgagcatcactaatacctaataacaatgctcttataaattacagacgaaattcatccaactaatcacatttatttcaaatgaaaactcttattttaaacttgtgtaaaatatttttatgtgcttgtatcattactctcttttttccgaagcctttctacggaggagcccttgagatctttctaactacgagcactcaacataagcattgtctatatctaaggctgaccctcgatttagactataaaaagagaagaaaatgtactaagaaagatatggctttttctcacatacctcctatttgtgtaataggctcttgcaccattgagtacatatccatgttcttctatgaggaaaatgaggttattcacaattgcttttgctgtttcatacattttacttgctagtaatcccctgccaagcaacaaaaaataattacaattaaaaaaaaaaagaatttatattagatatagaaaataacactctaattcttagctatttaattatgaaacatcaaacaaaattaagaaacttaagtgtcgtttgattgagagaaatgaaaacatatgaatagtactaggaatgaaaataaaaatatgaatggaatcaaacttaaaatacattaaaaaaaattgataaaaaattattaaaaattttatcattttaaaatggaattgtcattctatccatttcaaaataaaatggtcactccaccaaaataataaataagtctttccattagaatgacatttcaatattttaaaatacaaccaaaaataaaataaaaattagtttctttctgaccctccatttaagtgataagaataaacaaattcaagattaagtacatgtaaaataattactagtgaagaagtattactgtcaacttcctattacaatcttttaatcaattttcgtgcttgaaaatatactagaattttttttcatggcaatattcgttaaaatgatatacaacatcctctgtaaatttttgatatttttttttgaatagtttaccatgttattgttaaatatttaaaaatttataaaaaatacaaaaaaaaatcaaacatataatttcgagtaaaaaaattgattaaaatgttgtaattaatactcctagttactagaattagcaaaagaaaacttctataaatagaagaagtaacacaaagtcataaactcatttacactcatcaaaattacaaaaatacaaattatgctttttttttttttttttttggaaaagtacaaattatgctttcttaatgtaccataagaatattatttatttattttgaaaatgaatattatttattttaaaggacatttttcggcacttactttttttaaataaaaaatccaaaactaaacacctaaaactcgcaaaacatgaccattattcaaaaacaaaaacttgtttttttatataaacttttaatgcatgggacctaacaaattacacaattaccaaaaaaaacatcaactgtttgttggaaaatataataaaaatttcattaattcattccattatattaagccggaaaattaaataaagggttatttttggtaaaaaatatttaaaaatactataaaaataattaaaaaaaactatataaaaataataagaaaacaatcaaaagaccatataaaagtaataaaaaaaaacaattaaaaaatcatataaaaataataataaaacaacataaacaactaacaaa

SEQ ID NO: 21143 - DNA, 3531 bp, Cannabis sativa
aattgtattttggaatatgtttgtccaatcacacaaacataaaaaatgtatcaaatataggtatgaactaaattcccatctcactatatgaagcatttatactcatttaaaaagaaaagttaggacacagtcacctgggccgggcccgtgggccacaagcccagttcaattcccgtaacaaaatcatccaaaataagaaagttcccaccgccacacgtacaccctcgaattttggaatcgacaactttcgaacaaaggcacaccaaaacctgctagcgtgacgcgccatcaacaacatttgtcttcattccagtggcgcgtgcttcacatttcccccatatgcgcgttaaatcaactattacacttctcagttttaaattatctccaaatcccaacaatactggtaatcaccttataacacgtggcaaaatataataggaggaaatcagtcaaagtcagcataaatatctacgctgggccacacgtgataacccatgctctctctttctcttcctcccgcgtaaggacaagagaatatagccgtgactgtccgtgcaaaggctaatactacttcaagttcaaccatggctcagcttcgattagggttttagggttttatgctccgtattcaaatatattcgggtcgggtcttacagtatccgattcagggagcggtagcgagagatgaagcgcaggagcgagctcaatccctcggctaagcaagtgaagtatttcttgattgctttgattgcgtgcttgggattggtgtgtttatactacggttcgtcttttgctccgggatctcggaggtccgacgaagaatcctccgcttccgatggaactgacccggtttatgggggattcgctcggaatcgggatttcgatgagttgcatgaagatcaagagcataatcctgaaattcccaaaagtataccggttggtgacgcattgccttagctattatgtatttaatttcatacgttgatttcggttgaagtataattaagctaaacgattaacgaatgcgtgttcttattaatgttaatgaaatgagtaatttgatttttggtgccttttgaaattttaattattgtatgtttatgaagattttgcttgtttgcgtatgttctttcactaaactggtggcattggattttggtaatttacagatatgtgatatgaagttttcggaattgataccttgtttagacagaaaccttatataccagttgaaattgaagcccaatttggctttaatggagcactatgaacggcattgtccgcctccggaacgtcgttataattgcttaataccacccccactgggttataaggttggtagcagttactgcttacctgaaagtttattgtagtttggcttttcatttagttttgattctgacaaaattaatgctagaacttcagatacctataaggtggccagcaagtagagatgaagtgtggaaggcaaacatcccccacacacatcttgcacaggagaagtcagatcagaattggatggttgtcaatggagacaagattaattttccgggtggggggactcatttccacaatggagctgataaatacattgtctctcttgctagagtatgattctctttatttccttgtctacttttctttttggaaaaatttaatggaaaagattaataatgatcatatgagtaaacagttgaatatgaccttttatttgtcagtgtaaatgtttctttccctactgtttttttattcccacctgtctgagaaacagttcatcatatcatgccattactagtttattatttctaaaatcgttattttttttattggtttagatgctaaaatttcctgatgataaactcaacaatgccggaaatatcagaaatgtttttgatgtgggttgtggagttgcaagttttggggcctatttactttctcacaacatcatagctatgtccctagcgcctaatgatgtgcatgagaatcaaattcagtttgcactagagagggggattcctgctactctaggtatcttggctacaaaaaggcttccgtatccaagcaggtcatttgaactggctcattgttcccgatgccgtattgattggctgcaaagagggggaatccttttattagaacttgataggttactaagaccaggaggatattttgtgtattcttctcctgaagcatacgcaatggatcctgaaaatagaaggatttggaatgcaatgtatgatcttttgaagaaaatgtgttggagagttgttacaaagaaagagcagagtgttatatgggctaagccactttcaaatagttgttattcgaagagagatcctggaacatatcccccattatgtggtacggatgatgatccagatgtaacctggaatgtgagcatgaagccttgtatttctcgatactcctcaagtaagtattattcttacttatcatgcatttttttttagaattttttgttaattccttaaaagagaaatattgctctgaagctattccttttgaagtatgcatttataatttttgatgagatactataaagcaaggttatgagcgtgttgctatccttattatatttgggaaggctaattagtattgctggtctctcttcgtttgttatagtatttaatgctgctaggtctgtcgttctaaacttttctgctgttttcactataaattagaaatgcacaaggtaaaagggagtggattagttccttggcctcaaaggcttactgcagcacctcctcgcctggaagagttaggtgtcagtcctgaagaattctcagaagacactgtacggtttttaatctgcacaattatccaactatgatggtaaagttacaatctttatatttttgtttctaactgcttaagaacttttttggtgcagagcatatggcattttcgagtcgttgagtactggaagcaaatgaaatcagtgatgcagaggaactccatcagaaatgttatggatatgaactcaaaccttggtgggtttgctgctggcttaagtgatagagatgtctgggtgatgaatgttgcccctgtccattcgtctacaaggttgaagattatatatgaccgaggattaattggaactgtacatgactggtatgcattttatttacaccaagtgatgtaagaatcaagtctaaacttgctaacacatttaggctatgttctattcacatctttgaactacgaaaataacttgctatagctattcctttgtacatcctttcttttattctaaacttgatgggttactcagatagtcacacccctttggttttttcatagatagtgttacattcattatgaagaccagtacccaaaaaagaatgttagccatgtgcaaaaaatagagtgatcttaggcaataaactacccatccactaatattagttaagttagtttgagcttcaatttttcctccaagttgaaattagtcaatttttcctatttctgagatttgattgtgcttcaacacataacaggtgtgaatcattttcg

SEQ ID NO: 21144 - DNA, 3659 bp, Cannabis sativa
tgttaatgcttggcgtttaacaggttcgtatggtgagcctaatagattatttcggtacaagacttggaatcatttaaggtcactctcgactgaacacacattgccttggtgtgttattagtgacttaaacaatactttgtctcattcggataaaagagggggcaacctgtactcgcaggctcttatagatggttttcaggaagctctaaatgactgctatctccatgatatggacttgtcgggttatccttacacttgggagagaggcaggggcactgatagttgggttgaagtgccggttgatagggtgcttgttaacatggaatggtctcgaatgttcacttaaactcagtttctcaaccttgaagtctcaatgtctaaccattgtcctcttcttcttcaaactatagtgatgaattttactcagcccatacgtcattttcggtttgagaatgcatggcttagagagccaatgtgtctccaagtggtaaaggatagttgagagttatgtgagaacaattctgtggtggagaaaatttcagtatgtggggataaactttcagcttgggggaaagattacactggggactttgaggctcggattactgattgcaaaaagaagatccgactgctgaaaaaagccaatgacagcgactctttggttcggtacaaaaaggctcaggaggaactcaatgagattttcagtcaaaaagaagtgttttggcgccaacgttccaagcagttgtggctagaggcaggagaccaaaatagtaaattttttcacgccaaagctacttctagacggaaaaataatacgattcataagttaaaagatgcttttgggagttgggtggactgggatactggacttcaattggtaataattgattattttactaatctcttctccactagtggttctatggttaatgaattaatggatgatgtagtgcctctaatttctcctcagcaaatttttgacttaacccaaggtgttactgaagaggaagttcgcaaagctcttttccaaatgcacccagacaagtctcccggaccagatggtatgacaccaggattttttcaaaaatactggagtgtggtgggaaaggatgtagttactcaggttcaagactttcttcatacgggtatgattcctaatgatttgtgcaaaaaaaaatattgttttaatccccaagaagaagaatcctacaaccatgggtgatctgcgacccatatccctttgcaatgttctcttcaagattattaccaaagttcttgctaaccgtctgaaactcattcttcctcaggttatattcgacactcaaagtgcatttgtgctaggaagactgatttctgacaacatcatggttgcttttgaggttatgcattgtctaaaacgtaaaagaaagtggaaagaaggctacatggcggtgaagttggatcttagtaaagcttatgatagaattgagtgggagtttcttcgaatgatgatgctaaagctagggtttgaagaccgttttgtcaatttggtgctgaccacggtcacatctgttcagtatatggttgttaatagtgtcgtgagatgggtcctattacccctgcacgtggtcttcgtcaaggagaccctttgtctccatacctgtttcttttgtgtgctgagggtctcacatcattgattaaaaggtttaaaagacaaggtgagttacatggtttcaaagtggctaacggagcgcctatcatttctcatatgctatttgtagacgatagctatctctattgtcgtgcaaatgatagagaagcaggtagtgtgttacggttgcttgatgtttttgagatggcttcggttcaggaagtaaactatgataagtcatctatctttttcagctcaaatacacctgctgcaactaggatcagactatgtgggatgatgggaatgatggaggctgatggagattctagttacttgggacttccaagtaccatgggcagaaataaagatgttattctgggtttcttaaaagagaaaatgcaacagagaattcaacgatgggaggggcgtttcttatcaaaggcaggcaaagaaatacttttaaaaactgtggctaaggccgttccaagctacgctatgtctgttttcttgttacctttaaaaacttgcagccaactggagcaaatgatggctaaatattggtggcattcgaactcaaagaagactcgaggtgttagttgggtcagctggtcacggttgtgcaggcataagagtactagaggtttgggattccggagccttcgagattataatttgtcacttttgggtaagcaaccttggcgtttgctgcagtaggaaaattcccttgttggtcgccttttcaaagctagatattatccaagaggatcctttctaaatgcttcactaggcaataacccgagttatatatggagaagcttgcatgagactcaatctttgatcaaagatggtgcccgaatccgaattggtaatggacaaagtaccagtattttagggactccttggctgcccattgactctaatcctcttataatatctactcatcctggtttgaatacttattcagttcaaaacttgatgaaaatgaatgaaagagcgtgggatgaagagctcattcgggatatgtttgaagaaagggatcaagagattattctaagcattcctttgagttcgtcaattactgaagacacttggtattggaataaaaacactgctggtttttatacagtaaaaagtgcttatcagtatatccaagagatgaaaggggcatggaatttagatatggaggataaggtgtggaagacgttgtggaagattaaagtcccacctaaagttctacatttgatatggaaggctttaaccaattgtcttcctacccgtacccaactctattcgaagcacgtaccctgtccaattaacatgcccattttgccatacggaggaagagtcgattacacatgtgttgctgcaatgtcacttcagcaagtcctgctggaactggtctagtttggccactccccctgcccacagcgacaacttttttctctggtttaagggtgttgttgacgagaatgcaccagacttgttggaggaaggtgtgatgctttgttggtcaatatggcaagctcgaaatggtgtaatctggaaccagaaactttgttctgcagctgatgtgatgttcactgctcgtttaactttagcacaatggaaaaacgctaactcaagaaaatttgagccactgctagtgccttcgggaacttatgacagtggggagcgttgggtaaaacctgctgcaaatatgctaaagataaacgtcgatggggccgtctttcatgctgataatgcatatggttcgggtgtggtaatcagggaaaatactgggtctctaattgaagctttttctgtgtataaccatggctgtaatcaacctgaaattgcagaaatggtaggcataaaagaagcgttaagttggataaagacgaaagaagatcaagtgtttcaaggtgtcattgtggaaacagattgtcttgttgctctacaagctttgcacacttcaataaggatgccttctttatttggtttattggtttctaaatgtcatgagattctatctaatttacaaaatgttgag

SEQ ID NO: 21145 - DNA, 2976 bp, Cannabis sativa
ctcatgtgtaccagtgttccctatccaagtgttttgttttttggaggactatacaaatgcatgatatgttgtttatatgcgaaaggaaattgttttgatataattataaccattccaaatggttactcatattaatgtatttgatgggaggtgaaagcacacgtactaacttttcactttttgcttgtgttttttatactcatttttccagtatgtatatttctaatgtgtattgatcatcttttgattgtacaattacacctatactttttcaggtggaagggatattgctacgagcagcagatgaattggaggctctacaagaagaacgcaaggtattttataagtactttcatttcctaccttttgttgtaccccataaattgatggctaattaggattctttttcgaactttaacatgtgccaaatcatgctctctaaactattgagaattgagatagttagatttaagaatttttatctggatcaatagaaatgtgaaaagttcaggtggcatgatttggtatatgtcaaagttctggggacaataatcctaattagcttaaattgattttcagcatcttatgtggtgttgtatgaaatttgcagaaagtgaatcctcaaactgccgaagctatagatcaattcttggtaaagttaagagcctgtgcaactggagcgtcacccttcacttttattctagatgatcctgctggcaacagcttcatagagaacccgtaagtatggaaataacataacataacagagacatgattttatattatgattcgtgaacatcatatggagaacataagccgtattggatggatgattggttgaactaatgttgctgatcttgtgaattgaactcttccattgggtagtagcatcatcctttctagaccttagtagataatatgcagatttgaaaggaaaaattccagagctgtcattcagccaaattccctcatctttcatattgttatcgatactttgctccagtgaagccagcaactctatcattcagattttttatgaaagaaacaatgttctaaatctaatagatggtacttgccagcttaagctctgggtcaatgtcatttcgtgggtccttatttatttatttttaaacaatttgcaaaacatatttttcaataataggaagctatgtgaaaaagtaataggaagaacacctaagcatcatagattatgctttcgtttcaaaactgtgttttataagattgtgcgttatattatgtaggtatgcaccatcacatgatccagcattgagtatcaagttttatgaacgcactccagagcaacagacattattagggtatcttgttgacccatcacaaacagtagataatattgacggagcatcaacagaagaacaaaatggtggttctactcaagtacaaagagaaccacatggatcagttggagcagcagctggtcatcgagccattgctcaaagcaacagtgcagaaatggctgaagctctgtttcggtatactgcaccagaagaggtggagctcattaattttgtaattagaatgtcgacattttaggtatgattaatatattatatattgattcagtaactgccattatttaacaggtaatgactttcccatcgacatgtggaacatgtgctgcaagttgtgagactcgaatgtttgtcaccagtatccttttatctattattaccagccttgagagattttaataattttctgcttacagccttcaaacttgcatgttttgccgtttttaattaattagttagtcaagtagttcatgatgattgttttttctttactcccttttatagaacaatttaaaatgtcttgtaagatgctttgacacatttcatttctgaagatgaaagtttttctttcttgaaactaggatcctcgcctaacatatagcctatagttgtttattaagattcagttcattgtactgggcatgaggaccccctccgttgtattctcccgttattaatatttttgtgtctattgaaaatacccaccccacccaaaaaaaaggccctgaaaatatattcaattgtgtttttgattgtgctaagatgtttagcttaacaacttaaagatattccgtacttcaaagaagtcattgtcatggcatccacatgtgatgcatgtggttaccgcaattctgaggttagtataattcattttccgttgcttgtacgggtgatctctgattatgcctttctctacatcttttagttttaatttcaaagtgttttttcttcccaactattgtgctctgtctttatgcagctcaaacctggtggaagaattcctgaaaaaggaaagaaaataagtctcagagtgactaatgttaaagatctgagccgtgatgtcataaaggtaagctatgttatacatttaatttttatctctgatttgcgtttgatgtatattcatcttattcaattttggcacatttcatacttgtagaaaatggtgaattaatcagatattattctatagaatatataatatttatatacaaacctagagagactaaataggaaactaagtaattacaattaatcataatctctacaactaatgtacaactcatatattttaacacttcccctcaagctggaacataaatattaatcgtgtccagcttgttacaaagataatcaacccgcaccacatttaaagcttttgtgacaatgtgcccttaattgtttttcagtcttcacatatcctgtaaacatttctcgtgaacaaaatgacaatcaatctagttctcaatagaacataatatttgaatattttcatttatttttctctgccttattcgttattcatacttcaagttggaatttcataataactatactgcaagctcagacttgttactgaaattttcttttagtgtaagtaatgttaaacgtcttgatagtgttgtggcaatgatgaaaatgttac

SEQ ID NO: 21146 - DNA, 2290 bp, Cannabis sativa
tgcatcttttatatttgtttgttatctatctcaccgtcactgttggattgcaatgtatggaatccattttcagacaaatgatttttcttgtccagctttctccttccaataatagaaattttctcctctttgagttctttaattacaggttcatcaatgatttcacctcctccattgtcccccactagtgttgagaaagattggtcagagttgtgcccaaatatgccattagcctcctctatattcaagctaaaacgagagctacctgattcagttcttccaatcaatggcaatggttgtgttttagcctcttgctgctgatcaccaccaacctcatcttggtagccatcgaattcttcttccttaaagcatccatatttttctctataagcctccaattcagcctctaaagccttgagttcatcctctctctttaaaagcaaatcgtttgtatcttgtagagcttcttggtcatactcaaactgctcctccatcattctttggtactgtaaagcctccatctgcacagctgccttctctgcttgtaaccgagttatcattgccatcgcgttgttagctgccacggctgaagcgcttctttcttcgtccagttccatgtataatgcaataagcgattttctgtccaaccgaacttgtctcttcaaaccatgcaacaccgaatcgatatcaacgtcgtttggagtttgagcaatcacttccatgggctcagaagccaactctgttttctccagtggtgatttccttgaaatcctcacaccataccttggactgtttgaagctgaatctgtaagtgggattccaaaaaacctgtttcctcttacaaaatttggggtcttgttgacatcatcatttaaatcatcagcctctgttagtaatggcaccatagcagctttgacatcttcccttactagtacacaaaatccattattatagtatacacacatgaaatagaaggttaggaaacaaatcatgtttttactcacattgagaatcagaagtaaccggctgggatccgttatcttcttccagaaactcggaatcccccataagtttaagttctcttggtctttgtatggatgaaaatgtagctcgtggagaaggagctggagcctgagaaaatgtactaacatgtcttcctttaggatgggagattgatttcgtcttcgtcttcgtctttaagaattccccacaacaagaacacctgataatgtcactcttctcaatctgaaaagcctcatccttggcccttggggcaggcagactaagatgaatgtggtggcgatcatcttctacaaggcattcaagatccttgtgaagaattccaactagggacttgtaggtaccacaatcagattccttctcagtggcgaaagaaaggagacaagcttcacacattttcctaatgtcagatagtttcttgtgattgtggcagtaggctagggaggagacatccttcttgtgagcctcacagaccgattcgttgtagtagaaatcatggtttcggtgcacaagaacgtggtcgattcgggtgcagaacaagcaggggatttgaagttcaaagaacttggcgaattcgttggtgatgaaggcaaggaatccatcaataaaaagaagaatgatcaaaaaccattctagaatggcatagaccatgaaatgagggaactttccaagctcttgttcaacaaaacaattgaatgaacgctttgccattcttaagaaaagataatacgggattggtatagtttttcaagagtaagaagaagaggtgttattgtgaagattggatttggactaagctggtgagatagaagatcatgaccgtgggttggagggtggcaaaccagacctagatcatgacctttttctctctctctctctgttgttgttgttgttgaaggaagaaggagaaagaggaagggaaagaaagactttgtgttgaaaatcattggggttttttcaaaaatttgagtggtgaaattcatctttctattcatagaaaatttgacgttcataacctgaaaggctatcaagtgtgcatgtacctaaaaaaggggtcaaccgtgtactttccaacagactagattgaggagaaaaatcgtttttttccttttaatcttatttattcctagtcaaaaccataacaattctttttttcttttgacaatcttttactataagacaagggaaatttgattttctatgcttagaaaatcaaaaaatttgatttttaaaccaataattaaaaccctaaaaaaactatacttttttt

SEQ ID NO: 21147 - DNA, 2319 bp, Cannabis sativa
tattattattattacaaaaggaatttcattaaaattcgaaatagctcgattagcacgggggagaaacacaaaaaaaataaatattataataaaataactaaataaaaacaataaataaatgagaagaattattataataaaataaacaaaatagcataaatataaataaaaaaaaaaattgttcatttattatttttcttaaggaaaagtaaatttttctcaaggatagttcttacattttttactaggtgaactttatttaaattttacatcacccatattcattttcattgaagatgctataatatgtcaacaactatgaaccaaataccatatttgtgatctcacatttgggtgtttggaaaaaaaatggtaatttcagcacaattcacaattgtataatgcattataacattatattttatatcattatatgcatgaatttgaatataaggaaaatggtatccacaggcaacgagcagtataatatataatataaataaattgacaaaattaatattcctactaattcaaatttactaaattgcaacgaccattggggtttgataccaattcctaactccttagagccaatttaatcaatacaaccaaggtctttgaagacacaaaaaaagtaaagaagctatctgaaagctgatcttaatcagaacaaacacaaacatctgaagtgcatctgccatataaaaaatccatgacaagatcgagctacaaaacatataccacttcgaaaagtcatcctctcgattccaatgctagaagtatcttctttcttgggccctgttgtacaaaaaaggagtgtgttatggctaaagaaacacagtaaatgtaagacaggagcattgtaaacattggaagtgtatatatttcgggttgtttttaatctattttggttagggtaaaaagatcaccacttaaaagcctgagtagaaaatcattgcacattcaaattgggaaaagggaacaccaaacaaagataagtccatcagaatatgataataaggtttgatcgggagtaactaagggtacgtttgatcaggagtaatgaaatgaaaattttaatttcgttcatttgttcggttgcattttaaaactttggaatatcatgactattccaagttctttgattgctcaggacataatacatattatatgacctttcaactcacacaggaaataaccaaaagccagcataagccaaaggaatgttaacatagtaactttcttctaactaacataaatgtaaaaaaaaatgaagaaggcatattagagctggaagctttaccattggtattcctatggcctttaggtcttcatcagtcatgtgtgtaagagctgccatatcaacctacacaaacaacacaacttaaacgataaacaaaatgaattgtcatcaaaattgggatgtaaatgaaagattgttctaaggtaaacgtacttcctctgcttgaaatgtaatggaatatttctcaagacctaaggagtgcagaaagtcatccactgatgtacttgcctggaccaacaatgagtaatcaatcagaaagtttaaatacagtaatacagtgtttttggatcattacttcaatcatttagtgttttttttttgtttcataagagttctttattatcaacaaatggtcaaaaaataattcattcatgccttttgcggggccttcttcttagcagctgaattggcaacctttctattctccggtgcaacagcaatagcaacacttctcctggttggcttggcggcctccagtgaaggcttatgtggatcgtagtttacaggctgtggatgcatactaccagaaagcttttcacgaagatctctcacgcctgaatgagaccctcttccacttacagatgcttgttgatttttcctttggagcttcaaacgaagatctcgagaatcaatttggcgatcttcataagccattaacacatagtcaaactcaaaacaacataagatacatactgaaaaccaacaatagacattaattagttttcagttgcattgcatgtgatattattttaatccatacttgaaacttgagcttcattatcctcataaagatcatgttcccatttgtcatcttgcctttgtctgcaaaagggaataacaactactcagtcataattgtgcttccaaacctcaaaatacctaaaaaaaagctaaagattaacgattgagaaatttttccactgaaaacccattacccaatagccaagagtacaaaataaaattagtacttcctcaaaatatcaaatgcaaataaacaaagcatttcaagggaaatt

SEQ ID NO: 21148 - DNA, 2881 bp, Cannabis sativa
  modified_base (54)..(58): a, c, t, g, unknown or other
ttcatcgtattagagatattcatatttatgatgttaattcaacatacttgttannnnntctagatcctggtaaaattattcccaacagaagctccgcagcaaaaggtgcaaattctcttcccaccttgggcaccacttgcttgccaagagcttatatgtcaattaatggtcctcctagggcagaggtttggattccctcaaacatctctaacctcttcacgaaagaaagggtgttaactctcttttagagcactattcgttccttctcgtggcgttgcctcaaggtgtgctctgcctcacctaattttttcaagatctcatggttaagaacggtgggtttcaaagacaatttaaagttcaacggaggaatcttgggcaaagcaatgactatctgctgcccttttggctaagtggaagtggattgctttccttttatgggctagatggcccgtgtttgagatggaggactggtttagggtggattagggtgtgattgatttggcggttgcaattgttgttgttgttgcagttttattgttgttgttgttgttgttgatctgattgtgtatggagttgtgttgatgatgatgatggtggcagtgaaatttttgggtcaggaggcggagtagtagatccatggagatctccatcctcttttggggaatgttgcctaaccatagtagacttggctttcttagcatcccttccagtttggggaagcggagtttggctcttgggtgtcctggaaacacccttcttgggaaagactggcccgtctaggttctcattcgagataatagtgttctctggattctgctgagcagccccctccataactaccacaagtgaagcctctaccgaggctagttgtctaggatggcctactcgagctacgctaatctcggacgccactagttcctgggaggcctccccaagtgcgacaagagttttctttgtcccaatgggagcctaggaacctggagccctcgtaggtgcctttggaagaggggatatttcctaaacccctgaagaagaagatgttgacagaggccttggtttatgggtgttgtgggccatggctttatttttcccctttttttggtgcccttcgtcttggcaagtctcacagtaattttgtcactcaaagacctcaacatctttgcttttggagtatctgcaaacaaaacaattggatggttagcaagcaattttcaaaataacaaagacaaaagtccagtcagcatacaacaacatattttaaaaagtgtgggtgtgggtgcaaccattcagtaagcagttatatggttccccacgagcaaagaagatcatgtcttcaagactaatgaagcttccatgctctctaaaattgggaaaagatatggttgcaaaaggctccactctaatagtatttgggacaattctggattactaggactcctaacgatttctctaccttgtctatgaagtctttcatgggggtacttaagatggtctaaatctaagaagtaattatcgaatcccccttggtccatccaggacatgagatggaggctgggggtacgaaatactcggaagggtctgttacctcttccagaaatgatggctcttagggcaccttcgtctgggtacgctgtagcatatctttccaggatcttctcctcctctgtcaagggatacgaatggcagagtatccaattaacttccaaaaactcatcttctttggtggcctctatgattattgtggataaatcatgagctatcacctccttgacctcttttgaagcctagttttggcccctgccactaacattgtcgatgctttggaagccagcaattagcctgtgttcacaaagtaactttgcgatagccaagcccttaactttcaactgagcttccgtgaaggccttgcatagggctactttcttggtcatttcctcactctcagtgctccgaggcataggctctatcaaatacaagtaacatcaaagccctattagtatttaaactagagtaggaaaaattctaaaagaagaaaatacaagaacagcaaatgtaaaagtatttacttgggatttggaagcttaattggagggtaggcacccttttcaacgggaaatcggtagagaagaatacctctcctggaggtcgtgggaatgttaggtgtggccggtaggatagtaggcatcagaatacctctccagcttggagaaccccaacttcttgcaattggtcctcatcgactgaggcttcacgctgtaaaaataaaggattctttcgaagtagggacctcgaacttgtggattttgcagaaaatgtaccatccaactaagagtttgtaagctgaaggtatcaactgaaatggagctatccctatccacgcacagaagtccacaaagtaagtcctcaaaggaaggtgtgcatcactaaaaatgtgggcccacctccaggcgctgaatccatccgtgctcacataagccgagtcttccgcaacggatagtctatgccacttcagtccaagaattttgtgcaatccggcttcaatggcatacatctccagcatactgtatgaacggaagctgatgattttttggtccatctcccaaatggaggcattgaacacaggggcaggggtggtgtcttaaccttcccctttcctttggattgaagttcctggacgggaccctccaccagaacttcttcagtaataacctcctccataggagctggattttttcaatttccactgcctcaagccaaaattcttggttaagatccatcactggaaaaaatgaaaatgaaagaagaaccaagcaattagatgcccaatatccaaatgacaagtgtgggcatcagggaaggcctccccgaaaattgtttgtag

SEQ ID NO: 21149 - DNA, 2303 bp, Cannabis sativa
  modified_base (2165)..(2166): a, c, t, g, unknown or other
ttggtttggtttgattctgatatttggtcatatatgtgtgtatgttttgctgtgttctttgctgcctcaatccttgcatgaaagggtagtgaccctttgaaatgaaagttacttcttttcaaaaattagttgaattagccaaaagtctcttatgaaaatatgctctttggattttactagatactactaaatatatctttcccttttctcggagggtgttctgctttagctgattcttctagcaatttcaatactttggctcttatcacaggtttgaaaagatcaggctcgttcatttatcacgtgttgactctttctggcagtctctttcacctatcctacgtctatggttagttgttttagttgatcgaactctttattatacctcttagatggcatatgactaacatggtatatggttataatgttcccatcaacatgttggctcaattttgtttagttaatatttgtggagagcacattggccaaatacccagttgtttttatatttagattactacgactttattattataactattttttgataatgagtgagtggtttggggcacggaaatggcttgattgatatcatttaaagaaagaaaaagttaggggtaagtaccaaatagtgatatattggaataagtttgataatcggctgatcataacattaatatatgtctaacaccatttgatgcatcattacgttaagtgtaatttaatatctattttttataaatgaaatctgatattaaattactgggatcactgtataccttattaagtagtattgaacaatattctaatcaagttagttgcacgtcttaatatcatattaatttagattattgtgaagagaaagatagagtcatagcaagtagcaacaacaaagagagagagggtaaaagaaaagaaaagtcttcaagtaagatgggtgggtcttgaattgatcatagatcgacaattgcatgttgtttgactaggaaatgaatttactacatgggcatatatgcatacagtatatgtaaactaagtctaattgtgctgcccctgctccctgcgcctgcaccccgaatatataattatatatatatatattatatgtttatttttatttttttcctttgggaaagtttccattataattttaacatgtgtgttgaaacaaaaaggtatagcagcttttgggttgggaaggatgcctctttgcctttctttaattaactttttatctacatgattttatctttgatatgaagttggatttcagtcagcttcaactcaactcattcttaacaacaattcatattcggttggggacctattctgtgattcaaatttacaacacgtagaaaagggagtggcttttaatttgttaacaagtggaaagtggaaaacactgtcagcagctatttcttaggtagaggaatatattcatattcattcatgtagcagatgtgcacaataaataaaacaataagaaaagaatgcacaaaatgtgtgagttatcagtaattagcattttttttaattttttattatgttgattttgtttgatgttttacgtgttgttcgattgtccgtttcatacataaaaaataataatatttataatgaatattttggatagtaaattatcataagggctttcccatgcctttatttattttgtacttttcttttattttccgtattactaaagggttgtgagaaatgatgggtgcaaatgcaactcaaagaaagaacaggtcacactcaccctaaacccaattccaaagaaaaagtcttaatttatggaaaacggagaagtatgtgtatgatgatgggttggcatttggatgagtcctacattagtttttatttatttatttatttattttgggtgggtaaatatattgataattacataagatactattttttttttgtaaaaaaattatatttttacgtttaaaggattttttttttacatatttacggtttttcataaaaacaacacgaaaacagtaaaaaaactacataaaagtaacatgaaaataacatcaaaacaataataaaaatacagataacaaaaaattaacaacaaattaaaatgagtacaacataaaaagactgtattttttgtaaataaaatagggtataaaataaaaaaaaaattgtannaatatttaaaatttcataaaattgtatgttcttaatttttttttgtgtatttgtgaaataattccgtaaatatacatgttttaggaaatggaagaaaaaattagatgattgatgcgtataattaagttaatttatat

SEQ ID NO: 21150 - DNA, 1469 bp, Cannabis sativa
gaaaaagatattattgccttttttatttggtagtgttattaagttctcaaaacagaagttataagttctatttttgaaaaatataatgagtaaatgaaataacttaatgactataaatcttatgatatagctaattctttttagataaacaacatgtgataaaagttatttatttatatcagttagtcgtgtataataaaattatacacataatatctttattaaatgtccacccatatatataattcaaattaaaatcactaatgtcactactaattagtgcttaataaaccgtaatttgtaatattatattaaaaaatttcatattttaatacactaccaactaattttatttatatggtatgatcttaattcttttatattctacaaattttatatattcaataatatattttcttataattacttatttttacgacacaaatcctaacagagctacgaacaagttaagtacctaagcttgaatacttgagtatgtttgaatgcactacctatatatatgcacatattaggcacgacaagatttagcctaaagtactcaagtgcttatttctaggtcatccagatggagtaaagggctataagttatggtgtatagaacttggctacaagaaatgtatcatcaatagagatgtttttgatgaagaaaagatggacatgttaaaaaagacagatactaagtctactcaagaagtagaaagcagtagatcacaaattaaggtggattcaatccctaaagctactactgatgaacttgaagaacaaggggaggccaacaccacagatggcacatataatttgagtgtctatcaattaactcaggactgagaatgaagactaattaagaacatctctaatggaaagttataaatgtggtgtattgctattttttagaacattttggtaaaaattaattctaatggtgatgtaaaatgtctgttaaatttggcccaagatagaaattatgcatgtgccaaattttagcctacaataaatgtcacttttttaattacctatttgctactcattagtactattcattaataaaaaaatatttttatatttataagttattaaaataatataaataaagttaattgtttgtatatttttaataagtattaatggtattattgatttttataactaatttgcacattgtgcattggagcacaaatataataattgagccgaatataattttgtggtatattttgaatcaaatttaacttaaaatatacaccatctattggagatggtctaaagcactagtaaatttagcttaaaaaatggctcaatcttataggaaattgtgctctaatgcacaatgtacaaattaacgctgaaaatcaacataattattaaatttttattgaagttatattaaaaaaattatttcaatgaataaatataatattaaaagcttttatataatatatatttttttt

SEQ ID NO: 21151 - DNA, 8045 bp, Cannabis sativa
gaccttcccctgatggtgacctacattgcaaattacacttcataagtacacataacacaaaagagggagctgagaaataaagcaataaataaaatatggtagaagtctgttatttgattagaacataatgtgggacaaaatgaggccatagcaaaatcagatcacccaaacttatttatctaacaaaacgctactcatattcaaacaattgtctttttagcaattcttttacaaaaacagttgagctttctttgaattcaacttttacaagagaaattttgtgagagaaaaaatcatgaggttctttgcatatatctataaaaatctaaatttgataaaactacattaaatttaactgtcaaactttttgaaaacaaaatattatattgacagactttaggataaataataagggtgattgggtaattgtaatgggagagatttgtgctatatatatgaatgagtagttagaggaggaggggagagaattgtttggttgagtattagatcttggaagagagacaggtctctcaaatactcaactactattgtttagctctttctttgcaaagtatcagtttgactggatcaaattccaatcaaatggtattagagcaggtcaatccggccatggagaactcaaaacccattattcgcggtaatgatccatttcatttgcatgggtcactagcattgaaaagtattttcgttatcggattcgtgaaagcatgaaggtccctgttgctaaagcacgtctcaaggagtttcttggcgatggtttcaagcggtaaaagaataagatccgataaggagttggttagagtttttaagatctttaattgctgcagtagaaacaaagatgattcgtacgataagttgaagacgcttcgatatagaactgagcatcggtcaatttggtcagttttttctcatataaaaattcaaatttcggttttcgacttgaattggtgcaatctgaaaatcgactgaccaatccagaaacctttttagaagcgaccaatgtgaatcgcggtctggtcagttcaaaccgccaaaaccaaaccttttttttttgtctttgaaaaatataatcaaatctattatgtgctattattctgcattctacaattacaaccacgcaaattaattgttcaaagagatattgagttatagaggaaaaaggctgcttgaaatttttgagaaaatgagatattgtaatttgtgagacaaaatgagaaatgagaatatgaatgtatggaagagagaagcagctttgggacttggccttggatggaaaatggagagagacgacagaagagagtcgagtgagtgggttgagttggagaaagagaatagtaatattaagtataataacttttttttaatctatgtacactaatataatgttaatatatattattataattatcaaatagtgtaccatatacatataataaagtcaaaaagtttaaacttaacaaattaataaacctaaactaatggtcgatttcagtttctttggtcgtttcattatcgaaaaaaaccgaccgttcaatagcagttttaaccgtaagcgattttttcggtttcaattccaatggtgtttggtagatcggtttgaacaatttttttgggtttataaattttatgctcagtcctacttcaatatgatgattttgtaatagatttctgagtttagttcaattagaattccaatacagctgcctggtaagtattgcgataatttgaatttgaattcaaattttacctgagaaaaattttgagagaaaaaatcatgagattctttgcatatatctataaaaatctaaatttgataaaattacattaaatttaactctcgaactttctaaaagccaaaatattatattgataggctttaggataaataaagagggtgatcgagtaattgtaatgggagggatttgtgctatatatatgagtgagtagtcaaggggggagagaattgtttggttaagcgagcattagctcttgggagagtgttaggtctctcgaacacccaactaccttgttatcggttgtattttccattgttgcaagtaaatagatcacatcattctgatggccatggagaactcaaagcccatttttcacggcaatgattcatttgcatggatcactaacattgaagagtattttcgttgttagtggattcatgaaagcatgaaagtcctggttgctaaagcatgtctgaaaggagtttcttggtgatggtttcaagcagtagaagaataagatctgatcacaaactggttggagtttctaaccacgatcattaattgttgtagtcgaatagaagatgacccgtacaataagttgatggtgcttcgatacgatgattatgtgacagagttttgggttcagttcaatcagattgcgacacagctgcctggtattccgatgactttttctttggaaaattcaaggcaaaattcacagttaaggtgcaacaacatagactgcagacactatcagatgtggttatcaaagcactaatagtggaacaactaaagtcacaacttcaaattggtaaagagaaggatgagtggtataagagattgacatgtggatcatgtttcagcatatgaatatggtcggtggctggagaaggaagaggtgtcggagatgacgctgaagaagaacgacaaacagtgccaaagacactcttctcgccagataagccacgtgggcgaccgcgattcccaaactagagcagcaagatcttctcgtaatgtcggtcaaaatcgcggggaaatagcaattgttactgaggcactaagattttgggtgattctctcctgacctaagactgataaaaacccatgaggttggcctagtaagaaagacaaaaggtcgatggtttaatttagatcacatattagcaacgtgggatctagccaagtacgacttcaatttatcgcacgatcacaagtgagggattgtgattggcaaacgtaaacctagggaattcggcaactattcaggtggtgactgccgccgtaagggtggcaagagggaagggaaaacgatcaaaattctacttcaatgagaaagggagtacatcgacatggattttgacgaaggaaagagaaacatagtggttgtgtcaacccaagataaaaactcaatcttccaatccctaattcctaggaattttttctcttatccctttttacttttttattggttttgggcaagagcaccaacaaaaaaaatatgtactaaagtattccattggaagcatagatatggattttgggtgtgtatatcttgtttctctcattcatccatcgagagtggttgcttttgggtttttgacaggggacgcactaacaaactctcagttttcgctttgcatttaatagatgtgttaccaaaggtcaccttatgagcacatcatggcagtggctcaccaaatgcatctactagctgggttataactttagattcattgtatgacgaggaggggattacaaaactactcgctggatttttgaaaaagggcaatggccaaagtttcttgttccaacgtcttctcgagaatggttggtctgggcaagatttgttcattggttctttgaaagaggataagcatatatcaaaggaatccataaccaaccctttgctgcagtaagcaagctttcagtttgaggtgtgccacaaatggtcaccagcaagcattcctcatcggtacgacacgtaagtggctcaccaaattcatttgttggcttggttctttgacagaggtcgagcaaggtttgtgcctacaaagtttgcagctatcttgaggaaaagatgaattttgggcaaccggtattgataggtaattgagtaattgtaaagagagggatttgtgctatatagagtagtgaaggggaggggatagaattgtttggctaagtgagcattagctcttgggaaagtgttgggtctctcgaataccagctaccttgttcactttgtttttcaataccaatatatcagttgtatccattgttgctattgtttggctctttctttgcaaagtatcaatttgacaagattaaattcctatctcatatatatgaccatttatggtttgaatcttaaaaaaaaaaaaaaaagaaatgaaatcgcttggaataaatttattttcctccctaaaatccaagctcaacaaagagttagtagatcccatttgttaaattagtccagctaggttgaaccccaaacatctaacacaacacacaccacatcaccttagctagactcaagtggcactaatccttttttttttcattgcagcaaaaaaaaaagttctatcttgtctagttaacttttcacctttcgcacaagatttaatatttcctatcaatgcatcaagatgaagatttttatcttaagaaaaacatacaattctaattcgtgctgacaatgcatcaagaagaagcatccttcctgagagaggttcaccaactgcacttgcaatcttaattgcctctagagcttggaggcagccaattacaccaggcactgaaataaagaaacataaatgtaagtaagactccaggatctgaaaaagattagaattaaatttaacaaaaaaactttgcatgatgttctagctgttaaaatgtgcataatttccatgtctcaatcacttgggcaccttttctcaaaaaaaaacaaaaaaaaaaaatcacttgtgaactaatgcaacaagtttggaaactatgtcataaatatgttttcctctgctggttgttagaaaaatccacttgtatacctacccttatttatttcatgaactcatttactttacactagtttcaactttcaaccaattaataatgaaccagtgaaattgtgtttcaacaatgactcaccaactcccaaaacaccactgtcagcgcatctttggcatgctgttgaaggtggtggagtgggaaataaacatcggtagcatggaccaccgttgtaattgtacactgtgagctgcataatatatatggacaagttgttggaaatttcgagaatttcgcatgaaaaataattacaatttaaagcataatcctagtttataaataatattttcagtgttaggacagagtggaaagcctgctgcattaggtacctgaccttccagtcccagtgcagcaccagatacaagaggctgcatccaaacaacttaccagttaaatcatctagaaaaacaaaaacaagcaagctttagataatgcaatgatgctaaattgtacaacaacatttgagtttctgcattttggaagacagacttattagttattttgatatttgaagcaacagagaaattcagttattcgagtgtgaagttgtgtttgctacaaatattagtaacattatattctttattggctatctaggatgcccccaaaccattactgctaccaatagtgccgcctgaattttttttctcgttaaaaattccttacaaactattcacaatgctgaaatataagatttttgttaaattttatcatatggctaccacataagcattttgttagccgcatgggataaaacttaacaaaagtccaatatttcgggaggaatttctaatgggaaaaaaagttgagaaggcacgatttggtagttataatagtttgagaggaatttttaactggcaaaagagttgtgagagcacgatttggtagttgtaaaagttcgggtgtaaagatcataatagccatctatatacaaaatatgaaccaaacaaccacaattaaagatcccaataaagttggagctggaccaatggaacctctcccagttaaggaccttcaagccataggtcctagtgaaggaaataaagcattgatttcctcatcgtcagattaaatttaccttccttaataccacgcagcaatcactaatcatgtaacggctaggtgcattgtcagttgcatctactacaatatcatatctgagaaatgtcattaattagggaaatcacaactttcagctgattagattaagattttaaaagtagtaacacctaacaacataagggatactggccaagaatctccaaagcattggaggtgcgtaaagcttctgtgtgttccacaattttaatagaagagttgaccctgaatgaagacaatgtcagaaagtataaaggaaaaaatataccatgaactcagaaaagaaattctggaaattaaacattgaaaaaaggcataaaaacatacgatcgacaagcagcagcagctgattttacttttggctgaccaatatactgttcggtatgaataatctaaagaaaaaaagctgaagttagctttttacaattagcgatccaagggaacgcaaacaattgcgctcattccttagtagcataaagaaataatgtcactgaaaagataattacaaaattttcactaatgtaaagatctaaacaagaaatcattcccgtattgagagtatcaccctctcttacaaaatagacaaaacaagtgcattttaagttagaaacatcccaacagttgtggaggttgccaatttgtacctgcctgtgcatattattaagctcaaccacatcatgatcgacaattcccaatcggcctacaaataataaccaaaagagaaatgagtgcttgataactcagaatagttcaaattgcagcaattacagtggtaacaaatgctaattgatgtatatcaatcaaaagggtattctaatcttcttttcaactccctagactagagatagaaatcttaccaacaccacaagcagcaagatacagcagagcaggcgagcccaacccaccagctccaaccactacaatggatgactttaagagattcgactgccctacaacaaaattgacaactacccattaagagatattacaattttttttaaaacaaaaacatataatttgtcttgaattagtaatttatatcgagtgtccaatcattactctatcaaatattgaaacttggaaggttcagttttaatcaaacagacggcactgcgtagcgtgtttactgtcagactaaaacattagataagcaaatcaatgaaagtgttatgcagtacatacgtatacatatatctatgtgaattatgtatatgaagtatatatttacaagaaccttggactccaaacgaaggaagcaaaaggtgccgactgtaacgataaatcatatcggacgataactcgtgaccgaagcccgaaacaacggtcgaaatcgggggacaagagccatcgttaaggacggcgttcttctcatgactaagattaatctcgtgaagctgagtttccagggctgatattcgactgtctatgtcggtcctagtggctttgagagtttctatttcgcgagtaatttgagaggcgtctccaccgtcgaactccatggacgtacagagctgaggctgagaaagaatagtggagaagtttcagaaaaccctaacccaaaacgacaatcgtaacaggcaagggtttttctgcgtttagcacttttggtgcaaaaacgtcactttttgacttcagaaacacatatcgttgaaacgatttaagaacatgtcgctttcatttttttttttagagagaaaatgcctattgaaaattaaagggatttttttaaaagtatacgtaaaatataaaataattataaaaataatttaataaatttcaattataataatatcttttgtcacgtcattataaaataccttaatttcaaaataatatgcatgaataaaactaatcccgatttttttttttaattttcttgcattttagaagtaacattttggttacttataatgttcataataaaccaataaataacttttcataaaaaaaatattacttttatattttataatttgagatacattttggttacttctaaaacttacatgtatgcaatttaatgatcaattaattatttaggttatattaatatatttgagtaactttcaaaattatttttgaaaataatgaattgtcattcagtaaactaccattttagtaaac

SEQ ID NO: 21152 - DNA, 3137 bp, Cannabis sativa
tacatattttaattttattttatattaaataaaatatatgaaaactccacatgtcacataaagacaagacaaccctaattaacaatatcacaatcacgagtgtcatcatagtatgagtatccaaagaaagctcttcataagattttttgttttggttgaaacgtgagtgtctcattaaattgaaaactaaaccattccaaaagatttggtaagttacaaatgtagatcacttattatacaacttattatttggctaaaaatacaaataacttattggcatttcacatgtcaattacttatttacatgtacaaatatgtgttgtcattatcaaatttcaaaccctactaaacctttttggagaaaaattcaatttattactgcactgcaaaaattttaaactgcatagtttagtaaaattatgtatatgtaatggttagccttaggttaagacgggttaggcctgcgtctagggttcatctaatttataggcccaaaaaatacttctctttataaatatctgtatttttagttattttcaaaaatatcatattttttaataaatgacctaatgattttattttcttaaagtccactcaatcttaaagtcggccttgattatgagacacttctaaaggaatattacttattaaataaatttatctataaatattaattttagaaatattaaattattagattttgatccaataataatgaatgataaaagaaaagtttgaatttttatgctttttttttttgagaaaattgagttttcatgcttaatttaactacttaattaaaaaaatatctcattttacattatatcaaaaatatatttatatacaaaatatttaaatcaaacttaattttttttttgccaaaaaccattttttcttaaattcttttttcagccgataaaacaatcttaacagatataatgtaaaaatgagatatttttataattagataaaaaaaaattaaatataacaaacttaaatttttctaatagctaaagtttagtaattttattagaaaatatcattatgcatagatgagagagtaatgagatgaaccaatatgcactaaaatattatattcagtgacaaaaaccaatcactgtctaattaaagttgagactcactcataatttagaaaaaaacttccatcatatattttgggttttttgtttttcataaatatgtttttttaattagattttatttacattttcatgaaatataaatatatatatatattacaattacacaaattcaatttcttaaaaatacaatttttaaaattataaaaatacgtttttctcaccaaaaatataaaaattataagaaaataactaaaaaattaacgagaaattaacttcataataactataaataaattataaaacaacaagaaagtcagaaactataaaataattaaaaaaaatatcgaacatatttttgtaaataaaaaaattcaaatcgtaaaaaataaaaatgtcttcgtgttaattttttttgtatttttttttttcaaatttatagtgtattggataaaaaaaattattttttgtgtatatatattgttaatatatgcttgaaagaatcttggtaaacatttgtgaggggagttaaagctctcatagttaaaaatttcctccccacatttagttaaaaaaaaacaaaacaaagcattaatgattagatgccataaaatggagtttccatttcatttgagacaaagttgagtcatacaaaggcaatggcatcacgtgttgctgcaaatgtccttccattgcattgcaccatgccttgtttggatttcttttccaataaagataactcactttttattcttattttcttttgaattgaaaaaattaaaaaaaaattgacaatgagaatgacaattcttctttttcatgcaacttggagtttattattatttcaaggaaagaaataaagttggttgaagttgtgttgaatcatcatgccaataatgcaatggtaattctaaaactttagaaaattatcacgggtcgtctcagttaaagggatgattttacgatgtactttcttaaaagagatgtgctgatacatcttctatctattttaacatttaaaagaatttttagtttaattttttttttcatatttgtataagttagatatcttataaaattttgagaaattcaaaataatttacaatgtagaaaagagtgttcaaatattcaattttacatgcgtataaaataaaatagtcatacgtgcaacatactgtttgaacctgtttttagcgttttaaatttttttgaatttcttaaaactttgtcgaatatcttaaataactgtaacgtacatgactaaaaattaatttcgaataccaaaatagatagaaatgcatcgatacaatttttttaagagtgtatattgcaaaattttctaaaaaaagacccatcgactacttattgtgttttcggcatataaatagttataattctaatttttttttatatgactatatattataattataagaaacattaccaattttcaaataatttaaaacttatatcaaactttttattgcacatatgcttattttttttatacgggtaaatgtaataaaatatttgaaacttgattttagtacagtaaattatttgaaatttctcaaaacttattagaaatgtttgttgtaactgtaatatgtagtcaaataaaaaattgaaattataactatctacatggggaaaacacaaaagggtacaccggtgaaccacttgaaaactacccaaatctgaattcaggagcattgttgtttgttatatcctttcaacttgtgtttcaccacaccaaaccttcaatagagtgtcaattttcacttctataatcttaatttatgcagattggaaaggaaaattctgcagatggagcaaatatagggctgatcaagaggctgcaatgtcagtcatcaggaaatggatctgtcgtcgcaagtacagaacctgtcaatggtatgcatagtaacaacatcacaaaacacaaagttaattgtagctctttcgaatgtttttagatcagatgattatacagaagcaattcaaccatgtatgggcaatctatagggtaattctata

SEQ ID NO: 21153 - DNA, 2794 bp, Cannabis sativa
aatcccaacaatgtctctcatgtatcctaggacaatggctaagcaaatattccatagaaagttgttggaaaccaaaattgatgtgagacggcgcacactcacaagatgtcgacctgtgcgcccaacaaacactgatgctggttccaagtagagccctgggatgtctacgtagcatcctcaacttcatggttcgtcgttttagggtcatgaccaccggtttgttgaaggatatcactcagaaacgattttactggatcttggtacttacttgagttcccccaatgtgcaagtaacactgctcctaacttgggatgtaggccctaggattgtttcctttgtgtcacatgtcaaaaattatgtccaaatcatcaaaccaaatttttgtgtaaacagagataaacacccaatccatcatttttttccccatctttttacacctcaaatacaattcattcttcttaccaaataaaaggtagagtttcatagccatcttcttgtttttctttcttttttttaaactttttttataccttaacaattatgtaattttaattagttgtatacggataagttaggtttactaaatatttgagtatcatgtggtgtatacttttctagttattggccattttgacaaatccacaagtaggaaggaagaccataaattgatgagtaagaataaaaatgaaagatgctttgtccaccaagcacttttgatttcatttaatttatttattatcaaacataaagttggaaccttagtccccatcacattacacatcactctccaatacttgtcatttctttttttttttttaaattaagaattatttttgtattttacattacgtgatttttattcacaatcattaattaattaatcttctacaaattactagtccacgtgcatccaattacttcgtccacttctttcttctccgttactaaacgagtaaagcccaaaaggaattatcaatactatatatattcatctaaaaattatactatatatatttagctacacggttttgtgctttttgatgtatttttacggaatgtattccgtgatgtacggtagccgttacatgggaagttatttgatttaagggctgaagttgatctaaagataattaggattaaaaaatagtaacgtaccctgaaactcatttaatatactatgaaactcatctattgtactacaaaatatattacgtgaaagcacatcaagacgaaatcgtgtgcctatatatttattataataaaaacataaattaatccttaattatatatattgtgtctttttttaagaaccatatatgaagtacgaaaatattaaaagtaacggtacactaataaaaatttcaaactattaaatttctaggtggtttgtcaaaaaaacatatatatttaaaaaattgtaggtgactgtatttaattatttattattttaatttacaacctacaaatttgaaataataaaagcgtcattaatatttaaatgtttccgacaatatatatacatgtatgaaaaaaaaaatatatagaattaaattttgtgagggtaagttaataggtgcattaattttgaaaattaatttctttccataaacattaattatggatatttgagaagaaaaaataagaagattaattatggataaaatcaagaatttttgttttgtttttttttctttctagaggataaatataaaaatgtcagtaggtccaattttttgtttttttaaattttatttttgtaaggaaagtaggtccaattgatttcataaggaatatttgaaaatgaaaaataggacattgtttatttatttcttttttttttaaaaagtaaaaaactgttttattatttatttatttcacctttgcttcttctcaacgttggggttgggtagcctactataacgccaaacgaatattgtaatatagagagaaagagagagagagagactcacagctcgagtgcgtggcttctcttctcttctggctgtgcttgtttaattagagagagagagagagagagagagagagtaatatagttagtcgtagtagtgaaagagtcgaagagggtccattgtccaccaccatcaatctacacttgtcttcaccccctttgtgttgttagtctctactttactagttctagagagagagagacagagacagagggattttacagatgctctgtaaatggggaaaggtgaattgcaaaatctgcggcaacagcagagccatgatgagttcgaccacaatcgagactcttcgggatttttctgtgcgggatgttctatggttctctcccgattcgccaaagatttcagtttcaaatgcgtctttgttttgattttgactctatcgatattggtctctgggatcttctggatcattcctcatcgtgtaaccacctacggatttgatgcccaagaagccattaaactcagtggtaattctcttctcattcaattttgtccttcttatgtttcattcttttagcaaatgggtatcgctagttttgtatctctgggtctcatagatgattttttggatgatttgagctgtgatgggttctgggtatttgacttaatagactaaatttttgtaattagggggcttcgtttgataagtggttttttttccgctttgtctctgaaattatatttgtggaagttgcctcttttatttttccatttttttttcttgatttgcagtttgaggctctttgttgttttgaagaactgggtatttgttagttcatagttcacacttgggatttttaggg

SEQ ID NO: 21154 - DNA, 4530 bp, Cannabis sativa
tttgccttggtttgctatctatctgtatgatatagggagcttcgacggtgctccccatttcctatggttgcgcactactttctcactgtgtctctcccgagcaagagagaggagagaggcagagagagaaggagagggggaacacggtgcactctatctgttttacaaaagttaccattcaaattctcttttttgttaaatgataattcggaccctgtattttttaaaatggtgtaaaataatacttcgagctcaatttttgtcatccctttttatataactaacctgaaatcaatttctataacataaagggatacaaaaaatgtaatcaacatgatcataacatctccaaatcaagttatgttctatttttactaaaatttggctcaagatattattatgttatctaaaatttgacaaaacagagagtacagtcagtaatttttgcaaaacacatatcttatttatcttatcgtatatgttatcttagtgtgtgtgtggggaaagtgcatcacaagtctctaatatgtcatctgtgaatggatggtacattgtaaagcttcaaatacctccattacgtactgccttcaactgcaagactcctgtgccttgtggaccggaaaccgggaatgtgcaagaaacagactgcctcttatgagctactgcaagtgaggcattgtaccatggaccctttacaataggctctcctaaagcatctttaatttcctgactgttcctcattttctctatagccttgctgtgagatttaagcaatcaaccagaacaagaaaagacatcaaaaacacattggtttgtctaaatagttgtgtaaacaataacaaaaatccaaaggtatatgcaattatttagaatctaattcagtgattcatatgtttgtctaatcaaccctctgctttggtgttacatgatgaagttctcaaattagataatccttcttcgacgaaatggtaaaggaatacccagaaaagcaattacaaaagttcaacgtcaaagaaatgattcaattaatcaagatggacaatgaagatcgtattcataagatttcacatttctcaacaattctattttctttacttattccaagtgtttattgtaatgtatatcagatataaaactaacttgaattgagatcaccaaagcaagagttactttttgatatattgatattgaagaaacaatgttaatatcaccaccaatatttaagctcgtattgtccatatcaccacctcagaaacttcaatttcttcaatcacagcctattaaaactccaataaagacaaaaataaaacttgaagaatccaaattcttgaccctataaatacgagcacctcaacaccatcacaaggtagcacctaaaaggttcagtagatctaccaggttaccggaaatgaccaaaaaatctttaactactaaccgagagtccttgcccatgcggggaatcttttaactgaactataaggcatgaatttaaaggaatgaagagaacctttcaaccctttcaaaatggaatataccatggttcctcacttggatacaaatatctaaattcgatattcttagatacttttccaaacctaattctgatatagagatacttaattacattaatagcaatacaatctataaataccactaccttaaaaacagaacatccatgaatacaaatagctaacaatttctaaaaacttcattgaattatgaaacataaatgattaaaactacaacaacataagaagcataagattacattcctgttattgacaaaactaatgaaaattttgtgggattttacctgctacaactacgataaatagtaagatcatcaagagcactcaaagcaacaccacctgtaacagtaatcaaaataaaagacacagctttacgaccaaatgaattggtcttctcttcattcacagactttacagaactgcacaaacagaaaatgggtcaatggtcatgtttgaaaatcccagattcagcacgagaaaacatttcaattaagtaaaatacaaaaatggggtttggaataaaattagttaagtacctagagagctttggttttgcggaattcttgaacaaagaaatgaactttcttcctagcatgtctccgaaaagatggggtctttggaaaaattgatgctgacaagaacgattagagaagagagatcaactaaaaattggatcttttgaaaaagttacaatttttgtagtgatttgatcttcttttcttcttaactttctctgagaaaatttctcttcgtggggtataagagaagggttttagggaaggggacgaacggagtagtttaacgacggtagccgtttaacgacaatgtgatatctgtcgtttcattactaacgacatctaattgatcggtaaataatgcttacaagtttttaattttatatatcatttttctaaaaaaaaagttggtttttatcatttttgttgttgataataataacttttttactcaaataattaaacattaaataatatgtgaaaaattaacatattcttcaagttgtaatgttaatccctattcttattgcttataattcataaaaaagaagtttcaaattagaattattttttcccattgttaataaaattatttgggatgtaatacttaatcatatcaatagtaatatgatatttatatcattattcttaataaatgtaaaacaaaaaagttaataaatatttgacttagtaatcttaagtttaaagcctatactttcatgttttcaagagaaattttgaaaatttaactagttaattgataatgataaaccagaggactaattagtattatgcatcgttattgaattagtgaaagaatgttctacaccttttttattttatttggtataaaatttactatttttactacaacaactccaataattccacaccaaatatgatacataatataaatattttgcttaaaaatacttacattttttattttataattaacatatactaaaagtaactaaacaacttctaatttaaacaacatcaaacaacctctttctattcacatatgttaaaaccacaacaagcttataagttcaaacaacactatcataactatatgcaatctatcactatatacaatcctcatcactcaaaactcacttggggacttggatagtaatccaataagaatgcccatatagaatttgtatgaaaaaaataatcaatttacacaaaaatctcacacaaatgatactgctttcaaaaatcaatactttcctaattgtgtactatgaacaaaacaatcacaaaatcataaacagtatagtggaaaggtttcatagctttactactaagctttagcctctttcatctccaacccaattattcttctccttaggaccagttggaccttcttgcccagaaagctcacctgggaatttagcaaacaagtttgccaccgagtaacgaaccgttaaaggcaacttattgataatcttatccagctcggttttcgagtcatagacgatagttggaccccataatctcataaactgcaaccaacctggctcggtcacaaccccatctcccagatattcggctgcaacaagttcatatcgagtgcttgaattcacaaacaagttacttcgagcagcatcgttccttattccaatcccgagctttgatgagccttgaatgtaagttccaggacgagggtaacaagcgtgaccactttttgaggcgtaaacaacggctttgttcccatctatgtactccaaatcataggcatccacccattgtcccccgctgtgttgtgagtagtatatgctccaaagctcgccagtgaagttggatattcgaagagtgaaatgctcccaatcgctaatgtgttccccaattttgctaagagcaatattcatgactccaacacttagggtggctggtccattgaaaggacagaatacccacattgcaatatcggtgaaagttcccccgagtgctggcttcacatgagcgtaaagtttcgcactttccaagttcccacgtttgacaatctctcttcggttatcacaaggcaagtcaatccaaaacttcctatcgtttgtttccccaccaggcaaattcgagccttcagtgtcaattgtttcgccagtagtgacaccagttcggtaaaggagagctccattctcgaaaaaccatgaaactgaagatggtaaatatacctcttcgggatggaaaaaaacagttggaccgtagtgattgataagagcatgaatttgatcaaggtttggcattgcatggagattcggattcagattcttcaagcatccaatacttaagtcctctcccgaactccagctactactacagaaaaacgtcccaacagaaactcctttctccatcatgcctctacaatgcggtcttgtactccaaacttgaaaagaacaattcacatatcccgaactagaattaaggagcaataggcgataagcatcgcattcatctgttaaatcagcccgaacacacct

SEQ ID NO: 21155 - DNA, 3285 bp, Cannabis sativa
cttgaaaaggccacaaatgggttttctcaacggaacatgatcggccaaggttcgtacggtattgtatacaaaggaacagtatcagataccactccagttgctgtaaagcaaattttggatttggaatcgaaaggagacgaagagttttgtaacgaagtagagatcattagcaaaatacgacacagaaatcttctttcacttcgaggttgttgtgtcacaagcgatgatgtaaacggtagaagaaggtacttggtttacgacttcatgcctaatggtagtctaagtgaccatttatcgaacacttggggatcaacaaacaaagagagcaaactaacttggcctcagcggaagagtataatcctcgacgttgctaaagggcttgcttatttacattacggaatcaaaccagcaatttatcacagagacataaaggccacaaacattcttttagactcaaatatgaaagcaaaagttgcagatttcgggttagcgaggcagaacaaagaaggccaatctcacctcaccacaagggttgctggcacacatggctacttagccccagaatacgctctctacggtcaattgacagagaaaagcgacgtttacagctttggaatagtgattcttgaagtcatgagcggaaagaaagctattgacacatcaaacccatcagtgattttgattactgactgggcttggtcgattttaaaatcagggaatgtggaagaagtgttcgaagaatcgataagaaagaatggccctaaagggattatggagaggtttgttcgtgttggaattctctgttctcatgttatggtggcccttagacccaccattaatgaagctctgaggatgttggaaggtgatattgatattcctaaactaccagaaaggccattgccactcagtcacgagtcttatagatcttcttttgggtttacttcaacaacgtcaactgcttcgagcaccagatcggctatataaaaaagttaggacctagttgacatagctccttaaagtttctgatatgttgctaactatttttttgtaactgttcaaagagaaagagaaatcgattacatatatataggtcaattctttagtctgctttctataaatcaataaaactagtaatcatcttctaatcttgttacattttttggcgatggcgaccatctgattcaatctctaaatagtaacttttcatgtgaacttagtctagatagaaaatgcccattcagtgcctttttgctttggattcaattttggaaagcgccatcccagaaagcttgttaatttcgtacagtaatccaactgaaaacaagaagctgcattgaagaaaaaaaaaacaaaggttacataattaaaaaggggtaaacagttaaaaatggattgttttacaatagctgtcatgagtggcgagtggaaagtttgggtgctatatggaagtagggataagaaagaagtatcaaatgtgggagcaaattgtggtaaggtttgagctgttgagaggtctccaggtcccttgaagaatctgagttatcatttcgatttcagcaatagaatcgtaactttggcttattcttttcctgtttcggacctttcggttgtttctctagttttggttcctatcacaaacacttgggaacatatgcacatattaaagtatgaataccaagctataaacattaccatgttgttatacaaactcgatggacagtgccagcagcaataagagcaacaagttcagctataattactgcagaaggaaagaaaaataatcatttgcatgagttccacattatacactataaaatcataaagaatttatccacagaaaaactaattaagaaatgttttttttccttaaaatctaaaaactgttttctgaacacaaatatattggtgcttgcccttggagttattttgagaaaataattttaaaaaggaagttacaaaaaacaaaaattgagaacaacaaaaggtgatgtattgaagttttattccttttttctttcaaattacattatttaattatttcttataaacttttaaaatatttttctttgttaattttttattgaaacattttttttttcaaacaaacaatctgaaaactgattttagaatcttatttttgaaaacaaaaaacaaaaaataacgtcaaaataaattttatgtatatagtacatatcggattaaaattttatgtatattcatatacatatcagttacagcaagcaagataggatggacaatcttcacaagtatcaaagattatcaagagcattaaaaaatatattactaatattataataattaactttactgctcctgttatttctattaaatttaaatataattttgaaatggaatgcaagaagaatccatgaagactgaaactattcccagaaaaaagaaattacattcaacagacaagcaaaaataattcatgaatgttaaaacggatatccattcgttgtttaaaaatatcacacctggtctatagtttgataagagtacattattaatactaaaagaaaacagaaaaagaaacttatactcaccagcaccccagccggtctttgcaccacaagtttcctgaaaattaccaatgaactgcaaaaacaacaaccatgtaaatgttaaataccctattggtccataatactaaacaatcaattacattttccagtcaccttgtggtaataaggaaaaataataaccaatcaccataattttaaaaatcagttgaggtgtacacctcgagccgcgccctcaaggcgaggcagtgaaaaaacttatataaggctacgcctcagctgctgtcattgaggtgtacgcctcacactgatgaggcggacttgcggcacacgcctcaacaatgggctttttttttgtgtattagggctattttttggtgagttgacttgggctatttttttaaagcttttctaatagctattttcatacttttaatgactctaatgaactttagttgggtcttttttaacatattattgttagaaatgataggaaaatatagccctacaaaccctaaccctctcatatggaatctctcatctctatctccttctaagctaagtccctcccctccctcctcagtcctcatcaaccttgcacatatatgtcttctttatatgtttagaactttcaccattttgcaattgaattttgaatatttagggctcatttagaacgccgtattaggtcatattgtattgtattatattaaattgtattttatgtaatatttttatgtaa

SEQ ID NO: 21156 - DNA, 2476 bp, Cannabis sativa
agaatggaggcaaagacatgctcttttgaaactagattctcaacctaaccctgcaatatttagggaacacaagactatagcatttgctatgtaggtgtccaagagggagtcaaaactcagacctgtacactactacacgctttaccatttgagctaccctcaagagtaagacaaaagacaaatacatagacaatgaggccagaaggtctgtgggagaaggctaagttctgggtagcagcttgggtttacaaggctaaatgatttgagagactttgagagactatccttccaagatctaaggagagattggggaagtttaaagcatcaatccaaaaccagtaagagtaaatgaaaataaagcagaatatcctaactttccaaaaataaagcctgaacttataactggaaaaaaaatgcatattaaacacagttttaataaaaataaagcagcatagttgtaaaatgagaataaacttccaatccatctctggaagactgcttaacatgtgtattcaacaaagcgttgctaatgctattactctagttgcccatgaataatgaatcatacatttcccagtacaaccatagaatgtactacacaataaattgtttgaaacaataaattgccaagcgctattaaaaataatgtgcgctaagcactttcttcttttttgcaggcaatttattcacagccttgactggtaaatgtatgattcattattcatggacgaaagacttattacgaaaattgttgagtgcttttcaaacaacgtaatatatttatgtatatatatacaaaaaaaaaatacttaccagggggaagcttgctcttatcataaactttttgtgtttttgcttggactgactggtcatggtaagatggttgagatgtttgcataggcctgtcatctacacgctctctttttaatcgcatgcgtctttcttcacgctcctgacataagaagcatagagagcatccatcacacacatgagaatatatatatatacgtatatatataattgatataggaaacgagggttgcgtttaaaccacacttcagtgagcaaagtaacagaaaagaaacaatagaaaagaagaaaaaaggaaacaacaatttacccgacgtgcaatatcaacagcagactccacacgttcatcgggtgcactatattcttctacatgactagcataaacgtcttcatcgtcttcaggtattggtgaggcatttaagtccatcgcaacgatcattcataatatgtatcacctgtttcatttcaaatcaaaacttgcattgacattgcaggcccagcatgagaaaaacacacacatgtcacatatacgtacaatcagtaataaccgagttatacctgactatcaatctatacgttctaacaattccagagccagaaaataagaatacctaatacgaatccaaccattagcctaactccgtatatatataactaagtttcattgttaaacaacttctcaggcaaaggacaacaccaaaattaaaccaatgtacgaatgtgaagataattaacaaaccaattaatgaaatcttcttttatttctcaaaccaaagctagatagatcagccaattcactcaggtactactaacaaccaaaaaccctaaaacgaacaaaaatttcgaaaaacccaagtgcttaatcccatgttccacacaggttcaaattagaaaacataaatcaaccaccaaagactcaaacctcatggaaacgtgtcagaattaacaaaaacaacgatccgcgcgccaagccaaccgagtaaacaaaaacccaaatcaagcaagacgtaacgtacgatctttaaaaaattgagaacaatcaaagaaaggttctctttcttcttcgatgtctgcttcggaggtgatttaagacgggagaaacgaacacgaaaccctacagctacaggcgatactgtaagtaccttccttcgttcctcgcaactgggaagctgtgtgcgaaaccctagaaagagaaagaaagaaagacgagtgagagaagtaaaggttgtgtattgattaatccatgtcaagagagagaggaactgagatgagggaaacaaactcacgattcgatatggaggtttttcttttttttaatgttagaaaaaaaaaatatcaaatatatataggtgattttcttttttttttttttttttgttgtgggagaagaagagggtgaaaatgtaataagctagtggtagcggtgacgatgagtaatgaaaatgtaacttcacggggccatttcaaacaaaaaaaagaaaaagaaaaacttcacggggtaattttcttaaaataacttataacatagtatttttttccttaaaaaaaatggcatgttaattttttttttttttaaggaaattggcatgttattgaaaagaggaaattagactctactttttttatattgtacttttttatttttactctcttttttaaaatctat

SEQ ID NO: 21157 - DNA, 4310 bp, Cannabis sativa
tttgagtgatctgaaagttatctttccttttcgcagagcacggatggtctgagcagcttcaaaaccagcagaataaatcttgttgatctagcagggtcagagagacaaaaattaacaggtgcagcaggggagcgcctcaaggaagcaggaaatattaatcgttcattgtcacagcttgggtaaacattgtcttatctaactaaaataaattaataaatatagtgaaagatttatttctgagctagtgcatgcagcatatctaagttcacttaccatagctattaggtacttgatagatttaaataacttgtctaatttgaatggaaatatttcctgtgaaattgtataagtacattgattttataggttggtaatccaaatgttcattctattagtctggtgctaactgatgtcaattacttttgcaggaatttgataaacattctcgctgaaatttcacagacaggaaagcaaagacatatcccctatagagattccaggttgacatttttattgcaggaatcccttggagggaatgcaaaattagcaatggtttgtgctatatcacccacacaaaggtaaatatatttaaaatctttattcattgccaaccattttttttggcaagattggaaattaatatcagttcttgttgttccagttgtaagagcgagactttcagcacattgagatttgctcagcgtgctaaggctatcaagaacaaggcagttgttaatgaagtaacggaggatgatgtaaaccacttgcgtgaagtaatacgtcagctacgggtatgcttttctatgcattatgatatctgatttgcttcgtcaataaataagtgaacatgtggatgtgactaagctgaaaaactcaacaggatgaactgcatcgaatgaagtcaaatggacctaacccagttgatgctaatggaggacattcagcagcatggatacgtagaagtttacatttattaaagtctaccattaatcgcccaatgacattaccccatattgatgatgatggtgatgaagagatggagattgatgacgaagctgttgagaagctgtgcattcaagtggagaagcaatcagctgcaagtggtagtggcaataaaactgattcaaactcagattcacaacttgtggactctgaattgagaagttctaatgatcctcatcactgtacaaaagaacaagattctgaggacacggatgtcaagatggaagaagcaatatcacaacaagttgaggcgatgattgttgattccgacgaagctgttggaggaaaaccagaaagttctaatgataatacgctgatatctcataatgctgctgaggaaagtacccttggctcctctgctactgaaatgctaaatgtagaatcagaaagcaaaatagtacaggctcctcttccaaactctgaatcagttaacgaaactgtgtgcatgccagttgaagatagaggcaacaactctccgaatacatcgatgaatggtgcatctctcagtctcagaatgattacatgtgatgcatcccctaaccttcaatctccaactccaagcctttcaccaaaaactaacagcagcaggaaaagtttgaggacatcatctatgttaagtgcttctcaaaaagttccagttgataagagtgcatctttaaagaaaaccccaagagagggctctgtcaatactttatctaatcaaactagcagaagtttccttgcaccaactgagcatttggcagcaagcattcgccatggtcttgaagtatttgacagtaaccgccagagttcagcttttaggaggtcaacatataggttctcgtacaaaccaacagaatctaagatttttttgccagtttccaaagttgatgctggtgtgcaaactactcaatcagaagacccagtcgaattcacgtgtagtagttgcaagaaccgaatgcaactagaagaggctaaagaggccaatgatgatggtttgaacctgcagttagtacctgttgatgatggcttagaatctgctgaaaaattaaaattagttcctaaagtaagttaagttggcattagctggtaattacggtttattctgaaatttctttctaatattttctcttactactcaggcagtggaaaaggtcttggcaggagctatcaggagagaaatggctctagaagagttatgtgccaagcaaacttccgagatagggcagcttaatcgtttggtatgcattttcgtagttttatttaaccgaagcatatctagtttttaattctgatcaatcagcaataataaaaactccctttcactttccatttacaggtccaacagtataagcatgaaagggaatgcaattccattatcacgcagacgagggaggataagattctgcgtcttgaaggccttatggatggtattttacccaccgaagacttcatggaggaagaactactatccctcaaacatgagcatgaggtattggttcattcaaatgtttcctaacagttatttctctcaagcaattagcttaccatgattttttttttttacagcttttgaaggagaaatatgagaaccatccagaaattttgaggacaaaaattgagctaaagagagttcaagatgagctagaaaacttacgaaactttcatgatatgggagaacgggaagtattgttggaagaaattcaagacttaagaagccagcttcagtattatgtggattcatcatcatcccgaaaacgaaacccagtactgcagttgacatatgcaagtgaaccgagtgtggcccctcctcctcttaatacaatttcggagtctaaggacgagagtgttgatgacaaacttgaagaggaaagaaagcgttggactgaaacagaaagtaagtggatttttcttgctgacgaaatgagaatcgaactcgatgatgccagagcactagctgaaaagaaagcacgggagctagacactgagaagaaacgtgcagaaaagattgcacgggaactagacaccgagaagaaatgtgcagaagagcttaaggaagcaatgcagctggccatggagggaaatgcacgtatgctggaacagtatgcggatttggaagagaaacatatgcatcttcttgcaaggcataggaagatacaagaaggaatggaggatgtgaagaaagcagctgctaaagctggagttcggggtgctgagtccaaatttataaatgctcttgcttctgagatttcagctttgaaagtcgaaagagaaagagaaagacggtaccttagggatgagaataaaggtcttcaggctcaactgagggacactgctgaggctgtacatgctgctggtgaattactcgttcggcttaaagaagccgaagaagctgttgccactgctgaggtgagttcagtgcagtatatttcataatttattttaatttaatttggtggaatttaagtgcaacaaagtgaactgcattgggatttttgccacaaatttcccaataaattatgtaaatgcaagctagtcatcaaagtaaaaactattaactagttcttttagcatattaattaattgttagtttataggaagattcaccatttgtgccgtgtcatgcattaaagaaaaaactcaattaagtcatcaaattattgcatgcttgtattgaataaaattatcatcattattactaatggtttttaatttgttacatcaaaacatcttattctaagttctcacctattctaattttgcagaagcaagcaatggaggctatgcaagaagctgacaatgcctatcaacaaatggacaaaatgaagagaaaatatgaaaaagagattagcaatcttaatgagctccttgctgattctcgtttaccaaaagatacaacaacgataaaaccagctttcgatgatgatcatacaacgataaagccagctttcgatgatgatacggtaaagtatgatgtaggtggggagccttgtcaagaagatgattcaagtgaccataaatggagagaggaatttgaaccattctataacggtgaagatggcgagttaccgaaacttgcagaaccctcctcatggttctctggttatgatagatgcaacatataatagttctgtagacaacataaaatagtgttaaggaaacactaattagtttctgtgttatatatataatatataatatgtaacagtgtatgatcatttctttgattgtagtttgttgtagttcatattctttcacaagaattgaattgaatgaatgagtgaatgaatggggttatgtaaaattttcatcaaagtacaaaatttggt

SEQ ID NO: 21158 - DNA, 2181 bp, Cannabis sativa
tacctcgtaattcggacttcattcaccaacaattttcgggcagcaatgacacttgtgtctccacctatattactactaataggacttggaatatctcactgttacagcaacatttctctcctgctgatgttgaatatgttctcactatcccactttcattttccaacctgcatgacaggtgggtttggcactataccagcactggggagtatttagtgcaatctgggtaccatttggctagttctttggaggatcaacactagccctctattttttccaatcaagaaacatggtggaagttttatggaatttaaaactaccctccaaagtgaaaatctttgcttggaggctgagtcaaaatgctcttcctgttgcttctgcattgtttcatagaaagatcattgattcggctgcctgtagtagatgttcgaatgtgtgggagtttgtggggtatgcactctttagttgtaaacatgctaaatctgtatggaaggcaaccgagttttgtatcgattttcattctgctaactggttatataaaggagattatcttacccatttatcttccaatacttctaagtttgagtttgaacaaatgctctgtactatgtggtttatttggaatgatcgcaacaatattctccatggcaaggctgctcagaaactgactgaaatatgggcaaaagttgcagcttactgctgctatctcaacctgctggcagccccctcctctgcagcaaaataagatgaatattgatgcggcatatgatgaatcgaaacataaaattagtgttggtgttattgtccgaaattctaatggccaagtgattgttgctctttccatgcccttttatggggatgtttcggcctcaagagatggaagctaaagccttattttctagtcttaagtgggcgcatcaatatagcatagcctttgatttcatccttaatcttggcgaactcactcaactgtccttcaccaactttatctcatttttatgatttggtgatagacattaaaaatcatttatcctctctccaatctgtttgtgtgtttcatgtacgtagagatgcgaactaagctgctcatggtttggctaaacaagcattagtattagataataattgtatgtggtttgaaatggttccttcagctattttttttacaattataaatgattttctctaatttataatagtggatattttctaagaaaaaaatacaaaatgttatttaattaaattttaagaaattaaagttgtattatacttttttataaaataatttctttcctttccattttatttgtaagaaagaaaaaaagaaaaattaaaatgttaatgctaggtgtccatccccaaggctaatgaatgtctgtagtttttcatcaatatttgtgaagtttactgagtcagtccacccatgtagtgaaaaagttgaattgaacctcacactcgaaaacgtgaactaccggacaagaagccacgtgtaccaccaccgttgccatctaacttcacacgtgttgacagcccttttgcatgcaccgtaattgtctatttcgtgcggccaacaaatcactgaaaagttcattaggttttgtaactcttttttgttaatattcatctccttttcttcaaaaaaaatattgagaggttttcttctttcttgaaacttaaatctcatatctttgtgtgaaaataaaatatatatttcagataaaggtgaagtaatgggtacgtttgtcctatctaaggaagccacattcatcaccaacttagcatttttcggtatctatttaaaatcaagaatgagtgttttagtcctctaccttcaaattttatcatttaaatttgataaatatctcttcttctcctttgccctttttcgtatatacattataatatatataataggatttgtgaggagatttgatattgatattattatttgagaatagactgataatgtttttgtcaaatagtgccatgagatcgtgatctctgactaaatgggtctttatccctgctaccttttttctttctttttctcttttttttttcaggtgggattgaattgctacttgtagaggctggttttggacctcgtacggtatggactatggagtatggttccgggtttagattataagaaagaaagaaagcatcacactcttgtttgag

SEQ ID NO: 21159 - DNA, 5296 bp, Cannabis sativa
aagaagaaggattctccaatatcctccatgcttgcttcgccaaaagagcctgattaaagtggatgaaagaacgaaatcccatactgccatcagctttcgaagaacacatgaatttccatttcttccaatggatcttagagttgttcgtattagatccccaccaaaaattagccatcatagattccagttggttaaatatttctttggaaggctgaaacagctcgtggcatatgttggaattgattgaaccactacttttaaaagtacttccctaccaccaattgaaaaaagtttcgcatgccattgattcataagcttccaaatacgatctttgattctactaaaaagttccttcttgtcttttccagcatacgagggaagactaagatatttttcatgcagagcacaaataggcatacccagtacactattggatcgatcttggatgactgaagtaacatttggtgagaaagacatgacggttttatcagtgttgagaagttgtcttgacgctctatgataaagatctaaggccatgttgactgcttggcatgagtctttggttgcttgacaaaatagcaaactatcatcaacaaaaagaagatgagatacagcaggggctcctctagctattaataatccatttagatgccccaaagtttcctcattctttaacaaagctaaaagtccttcagaacggataagaaataagtatggtgataacgggtctccctgacgaagacctcttttaggaacaacagaacctttgaccgcaccattcagattgaaagaaagcttcgctgatgaaacacattttaaaaccagattgacccaactaatttcaaagcccatcttgatcataaccgcttggagaaagtaccattccactctatcaaaagctttactcatatctacttttagtgccgcgtaacccatttgacctcatttcttgtttttgagacagtgaaccaattcaaatgcaagaagtacattatcagtgatgagtcgattagggagaaaagcactttgattttcaaaaataacatgaggaagagcctccttgaatctggcagcaatggctttggaaaccaacttatagagcacggtatacaaactgataggtctatagtcactcacaaatttagggatcgatctttggaatcaatgtaatcagggctgagttaatagcttccatattatccccctcattcaaaattctaagagtactttgagtaaccaatggcccaactatatcccaatgatgctgggaaaatatggcagacataccatcaactcctggagacttgtctggagccatagaattgagagcagatttaacttcaatagcagtataaggctgaagcaaaaagtgattcatctttggtgtgatggcagtattaatcgtggcaagaacagaatgcaaaacatcatcatcaacgccattagaagagaacaaattagagaaataattgtcaatttcaacaacaatttcctcctctgtttgcaccataccaccactgctggtttgtatttttttgatcttgtttgtagcatttctagatttagctcgagagtggaaaattttggtgttggagtctccactttggagccaatccacacgagcacgttgatgccaataatgctcttctttttctagttattcatccaaaattttgtcaacattctccaccctttggatatgttcagatgagatgtccctactgttatgcaaagttgcagaaattttatgtgcttcagcaatgtctcggctcatgctaccatacttagaagtgtgccagttttgtaaagcagtagagcatgctgcaatattttgcagcagggataccgatggttggcaatgagaagggacataccaattcgattggacaatgtctcgacattccgagtctttgagccagaatcgctcaaaacaaaatctggtttgtctcttgtgattagtagcaggcagattaggagtagagacgacatattcaatcgctctatgatctgagtgataaaaatcaaggtgagtaacacgagcttcgatgaaaaactcagaccatatatcattgaagaagcctctatcaagcctttcttgaacaaaattcccattatgattcatattagtccaagtaaatttgtcaccattgaatggaatggcccgaagtttacaagtatctatggttttccgaaaattccccataagaatatcactttgtggaggccccccctctttgtcctcatttgaaagcaactcattaaaatcaccaagaaccagccatggtatgctaggatcatttgagacaagactactcaataagttccaagtattgattcttaaatgagtttcagaagcgtcataaaaggctgtgaaatgaaattggtggcaattatccgacgaaacaaaaatatcaaagtggttcattgagtaagaattaagagttacatctacattcaccatccataacagcaacaatccaccctttaaacccatcctagggacttcaattctattactaaatttaagagaagaatgaatacgatctatagaattacatttcaactttatctccataagaaaaagcaaatcaggaccctactctttgattagcagctttagatgcctgaatgccaaaggtttcccaaggccctgttattccaacttattattttcatggatgagggtggggttgcttaagtgcaacctccgctgaacaagatgaattcacatcagttgaatatgtggacacactagaaacatgctgaaaagaaggatcatcaacacttgaactctcttttttgttgctgcaacatctcttgagaacacttcaaaaattatcagggtccacttgcctcttaaaagatttgcaagtatcattaatatcttcacttgcctcagaaaaagcaactgtttttcctttcttttgtgcaacagcagtataggcatcaatgttattggtgagtggatcatgaagggtaggattaatgggaggatggatagtttcttgggtatgagatgttggtatcacaggagtcacctcaggagggaatgtggtgggaatgtaagagggaaatggcaaaggtaattcaggacatttttctttttggttagtaaccgtaatttctggtttagaggattcaacaatggttaaggattttggttgtggtgaggttccaatagccaaatttcgatgcgtgtaaagggagggaatagatgaggcgatagttttcctagttaagcgggttaaaagaggataagcattggcctttgagaaatcgtttcagtattgatcatatcctgaagttgggagtttgtcaccaatcatttgtgggccatatgggagttcaagatccactccattatccaccaattccataaaagccaagcatttgtcaaacgggtgaccaaatataccacagtgaacatagaacactgggaggtttttgtagcaaaactcgagccaatgttcatcttctacctgaggcagagtaaccattttccctctcattagaggttgagtgacatcaattcggactccggtacgcatgaaagaacctcaaccctcatggagtgagtcttcatggacatctatgaattctcccacccattttccaactttcttagccaatgctctagatttgcttaagaaaggaagacgatgggtttgaacccagaactgagcatgacaaaggtcctccttggtaacattctgcagagatgaatgagagtgcagcagtataagttgattaaagaaatgtcatggttcaccagagagcactctttgttgatcgcctgtacatgccaaagttaaaagaaaaaggtcagaatgcattttcgaaacaatgacttcaaaacgacacttattgctccaaaattctcccatcttttttatgaaggtcttcgggttgacagagttagaaaggcatctaggcaccaaaaagaatttagatgagtgattaggatcattgagatcagattcagaaagggtatgcactattctctctttctcagataggttaagagttgaattcatatctttaataatagattccatacaaggccaagaaaatgaaaatagaaagcgcaagaatagatcataaaggttgtggtggtatttatatatgggtttatgacacaacatgtagatcatggagttggtataaactgaaaaacttagaagaatgagggtgggaaggtgggtagttaacgatggacatgtgagaaatggagaagaagaacccaaaaaactgaaataaactactacagaggaaaaccccactcaggcactttttttttactttactttttttaaatatactaattgttaaaaaaaaaataaatttttatatttatagaaatttagttttctgttaggttcgtcctattattttatttaaatgttaagtgtctttataaactagcaactctacctcataaactttgacgattatcaaattatactcctcaaaataaaaatgagaaatattcaacatttttttaataaatcttaaaaaattaatttagatcttaaaataaatcattttgaatgattaagaaaattaagaaaaattaaaattttaaaactaattaaataatttaaaaattatttattttttattaaaaaactcattagatattaaaaaaaatacattaaaaatttaatttttgtaaaaactaaattttacgggaacaaatttgagtctattttatttttctgaaaaaaatgtagatttatttaagtaaacataacattttttagattaatttctaacttttttttagaataattttatatttttatcaaatttttaattaattttctttatttgttaagatatgagtttataaaaataaataagtttgattttttcttcaaaaaatcttactttatttaaattatttattagattctcaataattttggtttattttttaagataggtgtttataaataaaattaagtttgagaatatgtttttagaaataatttaattttttcttaaaataaaattaatatttttattaagtttttaacattttattatttttttcagaattaatagaatattataatttttaaattaatttttttaataaaagggggcaaaattatatattggtcaaagttcggggagtaaaaatattaatttttgacggtaaaataaacggaacctaacagaatggacattattatgtagctattatattttaaagagaattctgaacaagtcatagattttaggaggcaaaatcaaatagtaccgaaagttgaagagacaaaaatgctaatgattc

SEQ ID NO: 21160 - DNA, 3398 bp, Cannabis sativa
tcctactgagtgccttgccgaccttaatgccatcatatcctttactccttcagcatattgatttctttgttaatatatttcccaactatatatatatatatatatatatatataaatatgtatctatataccttttctttgttcatataaatctccacacggaccacacatacgtgtacgtaatagcagctctctagcaaattattatataagggattctcattaattgcaatatgagaaatttcaattactgtaataaaattataacttgttcaatcgatattgtaaagaaacagagaaaggtactaatggtttcttccttctagttatgacattctggttagtcattctgttagtttattaggagtttgttaaatctacaattgtagctcttaaagtcaattatcccatacttctatagttgtatgtaatgagttattgctcttatttgacaattcaaatctgctttatctccggtataacgtggaagtagcgtagactagagggtagtcaatgtcaaacgaaatatatgtttccaaagtcttaaacggaagagatgggtcaacgcgggaaattccaatatctgttttcttatgcaaacatcttaactgaactttgagacatataatgtgtgttctgttatttgtagtcctctacttttgaattgccaaccaaattaagatgacgcccttccttttatttcttctcatgttcttgttcttgttcatgtctttctcaatgacatcatcaacccaactcatgttgtcactggacgaagaagctcatgctctgcttcagagtgggtggtggagtggttatcctgactacgtgccgccggatcactgtgagtggcttggcattacttgcaacggttatggtagcatcatggaaatatcaatgcctcctaagtttcagttacgggacaagtttgtgaagtttaacttctctgccttcccaaatcttgttcgtcttcaactcgttggacatggactcatagacaatataccatctgatcagataagtactcttcataaactaacttatcttgacctttctttcaatgagatgaaaggttcaattcctgaggggatttggagcttgaaaaagttggagaccttaaacttgggtagaaacaagattgttagttctattccttgtagtcttgttcatttgaccaatttggtctctctttcacttgattctaatcttattagtggctctatacctgtagaaattggatatttgaaaagtttggagcaattgaatcttagtgacaacaaactaaggggatcaataccttcaaacattggccttttaaccaatttgaaatctctgtcccttggatcgaaccaaataagtggctctattcctttagaactgagaaatttgagcaaactagaacatttgttccttggtgataataatattactggggaaattccttcatttataagccatctaaccaatttgatatctctagacttgtcaagtaacatgatttatggttgcttatttagtgagcttaatcagttaacccaactagagtatcttaacctatcctctaaccagctttctggtgaggtgcctcttgaaattggaacactgtcaagacttaaggttttggacttgagtggtaacttattccatggcaaaataccttctcaacttaggagtatgtcaaacttaaggttgttaaatcttagccacaatgaattgacaggaacaattcctaatcaaattcaaaataactttctttcttattctccacctcatgaattttttagaaatagaaatttactcactgataaaatgagtgtcccttccactgatgcatcatcactccctagctctacatctaccaaaagcaagaccgaaattattacactcaacatggagattttcattccagtaatcagtttgtttggtatagttttacttggatatctggttttcaaagtttgcgaagctaacataaatagggattcaagaaaagaaaaacatggagatttattcaatatatggaattatgatggaagaattgcattcaaggatgtcattaaagcaacagagaattttgacaacaaatactgcattggaagtggtaagtttgggagtgtttacaaagcaagactacccaatggcagaatagtggccttgaaaaaacttcatagttttgaagcagaggaacctgaatttgtaaagagtttcaagaatgaagtgaaactgttatctaaaataagacatagaaacatagtgaagcttcatggtttttgttaccacaaaccatgcatgtttctggtctatgaatatgtgaagagagggagtttgtttaatcttctgagagatgatagcagagctttgcaattggattggagcaagagaataagcataattgaaggcatagcacatgccttatcatacatccaccatgattgtagtccaccaattgttcatagagatataaccaccagcaacattctattggaccaagaaatgaaggcttctgtctctgactttggcattgctagactcttaaatcctaattcttctaatcaaacagtacttgctggcacctttggctatgttgcaccaggtaaatatttcactcaatatatatgtatacgttggccttgttatgctttacataataagattgcaatatataaattttaaagcgtaaatttaatgccctaaaacaattatagttttattaagttaaacttgatatctaactcattagattatgcattgcccaactatattttacttaagcacaacaccataatataattataaaatataaataataaagttagagttttcaaacataattatgcacgtacatttttggaaaatttacatctagagccttatattgtatctaattttcacaaataacgtggcttttaaaattatcaatattattgttttatttgtaccgtttttaatttaattaagttgtttttaatttatgtgttgcaagctaatgtcatttgtctacgtctatcacgtcaatcaggttttttttttcttttttttttttttttgaaatccatcacatcaatcaagttgagcatcactacataataaataaaagtctagagtgagagtttatttttctctttattactgatatctttttttttccttttatatgttccatattatgagtatgaattaataatttcttctctctatattatttttcacttttaattttttttttacaaatacagatgatgattttgatattttaaaagtataagtatcttttatgttatcgatacagtcaatcatttgatattttaaaaatagactaattagtttgttattttataggcatacatgatgatatgtgtttgaaaaaataaattgttattccaatatacgaacaataa

SEQ ID NO: 21161 - DNA, 1601 bp, Cannabis sativa
gtgccaatggcctcagttcatggaatcacaaaaaggactttcgtttcaaaaagcgtataaacagtctcgaaaaagatttagagttggcccgttccagctctaattgggataatcacactatcgggaagataaaagatctccaatccagattggacaccctcttgtacaaagaagaaaactattggaagcagcgagccaaaatccaatggttggctcagggcgacaaaaatacaaaatttttccattggtttgcttcccatagggaaaagataaataaaattcaaaatctccatttaccaaatgggagcattatttcggaggagaaagatataatctgggaaatcgagtcacacttttgcacgctcttcacctcatcggtcccttcaagtactgacttgcaaatggcccttgaaggaattgatcgctccctatctgatatggacagatctcttttgggtgaacccctctctcctgaggaaattgagagagcgttttttcaactccccttggacaaagcccagggcttgatggtttcaattgtcatttctacaaagcaaactggtctcttctaaagaatgatgtcctcactgctgctcttagctttcttaatggggatggagatattgctcctcttaacaccactcttatcactcttatccccaaaactaaaaatcccacaacaatctcagaattcagacctattagcctttgcaacattgtctataaaatcatctcgaaaacgattgctaataggctcaaactggttctcaacaacctgatctttcctagtgaaagtgcttttcttccgggccgtcttatctcggataatattattatagcctaggaagttgcacattctataaaacttaagactcggggaagaaaggttggatggtggttaagcttgatatggccaaagcatttgatagagtggagtggtccttcattgttgccatgctccgtaaattcgacttcccttctcgatttacccagctggtctttgcatgtatttccactgccacatttcaattcaatataaacggcaaagtggctggacatgtcattcccactaggagtatacggcaaggagaccctctttccccctatctctttctgctttgtgctgagggattttcctctcttcttcagcaacaggagaacaatcgctctcttattggctacaaagtagccagacgtgctcccgcaatttcccatcttctgtttgcggatgatagcttccttttctataaggcctctattcagtcctgcaatattatcaaagaggtccttgtagtgtatgagagggcttcggggcaaaaagttaatttccaaaaatcttctctttacttctctccaaatgttggtcttagggatcaaactttaatttttgattatttgcaaatccctgttagatcatctttcgaaaagtatttgggccttcctcaacatattggtagaacgaaaaaacaaatttttcactatcttcatgacaaagtttgggcccatcttcataattggaaaaataaagtcttctctaaagggggcaaggaaatccttctcaagtctgttattcaggctattcctgttggaaattattttac

SEQ ID NO: 21162 - DNA, 8338 bp, Cannabis sativa
  modified_base (137)..(145): a, c, t, g, unknown or other
  modified_base (2783)..(2784): a, c, t, g, unknown or other
  modified_base (3750)..(3752): a, c, t, g, unknown or other
aaatgtttgaaaaatttcttgaatttctagcaatggtgataaaccattaaggtaagtggttaaagatcttcccaattgataggggtggagaaatataaggtcgatatgcagattaaagatcattaagttgatttttnnnnnnnnntccaaacttacctcccaagaaatacgatttgcatttttgatgatagtataaggtttatgattaattactaatcgttgcctaaatccttctagggatataccctagtgataggagtatctagacctggggcttggacccaacccgtagtttgcgtctagatcagggacctaaacccagacccgaacccggacccacagctagactcagacccggaacaggacctggacccgaaccatgtcttgaacccaaacctagaaccgaacccattccctaagacccaaaactagaacagaaaccgaagcggaccgggaacaggacctggattctgagctggaactcgatgaggacccaaactcaaaccttgactaggatcgagacctagacccggacccagatccagacccagactgggagtcaagacttgaacgcaaacaaaaactcagaccgaacatggaaccaaactcggggcccagattaaggaccgggacacagagtccgggatctaggacaaaaaccgaaaccagaccggtacccgtgactgggatctggctcttgacttgtgattcgagaataggggtgatacaaattacacaaatagttgtgatgaaacccgacaccaaatatggcagtctctaagaattctcaaaatttggaagtggaaccgcgacccaatgcttagttaagtataaaccttggtatgaaggaagaagccacaaatggtggtggacatcaatttgataagtcaggttgaacgccacaaggaatactccttgataagttccaatggttctctcaagaactcaaaaagataacttctccaaattttattcaaaaataaaggcaggataaaggaaataaaattaagaggaaagtttccaaaagccttgaaaaacgggatcagccacaaaataattctaaattgagtctaagttgagtctacattgatgagaataacgaatctttgttctccttcagtgttgactgcggtctcctcttttttaaaactctattgactgagtttttcagttcttctttgaatctcttagctcgcaccctcgtcaccgggccaagtggaacatgacttgtttctttagccttagtctccttgtcattccccccttttgaaaaggatttgtcctcaaatcttcacatgcatcaaaaggggtcaaatcaggaacattaaaagtagcactaacattatattctctaggtaaatcaggaacattaaaagtagcacaaacaggtaggcattgtcattgatcctttcaagaactttaaatggaccatctcctcgagatagcaatttggaacgtctttgggctgggaattgttctttcctcatgtgtaaccatacccaataaccgggctcaaaaacgtgcttgtgacgacacttgttagcttcatttatgtattgcgcggttcttctctctatgttgagtcgtgccctatgatggatttgcttcaaaaaaatttctttctttctgtcatctaaattcaaattctcagaaataggtaaaggtgatatatccaaaggagtcaaaggattaaaaccataaacaatttcaaatggtgaaaatttagtagcaaaatgcgtagaacgattataggcaaattcaacatgtggtaaagaatcctcccaagtcttaatattttatcttatgatagcactcgataaagtgcataaatttctattaattacttcttttttaccattggtttgaggatgacaagtagtagaaaataaaagtttttcccaagttttacccacaattttttccaaaagtaacttaagaacttagaatccctatcggatacatataccagaagctaggtatatgtattggggttgttcttatgcaggaagggagaccccttgcatacttcagcgaaaagctaggtggggctgcacttaattaccgcacctattataaagagttgtatccatttgtgtgagctttagaaacatggaaactctgtttgttccccaaagaatttgtgattcacagagatcacgaatcacttgaacctttgaaggggcaacacaagctcaataggagacatgcatgatgggttgagtatattgagacatttccttaggtcatccaatataaaaaaggtaaggagaatgtggttgttgacgccctttctcagaggtatgccttaatctctaatcttgatgctaaattaattggtttttaacatattaaggaactttatcctcttgaccatgatttaggggagatttatggtgcttgtgaaaaatcttgtgagggtaagttttataagcatgagggtttcttgtttaggtagcataggttgtgtgtgcctaatagttctttacgagatttgttagttcgggaatcccatggaggagggcttatgggacattttggagttgctaagacctaatttatattacaagaacacttcttttggccccacatgaaaagagatgttgagcgaatttgtggtaaatgtgtcactagtaagccagctaaattgagggttcagccaaatggtctttacacacccctacctatcccaagttcaccatgggttgatatctcaatggattttgtgttgggtttacctaggagtaaacgtgggtgagactcaatttttgtggtggtagacagannttctaagatggctcattttatcccttgtcataaaactgatgatgcttctcatgttgcagctttattttttagggagattgtcagattacatggcatgtctctagaacaaattgtatccgatagggatgctaagttcttaagttacttttggaaaacattgtggggaaaacttgggaaaaaacttttattctctactacttgtcatcctcaaaccgatggtcaaaaagaagtagttaatagaaatttatccactttattgagggctatcataagtaaaaatattaagacatggaaggattgtttaccacatgttgaatttgcttataattgttctatgcattctgctactaaattttcaccatttgaaattatttatggttttaatcctttgactcttctggatatatcacatttacctgtttctgagcatttgaatttagatggccaaaagaaaacaaaatttgtctagcaattcaaccagagaagtcataccaaataattccaaccaagttaatggtgcctaccagcaaattagccaaactaagcaatcactgatgcaactataattgatagattggggacaactcatgatctcaaaaatgatctgaacaggaggagaggattggacgaccaacatgatgcgccaatcgtagatcacggaacccgcactcaaaatctcgctcaaagagatgctgatgtgacttaggtcggccaagaggctgaacaagtttttcaagccgtgcagccacaattgaacaaattaaaaaatatgttccaaggccaggccggttagaggaacaacgatctcgagttggaccgaacacgtggaacccctttctcccccaagattaatattctggaattgccccacaaatctaagatgccaaccttgaagatgtataccatgggaaggaagatccctgaccccacctcaagtatttcgagatgcaaatggatttgcaaggnnnacgaagagatgtatgttgcagagtttttcctgccacactctcggaggctacctagcagtggtatttcatgttggcgcccagaaagttcagctcatggaaggctttctccttagagttccatgcacaattctcctcctctcgccaacttctgttgcacttaggagatctggtcaaagtgaagcaaagaccaggggagcctgtctgagcttacatcagcagattcatgacggaggcaactaaggtttcacaggtaaccgaagatggaaagttgtccgcgatacatggggggcattgatgtccttggtgaactttggaaggacataaggaagaacagaccaatagattcgatgattgactttcttaaccgtgtagaaggtttcattaagcttgaagaagccattcagcgagcagagggtgaacaaaaacctagccagtcaaaagttccttctactgggacatccgtccagctcccatattacccaagaaattcaagctcgggtggtaaatggtccaacaacaacaataggcaagggaattggaaaaagggaaagttcactggcatgactgaacaagctcccagggagaatcctaccaagtatactgcatttaccgtcctgacgaaagatatagaaagtgtctacatggctactcagtcattagccaacacacatgactcgactccaaacttggacacgaacctaagacccagctcaggacctggcacccaaattaaaataatatgggatccgaatttggacccagggcgtagacccgacccgtaatcagtttttggatctcggaccaaaacccacactcgcacctagacttagaccaggacaaggacatggacttgaacccagacccggatccaaaccgaacctaaatctataccgcttgacccgaaactcgaaggggattgggacacaggaaagggaccggggccaagacctagacccggacccagaaccgtaatacgaccaggacccagaatcggaaacttacccaaacccgaacccaaatccaaaattgagaccgggactcgagactcaaaccctgacccaaactcaaactcgaaaatgaaaaaggatccgagacccagatctgggactgagacccagaattggacacaagtctcggtgcgtgacatagacacaaactgggacccgaactcggacccgaactcaaactcgaacatggaacaggactggagacccaaatctcagatcaagaccaagaacttgaccacagtctcgttcgctgacctagacccatacttggacaagaaacctaaacctaaatcaaactaggacccacgatagggatctgatcttgacctgagatctgggaacaagggcttcgacaagactcatattaggtgtcttgatttgtgacacgaactaggacgtgaacctggaccagcacctagacccagacccgaaccagggacctaaaattagaacatgaactagaaccgtaccaggaacctggaactagatcaggaacgtgaccaagatccagatctagactcgaggcttgcacacgacccgtagttggtgttttggatctacgacccaaccccgtactcggacccaaatctagacccgtacttgaacccaaaccaagaccgagatttagacctagaccccgactcaaactaggacttggacttcgaccaagacttgatcataaactcaaacccgaacgcaaacccagaattgaaattgaaacctttattgggccacgaccgggactaggactcagtcttgggactggaaaagaacccaaacccgaacccaaacttggaccagaacctgaactgtgacaagaaacaagaccaggacttgggacctaggatttaaacccagactgggacctagagccgtaacgggacctagattgggacttgaaacctgagatcgaacttgaaacctgggacccaaacttagactaggactgagacccggacctgaacccaaacagggacctagactcagactaggacccgggacacaaaactgaactaagacctaaactgagacctaggacaaaaacatagatgggagacccggacttaggacctgggccctcgaactgggtctgaaacttgggcttcaatactaggatcaagtacaagcacccgacccccaactcggaccttgacctaagacccagctcgagacccaagacccaaactaggagtagaatgttgacctgggatttggaaattgagccttggacaagacccgtagtcggtgtctagaactgggactcaaacttggatccgaacccaaactaggacccaaactaggaccaagacatacatccggaccaagacccagacccgggacccaaaatcgaaacctaaatcagaaccagacctagaccttggaaagtgatcgagacttggacctagaactgtaacctgaccaggacccaaactcggacacatacccaaactcgaatccaataccaaactgagaccgggactcgggactcgaacccatacccaaacttggactcgaacacgaaaaaggatccgagacccaaatttaggaacgagaccaagaattggaccctagtctcggtcgttgacatagacccaaaacgcgacccgaacttgaactcgaactcaaactcaaacatggaatatgacccaagacccaaatctaggatcgagaccttaaactggaccacagtcttggtccctaaactagacctaaactgggacccaaaacctaaacccaaatcaaacaaggacccacgacagggatccgatcttgacctgagatccgggaataagggtttcgacaagaatcatagcggtttcttgatttgggacacagactaggatgtgaacctggaccagcatccggacctagacccgaaccctagacctaaagctagaacatgaactagaataataccaggaccctggaataagatcgtgaacgtgacgaagacctggacctagacttggacccggacccaacccatacccaaaccgagaacagaacgcgggctcagacccggtaccagacctagactgggacagagactcgagcctggacccgaacccgaatttgagactcgacctggtccttgatcctataacccaaaccctaaaccctaatctttaaacccaaaaccctttaccctaaaccctaaaccctcaatcctaaaccctaacccctaaatgctaaacgctaaaccctaaatcccaccctaaaccctaagccataaaccctaaacactaaacccaaaaccctaaaccctaaaccctaacccctaagccctaaaccctagatcctgatttgtgttcgggtctgggttttggtctaggttaggcttcgaggttgggtctggttctaggttcaggtcctggtccaggttttagtctcgttccaagaacccggtccagttacagttcaagttccaattttaggtcccgagtgtgggtttgggactgggtatgggtctgggtcctggtttgagtttgagtttgggttcaaggttctggtcctagtccaaaattcagacacagactacaggtccaatccaagcattgagttttagatcccaagtaccgaagtgggtcctaggtccaggttcgggtctagggtcgtgtcccaaatcccgatccaagtttcgaggcctaggttttggtcccgattcacgggcccaattctcgtgttcgggtcccccatctatgttcgagtcctaagtgccggtctgggtccaagttcgtatttcgattcatgtttaggtcctgtgtctcagtccgcgtccaggtcccggtttgcgatcgggtccatgtttgggtctcggtccctatctgggtccgagttttgtgtccaaggtccgggtctagttcgtgggtgcagacccggtctgggtttagtagcaggtcagaagtcccggtccgagtccaagtccggctccaggttttggtccgagtttgggtttgtttttaggtccagttacgctccaacgtctagatcttagtcccagtcctagcacgatttcgtctcaaagttcgggtccgcatctcggtgtgggtctgggtcagggtacagatctgggttcagttctttgatccaaacaattactacaggttaggtcaaagccttaggtctagattcggatctcggtcttaggtccttgtctatttccagttcgagtccgagtcgacgtcctaggtttgggtttgggtccgagtcttgggttctgagtttggggtcgggtcccgtgtctcgagttttgggtctcggtcatagttctagggcccagttccttggtctaagtcccccatctaggtctggatccttggtccaggtttgggtccaggtttaggtttttaccttaggtcctccatcgaggtccggatcctagatctcggtctaggtccacgtttaggttaaaatcccgagtttgggtacgagtctaggtcctagtttgggtttaggtttgagttagggtccaagccttggtctaagtctacgtctatgtccggttctgggtctgggtcttgatttaggtttgggtcccaaatctcagttcccggtccaagttcttgtgtgggtttgggt

SEQ ID NO: 21163 - DNA, 4131 bp, Cannabis sativa
  modified_base (3723)..(3748): a, c, t, g, unknown or other
  modified_base (4071)..(4072): a, c, t, g, unknown or other
agctgatggaccaatctcagcccatatactgtaaaaatgagatatttttctaattaaataaaaaattaattataaaaactcaaaattttataatattacccagaaataacaataaaaatatcatgctagccatattattgccatttttcagtttttgagctgaaaattgcatttttgcaaagtgaaaacgaggttgaagatgaaccacaggggactcgactattaacaattgagctcgactatgtgagttgagatgatagttttagtagagctcgactatagttgaggttatagttttgtagagctcgactgtggtcagtcgagatgataaacgttacggtagagctcaactggattcgatccatatttataattttaattgttaaacctttttcgttgatgtttgcttaaatagtgacattcaataaatatgataattctaataaagctcaactagttcgaccaaacatggtcaacatagtgctaaaggtcaattattgttaaactcttgttgatggacatattgataaaacttaattgaatttagtaaaaattcaaacttgttaactataattttaacttcaatatattttaactattttttaatatcaaccatcttttttcatacaagaatgactcaaataattatctatgttcattacgatggggagtggaaggatgaacaagggccatataagtggttgccaaaaataaagaagttatatctataattatcgatgattcgagcactacgtttgggatgttactgaataaattgtataagaaggttggagccaatcaaaatgacatcaaattaaaaataagttacttaccagtaacacttggagaaaacatgtctccacttattttacaagggcaagaatgtcttggagcttatcttttagactgtggagagaacaatcgcagaactgcactacatgtggagcttataaataaagacataggtgaaaaggagattaaaagctgtacaaaagaaatttagcaacccttagtaggtaactactttgatcgtgaattctactttgaaggtatttgtgatattgcttttgcaccaagtgaaagtgatgttaatctcggttgtaaatttgtggatcatcttaagaaaagcacaacaggattatctccaactccaaaccattcaaaagaagagttgatgactaaaaatcacatcgatccacttgactactatgatccattggagcactaagaccaacaaaatctacgttctcacaagtctcatgtctatcagtatcattggtccaatgaattgagccttcagaatccaacacagcttttaatatatcaatcaagttgtttgactttgattcagagatacgaatgaaatcttgcatgtgtgacatttttttcccatttagtagtgaaaggatactttttatatcctggatacaaaattattaatatatatataaatataaaataaataaaaaaaactaaatatcaataataaataagatgttaacctttgaattacctaaagctactacaccactataagagggacctttcttacacttcctagttgtcctccactggcaaattctcgatactaaatagttaatgtgacatctaatctctacatacttgtgttactactgttgggatatattaatacactaaaatctacacacacaaataaaaaaaattataataaagtattttaatattattgtactatacttaggaaaatttatttactgctaatggaagaggaaagcctaaataggtaaacctggacatcgtctgtcgattccaataattttgggtcgatgttagcttatttttttttttatctccgtacattaagattgcaaagattattaagagtcatgctatctttaatatttttttgttaacttcattcttcttctgtgattcttttctttttgttttgttcaaacaattattttaatttggtctttaagtcgtcaatgatgatgcatgaaggtcttccacaaaagtgactatctttgaatgattttgacttagtttgagattcccaacctttagggtacttttaactttcagtccagatatgaaagcatactcaatcaatgagaatcagattggtatcacattcacaacaaaccacatctctaaatctctgtaacaatatacttctcgaacgagtaataatcacatcacttggctaaaatgtctattgtagttagaaatatcgagaaagtagctgaatggagattttttgaataatttttagtgagttgggtaattctttatgttaacgtagattctcattaaccaaatatgtagccttccgtaataaatttactacagaatttaataataatgaacacaaggtcttttacatggttttgtaattaaaatctacgtactccaacagtccatattattagggatatttcttcaaatacagagtataaatctcaacaataattaataatagaattctctgtctctttttctctgtcccttttcccatggattatgcccctatttataggtatataggttaataattatttttattgggattgatttatttacacctgctgataaatcgtgaacatttcatttatttgcacatgagataatatctaataactactcaaatgttccttgtctttatccttaaaacgattatgctgattaagaaggttgtttctcgcttagaatgagttatccttcttatccgtctttggaggaaaatatgttaagtgtagacatgcttcttctcgcagcactctcatactgtagtgatgatgcgagatgacttctccattgcgtagaaagcgagatggtttgagcgtagttattttcaccctgctcatgcatgtgggttggtgagttacaagcttcttgatgtattgtcttgtaaactttttatcatatactttgttcatctcgagatggacatattgcctcatcaattatattagtttaatagttattattcttatctcgcatatgactaagtagtcagcgagtttgaatatttttatcaactctaattaattggaacgagttattttaatcgcatttaaaataaaatttaattataatattcttcgagctaattcatattccttttgtagggcaagtgtcagtctctgatgatcagccgaatttcgagtataacaattacaccctaagaagtgctttttaattaaaaagaacattttaaatgctcttacgggtataatcgcatttaacctgttttgaaaaattgcatgctttaagtttttgtcggttcagaacttcgaggctcatcattacccatttagtgttctaactattttattcttgtatagttcccatccgttagatcagatttcttttgatcaaatagtgatcacatattaggtataatattgaagtttgcacatcatttttgccatttcatctatcagaccttcgagctttttgtaaaaatataaccactttcattccaatcttgcatgccctcattatctcttacttttttcctgcgcatttcatttgtttacaattctagttccagaaatcattaagacccagcttctcaaccttttgagacttcaatcgcaaagttcttctctgtacagaaattttgatcaaaacagtaagtgatacactctttttttcttattgattcttcttatgtcttcataatttcttttccttggttagtttttccccatcttcatgttgggttttgtgccctannnnnnnnnnnnnnnnnnnnnnnnnnatttactaattaataaaagataagaaatcatttcatattgcatggttcaaatgattaatttcatgattatgttaaatgtataaattctattaagtccagaacatatgtagatttgttcatgattatagtgtcgtcagcacagcggaatataatcgtgattatatgtttaaatattttaactttcttgatttgtcagttcatttgatttagactgacatgataatttgtgatcaggtatacttacaccttggataagtgttatgccctttctagggtatgggcaaagttttccagtattagatgtatgaagtatacattggaanngaccgatattgatcttggataaaatatgataaacttaccgttatatctttctaagttaa

SEQ ID NO: 21164 - DNA, 2367 bp, Cannabis sativa
tttaaacgaaataataagataaaacttaaccgaaggaactcagtttttgtaaatgtaaaaattcaggaaaattcatattttagtattgtcgaaaaattaagagtaaaattgttaattatttaaaaaaaaataaaaataggcaaataaagttaaacgacgataaaataaaattgaaaaaaaaaacgacagtaaaattatgtcaaagtatgagcacctgtggttttgatgaaagtgaaggaagcagaagtacaattgcaagcgaatttgaagttgaaagacgaaactgatccgtgacattacgtcggcatgattcgatcgcagtaattttaattaaatttttttctttcaaaaaagtaatttctttcacctcaaaaacccaaaaatttccaagtctgaatcttcctatccgtacacaaatcattttcctgcatttgccattcctcttcgatgttcaacaacaatagcgtatccatctccgtctccgacgacgaatcagatgaactcagccgggccagagcccgagtccgtaaaaagcgcaagaaactggggattcgcaacaatggcaacggactctctcgctggcttattagaaagctcttgaaatactggatgttcctgatcttactcccagctgctgcgttgcttctatttgaggtctccagttttgtggtttcaccacacgctggtaaatcgcagaatagctccggctccgaacacagttcgatcaagaaactcagtcaggagaagaaatccgaggggaatttgaatcgactcgatcccactacccgggttgttggcggcgtcagagaacgtaagtaggcattttttatttttttttccaaagaactttaatttctgcattgggtgacactgtattgtattatattgattttgtttttttttttcggcaatatatttagaattctttgttaattgtatgagatcctaatttgtgaatcatataaggttgcttgaagcttctaccacccgaagaacttgatcatcttgatataccttcgagcaaagagtcaactagtcctgttagagaattggtatacatatcggagaataatacaccatttatggacaggaacattgcgttatccggacagagtacaaacgccacaaggttcaatttgtttacggggaatcaaagtctagatcagagagataatagtttcaaggttataagctgcgttgctcatatactgaccaggttttggttaatttatggtcattatgatgttaaagcttaaaaaggaacaatgtttgttggagatatttctgtagaatcttttgtgtgtgtttaaagcatgccattttctttgaacaatcaggtaaatgccacagctgctgtacactgtggattctacagccaaaatggtggttttaagatttctgatgaagatcgagatttcatgctaagttgtaaagctgttgtatctacatgtgcatttggtggtggagatgatctttatcaacccattggagtgtcggcggcatcaattagaaaggtatcatctctttcgtttatgctatcataagtcagctataagagagtaaatttttcttacgcttgttgaggattttattactgcaggtttgttatgttgcattttgggatgaagtcactctagctacgcaggaatcagctggacataaagttggtgaggatggatttattgggaaatggcggattattgttgttagaaatcttcctttctcggatcaaaggttaaatggtaaaatccccaaggtataaatttctgaaccaaaaatagtgaactaaacttttgttagaacctctttgatatttggtgtgtattgtcatcagatgttaggacatcgtctttttcctcacgcaaagtattctatatgggtggattccaagtcccaatttaggagggatcccttaggagttttcgaagcccttctttggcgttcaaattctgtgcttgcaatctcggaacatggagctcgcagcagtgtatatgatgaggcaaaggctgttgtcaagaaaaacaaggccaaaccggatgaagtggaggttcaattgacgcaataccgcaaggatggactaccagaggacaagagatttaatgggaagaaaggtatgttctattttcttttcctgtactatttaaataaatgaggatggttcagttggagcatgttaaattctcctgcttttctttcatttttgtatagaattgtttaattctttctgttttctcaaaacgtttatttatttttatttttcgacgaaataaagtgaacgattatactcattttgtccatccaagaatcatcttatgttcatgttgtgttgcctatgtacttgcccctttttaaaatgtcttatcgtta

SEQ ID NO: 21165 - DNA, 5035 bp, Cannabis sativa
  modified_base (141)..(145): a, c, t, g, unknown or other
atatgatcttgtattaatttatttattataattttaaggttaattaggatttttgccccccgaattttgatatgtactaaatcatgttccttgaactttgaagactattaaaaatacctcatgaactattgagattgttgnnnnnaaggacttttgtctaattttaataagaaaagtctaacatgaataaaaattagagagtatgatttagtacatattaaagttcgaagggtaagatttagtagatatcaaagtatgggaaatatgatttagtgcataaacaatcatcaaattagtaaaattgaatgaaattggacaaatgtctttaaatctaacaatttcaataatttaaggataatttttaatggctaaaaaaattcagggacataatttaatacatgttaaaatttaaaagacaaaaattcttattaagctaattttaaatgctaatattcaccgtaaataagaagctctattaatattcattacgcacattcatttactttagactctctaagttctggagctttctttaaaaatctgatttttcagcacttttttcagaattcatgtaataaaattgggattaactactataaaaatataaaaatttggtgttcattgtctctcatcagatgatactatcagtcaatgaccgttgtctagcgttaatagtgtattttgtgcaaattttgttttgaagaaaattgccttacatagaaaagaaaaataaaaaagaatatagcaaaccacatgtcctataatgaaaagggatctaataataaaagttggctaattagtaattcttcttttttgatatgtacgaaatcgtgcttttgattttttttttggccgttaacaatcttaataatttgggggaatttttaacgaacaaaaaaatttatgagcatgacttaatacatgtcaatattcgggagaaaaaattactcattagcaaaagttcattgacttcgtactaatcaatccatcttgttaatgtaaccgatttgtgttctcttcacctgaaatggataccgaaagaagcacccaaatctgcagaaagtgacgtgggctcgagccaaacgaacccaacccaagtccttatcgattcgccacacataccattgaatttgaagggccgagatctcacgctcccacgtataaatcaaccgattccgtctttctctctctctctctcttctcttggagagaggggaggaccattaaattgaccgtcactgttccatggctccgatcttcgagtatttcgtggtttgtgggatcggacctgaaattcgaaccttagatggggacaaagggttccatggatatggagtcatgtactctgcttccttactcgatcagtttcctcctcttaatcattctctctatcctcctccaccccctcagcttcccattgtaagtgcctccatcatggctgttagccacaatgccgagaacccccatttatgattgtattttttctttttcttcttttaaggaatattctgggcttataattttcgactgatttgagtttatgtatttgtactttatggtatttgttataattgcagtgtgttttaccagctggggtggagttttactcatcaggaatcgattacaatgatgcctcaacctttccgcggagtcacccgattgttctcactggtatgacttgaattcaactatttgaatgactgagaacttataagaaataagagttaaaattagtatttgaatttaagcattttattattttttgtagagggcgatggatcgaaaatatatgttagttgcattgcttttcgggatccagtgagtgaggatattgctgaagcgtatcgtatacctcctaattcatttgccgacaaatgtatctgtcttgtttcacgctccccaagtttcggggtactgaaaactgccttggaggaactgttttcactttgcttttccccaagtggaagtaggtaaactattctctagagatgaaacttgattacctttttcatataacttgggtgttaacatcttgacaaatttgtatttgaaagacgaagatgaatggtcttttgctcacaatttgctgtaattttttcaactttgcaacattttcagcaaaccattatgggaaattatatcacacatggtgtctaatgtgcctttgcctacaccgggaaaagatcgtgttttgttttctatagagaattgtcttctttctgttgaagctccaccgaaggatgggcttcctcatgccgatgtatgcatttttaatcagttttattgtagctgtgcagtttttagttttccctgctttattcaataagttataagtcttgttttttgagaatggttcttgatgttggactattatacttttcgataaatgcagatatcatttcagccattagtacagtgcttggatgttgacaacttaattaaacttttcactgctgtgctgcttgagaggagagttttactccgatcaaacaagtatgctttaagtccttttttctttctttccttctttccctttgcaattaaattacatttgaatttgcttagaccatatcattgtattttgaaaagtaccatgttttatacaaattttcatgtgcagatatgtgtttattctgtaagttttgatcattctatgtttctaatttgctgacaaataggtctctctttttttgggcagatattctcttttaacccttgtatcagaggccatatgtcatttaatttatccatttcgatggcaggtcagtttgatttgttaaactacatggacaaagaaaaaaaagtttgattgttctcaattgctttttgttatgcggacatcatttctttgtctcgacctttaggttgtaacaacgggcaaccactcattctgttagccattcatagtctctatactaatccttctatgttttttgtcatgtagcatgtctacattcccctactctttttcagcggagtagactatattgatgctcctacaccttatatgatgggcctccattcaggtgttgatacatctactttgacaatggatggtgtaagtagttgcttcgaaacattgtttcggtatttttttcaattgaacatgcatttcatgttctgatttgcaattatcacaaacaataacatgaaatctatcagatcttccggggtaaatgccaatacgttttattttggtaatgtttggtagttagctgaaagaaaagtgaagttatagatatatcatatatattggcaaacactagcacataagccttttctgtttgtattgtacataagacatcctcaacgtccctgtttttgctttacttgccatttaaattgcatcttttgtatttacctaaatgttgcaaatcatttggaatggctatcacatgcatatagagatttcattgccaatgcgtttctttagacagtattacttgagtcatatattcattgttctggctccttatttctttgccttcttatttttaggtagttgttgtggatctcgagtataatcgcatcaccacatcagaagacatcccaccaattcctgagcccgaattaagttctttgcgtggtgagatactgaagcttttgtgtcccaatgttgttgggatagatttgatgaggacaggtccatgtacttcatctgaccaatttcataaaagtgacaacaaaccttggggagaggatcacgatcttcaacttaggtgataactaaaattcacatgaaccagtgatgaaatactttttctttttctgaatggtggtgatgaagtactttattaataaagtaactgtggttacatacattgttgttctgccttgcttgcataaccagatctcaccctcttttccatttctaataagtatctttcttcaaaataattttaaaggatccgtgttattcatatattaccttgctttttcaaaaaaaaaaaaaaaaaaaaatcatatattaccttgcttattgagctaaacttttttggattttcatagaattgaactcccgtatctaattgtttctttctagtttcatttgtctgttctgctagctatagttttggcaataatgctaatgtattttctctctagatcttggaaagactatatataatctttagaaggttttactattgaggtgtttgtttgacatcttaaatattataatgcttcttctaataactataaataaatgtaggtacatatttttacatttgatgtgggggcaattattgtatgtaaatttgtattgaatattttattttaggagtgataaaaaaacaaaactgtaaaagtgatctattgtggccgtaagattaaaatttaatccactactgatagtggaaaaagtatctctactgtagcaaccccatttgaagtatatgctattttctatatcctaaagttttatttcgtagttaatgtaattctttaggttttagcacttgtggagtagttctttgacaaattatatcttcattagcacctaccaactaaaattattaaattcaaccttttaaatctatccgttcctgtgttgcaggttggtatttctaaagttttttgcatcaattctaagtggctatcgcaacttcatagtatgtataattaatattgtttcttgctctgtaaaaatagtttatttatttatttttttattttccacttcactatgaattttattccctaaataatactcttttcaggaaatttctgcaaatcatgtcttcaacaatcaagcatttttaaaaaagcgtgctcggtcaagtaatcaatcatctgatcccatggtatttctttttgaaatgtttcatctttatactcaaaaacatcaaccttacagtgagctattttgtccattacagatgacatgaatgacatccatagttttccgtatgtgacactatagtatttgtttttcttcctcatattggaatgcttatcaagacttatgagtgaaattagaaaagtagaagtgtggactttaacggattttttttttttaagtactttatatcatatt

SEQ ID NO: 21166 - DNA, 3935 bp, Cannabis sativa
ctaaacgggtccccgtcgggacagggagtgtgatccccgtccccgccctgtttaacattcggggacaaaaaataatcatcgtccccgccctgttccccatttagacggggtcctcgcgggccccatccccggggggaaatatgcatccatattcatttttttaattaaattcaattgaaatgtacttttttttttttataagtaagtccattactgattataccctcacataagaatagtgttcaggaggtgagaaagatttttttttttattattacataaaggtataattgggatataacaaataaaagagagtataaattaaatatatagaaaaagaaaataaaaataaaatgggttaaccaaaaaaaatataaggtgcaattttcactaaaaatttacactgttatgttcccaaaaacatgataacaaatataaaatagttattttttatttgctcccttcgattttttttcttcacaatttgcctcccactatagatattctccatcagtgtgtatatagttctttctaatattagagctatgaattttcatattatgaatattttataaggtacattaactgttgttttattatattcttgtctcattctcgtttacttatttttattctttaataaaaaaaataaatatttttattaatagataaattagaccaaattcacatttttaactaggaagatagggagctatattggccaagagaaagcaccaagaacaactgtccaccagaacaatgctaaaattccgtaaatgaaatcaagtctactacaaaaatcatagtgccacaaccaccacccaacaaaatcggataaaatacagtggtcttgtaacacaataattgaaaagctcattctctcctcattttatgttaactgtataagtgtatttttgctgtgaaacacaataaaagtttacatattttttatctacgattttcatttatttcatatttgagaaactgaacgggtaaatgactgcctttgtaaatacattttcattaaatattatattgaatggaaaaaaaatattctctcaatattgtcggcatagccatttcaaaaaaaaatatatattgtcggcatagttttgcatttgtaagtataaaatttctagtaaaatagaaagaaaaaatatgtcttggagaaagacacccaaaaatcataatcaaaatggtccaactctcacacactcttgccattaaatgggtaagcaccaaagtgtccaacaaaacaattagtatttttttttaactgaaaaaacaataagtatattactaactgccatttttaccaaaacaattaagcacaaattaattttcaatgactgacaattgaagaatctcaccagtcaaaatgctgcccgtacagataaaaacgaataactcagaagtcatgcatacataaacagaagataagtagctaggttaaattttttttttttttttttttcaataataggctagggttaaacttgaaaaaacaaaaatagtttgtttttatttttattcatttttggtactacagctagtttaagaaaaattaaataaaattaaaaaaagaaggtgaaaacgcgtagtcgtagtgataccttaaagacagaggaaaaacaccacagaaagaaagagagaaaggactaaggacataatctacgccgcgtgagcagatcctacttcctaggtatttttattattattcatttatttattttatttttacttcttatatatatttatgtattattatgtgtattacactcaacaaatacatatgcaaattacacatacgaccgacttttttatagacaaacgacacaaagttccaaaatttaaagaaaaaaaaaaagaagaaaccctaacgttagtgactcattcacacacaataaattttacctagcaaaatagtacccatttaaggaagttaaaagggaaataaataaaatgatgcatttgttttaagaaaaatatattatggaaagatggggaagataaaagtaaagaaatctcatttttccattttcattattttcaccctataagagcttttgtaattttcttgacttaccaactccggtgggggcacagctcagcgccaccaccatgtgtactggccccacccaccttcctttttgattatttttattttttacataataataataatagttattttttttattatttatttacatattaattaataaatattattattattattttatgttctcgatctgtctatctatctatctatccaccctctgtgtctgtctctttgtttctctctttctctctctcttctcttcttcatctccttctctcttacgcgtcgtagttttatgaccacaataaggaccagccaggttacagatgagatttggcttgtgaaggaatcaatttactagcacgccttctactactagtcttctcttcttttcttatatgtaataatttttattttaacactacattttccccccatacattttggttttttcttttctttgcttctatgtggggtttggatgccctttcatgggtattgaacagactggcctaaagcgagaacatggatctttagacgagttgaggccttcagactcgttaaagatcggattttgagttgggtttccttgatttgaagaagcttcccttgtagatttggagaaaaagtttatctttggcgagttatggccacgggtagacttgttgctgggtctcacaataggaacgagtttgtgttgatcaatgcggatgaaaatgcacgggtaagaggctttgaaatcacctcacttggactaattttttttaatttggggtaatacccatttgctccttcatgttgtattatgctttagcacttttggaagtgctgcggattttaaatttggacatgggttttgagtgatgttggaattttggggattttagtttgtgggtttttgttttctagttcaatggttatttgttgtatcagtcattgtttattccgtggttttgcttaaaagggaccttttttttttcctgtaactaaatgctttgtttcttttcaaatgttgcttggttttagtggtttgagtcaggagtttcagagttctacccttccttaagcgtttcttctccttcactctcctaagtttctggaaaaattatcatattagaagttcagctagctgtgtttagttttgcatttgctgaaaattgtaatggaattatacagtaagttttactacaagacattttgagcatgttatttctcaagatctacttggatctaggtggaagagacaagaaatcaagatgataatgctgacttagttctttacttgtgctcacactaaagggatgagtggaaaattagtgtcggcagattgtgaaagcacttgtatgcatcgagcttgttgaaataatttaaccatttgagttaacgattccgtagacagtgattttgcatgatgattaatttggaggaaagttacaggaatgagaggattgattctggttaacaaagatgaaaattttggggggagaaacaatgttctctgctcacgtgtttctgctttcttcgtgaacactgtgtttatttatttattataactagctgaaatttacataagtttttctgtttaaaaaaattgagaacaattgggatggaaaatgtcatttttcttgagcactcaccaatattactctgtcattacagataaagtctgtgcaagaattgagtgggcaaaaatgtcatatttgtggagatgacatcgagattacagtggatggagagctatttgttgcttgcaatgaatgtgcattccctgtttgtaggccctgctatgagtatgaaagaagagaaggaaaccaagcttgcccacagtgtaaaaccagatataaacgtcttaaaggtaagggttttattt

SEQ ID NO: 21167 - DNA, 1025 bp, Cannabis sativa
cgatcccccaaacccgattggatcatctacgactacgcttcgcactggattcattcacgcgccgccgagctcggtatctcacgcgcttacttcgcgctctttaacgccgcgtggctttccttcctcggtccgccgttggatctaatcaacggtctggatggaagatcgagtgcggaggattacacggtggttccgaagtggattccgtttgaatctcgattggcttatcggtaccacgagatcgcaacgaacatagatagagagattgatatgagtattacgaacgattcggtgcgatttggtatcgcactcgatgagagcgaagtaatcgccgttaaaagccgaccggaattcgaaccggaatggtttgatttgctgggaaaactttaccggagacctgtaattccggtagggtttttaccgccggtggttgaagaagatgatgatgacgtggactggttagggatcaaggattttttagatgaacagaaagagaagtcagttgcttacgtggcacttgggactgaagcaactctaactcgggagcaactcactgagttggctttcggtcttgaactatccgagttaccttttttgtgggtgatcagaaactcgctggatatgttaccggatgggtttttggatcgggttatgggtcggggaacggtttatgttgggtgggctccgcaagtgaagatactgagtcatgactcggtaggtgggttcttgactcactgtggttggaactcggttgtggagggactcggacatgggcgagttttggtgctttttcctatggtgaatgatcaagggattaatgctagggttttgagtgagaagggagttggggttgagattcctagggatgagtttgatgggtctttttcgagagactcagttgctgagtcggtgagattggctatggtggatgactcgggcgagttgatgagaattaaggctaatgaaatgaaaggactttttggtgttggtgatgggaatgaatttcacttgaaccagtttatcga

SEQ ID NO: 21168 - DNA, 9511 bp, Cannabis sativa
  modified_base (31)..(38): a, c, t, g, unknown or other
  modified_base (1103)..(1105): a, c, t, g, unknown or other
attaacaaataaatctgattatattgaaatnnnnnnnntttagggcacaaaactcaacagaaactgcctagagctttgagtttgggggataatttcttttgttagattgcattgcactcctcaacagatgtcacagttttataatcttccaacttctgcttcttcgaaaatatcttttatgcatttcacacaactcgatatctatttcaaagccttatcagcaaatggaaaattaatttgaagatttttaaataccttgagaaacttggagaattatttgttaaaagaagtcttttggagtctttgtgggtatgggatttcaacattcactattacaaaaactccttctatggccatcaaagctagacataaaaactatttcatgtcacttttctactggacatgatatgaaatgccgtgagaaggaaataaatttcatgtcaagcattgcttgacgtgataataggacccaccaaaattattataaatgcaataatttatattactagattgaaactaggttatagcaagaaaattcatatgaacaaaacaagtgcttagctttaccattacaaaaaaattatacaaacatcttggttaagatttttcatacttcaaactttttcaaatgcaaatctctcaccatctccaataattcaactcgctttggagagagagagagagattttagggtttcactgtctatggcttagggtggcgttgccattaggtcgtgcaaagagagaaagaaagggaagaaaaggatgccatagtagtattttttgaatttgaaggtgccatttagggttattaggttgaaagaaaataagatgttaatgttatactactttctttttctaaataataatgttatacgcggtatgatatgcacgcgtgtttttcaaactttttttttaaaataagagtaaagtccaacgaagctggatccagtattgttgtcatgtgaaaataataccaattgagtatatttaattaattaaatatcatgtctcttttactttttcatggagcaatgttggatatgatccaataaatattaaataaatcattgggtttatgccgcttacaaactcaaaactttnnntacttatgccgctatttacctaataaaaattgaccaataaaaaacaagtagctaaaccataaacatgtacacctatctctgtgtatatataagacacatactaaatgctttttaaatttattaattacagtacaaatttgggttgaggtcatgcttccataaagaaactgaaaacattgtgataaagctggcaatgggattatcaattcaaatactatgtggctatgtgacattacctctatatgctcttgtcacacaggtacgtacgtatgtgaaatataattattttgtgtaacttataatcataacatgaacatatatatttatataataacttacttatattaatttgaatgaatgcatgaatgtcagatgggatcgtcaatgaggacagctgtattcacagagtttgttgtgaaaggattaaagaaatggaaaggaagggcaaaaaaaaatctaggaacaaggaataccaaatggcatatgcatagtcccccaaagtcactagaagctaataataattctcaagatattttctcaatggatacatcactttcttttagtacccttgatcatgcctcattctctattgatgtggatgattctattgctggtgaaattatgagtgaggacaacttaagacccataaatgaaaatgtatcccagaataatgataatgatgatgatgatggcgacgatgatgatgatgattatgaccgaaagaagattagctcctttgatgggtttcgctcctacaccgatacaaggttgtaaatttttcatttaatattttacatgtacatttgttattattgattgtgattaaattattactttcatttcttatgtgttttgaacctcgatttatataatctcatgcacatcactcatgatgaccgtcgtgcgaatatgtagtggtgttttgtaattagtagccacctctaccattatcctggcttcataattttctatatcctatgaatgggattacattttatattgtctcccttcaagtttttgatgacgtacgtaactattttatttagaaaaatgcagagagctacctcaagcaccttaaaatgtattatattattatattttttcacaattttttaaaaatttaatttaataaattattagacgctatagtgctgagcacctctaaataaaaatgctctttgaactaaacctactatcatttaagtatgagttgccaatacagtgcacttctctttgttcccatacgacatgtcctattagacacaccaactatcataatgaaaactaatttcaaagcattaattatatatatgtttgtcatacatcatattaagtattaactatatgtatatattatcatgttatcaagtagctggcatatttactctgaatttaaaagaaaattacagatatgcttacatatatgaaagaaaattaacaattgatggacaggctccaaatttagatagaaatgaggaagaacctacatattcccctaaatactattgtgggtttccctcaaatacaaaaaacaatttccaacactacatggaaaccatttctcattttgtagggtatctcgtttaggaatgaaccattgagagaatcaataaataattcctacaaaaccaatgactaccaaccaccacgactgccccaactgatacccaaggaaatcgtaaaatggatccactgctgaaaaagtatagtagtcaaaaaatgaactggttcagagatggaggatgttaacctagaaactttattttggtaacatggatatcaatgtttatcacgtggcaagaaagatgacatctcggagttgagtagtcccgagtcatagcagtcgacctaggaggggtccctagcccagcccccaggttgacttcgagaactccaaaaaggaatttcagacttcaaaaaattgtttccagctcactatttttcagtattctgtaccatgaagacatgaagcaactaaatgtaggcctagagagctgaaattacatgaacctgcaccttgggaattctaggcacctagggtttcacccaacacacaagttgacatcttagctagggttttagttttcgagaccgtcttagtacaaatggatcaaactttgtattgggacatgaactagacataccactgacatatttaagacatcagaatcagattcaaagaaagttcatttttaagcatttggaacacttggtgcccgggtaccaagtgcctagtttgaaaatttgttaatctaggctactttcaagtattagatcaaaattttactcgtgcatcttctttttcttcattaaaaatggggaaatatgtactctcgaggaagaaataacacatcctgggtgccagaactagggcctagtgctcagattgacattttgtcaacctaggccgttttttaggattttttttagaactcttttgagcatactctgttttagcaaacattaagattcaactatttttcagggaccgaacagaacttttagatggcctgaagctagacccaacgtccaggttgacaatatgtcaacctggatcgctttctaatcagttctcaaaaagtgttctaggcatattttttgtcattagaaataacaaagatacaagaaaactcaaggagaaaatcacaaacccgaaggcttggaaactaaacccagtgcccaggttgccctggtgctgggccggttttaatcactcaaatgccaattctgctccgggcattgtctctgtaatggtcaaaaatggggtaagagacctcgtcctcaagttctagcaccttgtaggtatcaaaacgacatcctggaatctccaaaataagcacccaatgcctaggttcataaatggcatggtgcgctgggttcttcttattcgattttgattccatcatgacctcttctagtttttcacaataactaagagctatgaagtcagaacagtcaaattcacaattgtatattttcacttttctgataatgtaatttacttaaaaattgggtagtttcaagtctccgagaactagcgatcaacttcaccaaaacacatagatggactaagtgatgtcaaaatatcacttaggcctcaaaaaatacatcctcgatatgttttcccactcacccagtgtccaggttcacatcacatatcaaccttggcactggatgttaacctgggcgctgagatgtcaacttgggagctgtatccagaacaaccttcagtaaaatggcctttactcactcaatattgatccaattgatgtaattcaataagaattttgaagctattttaattatctcaagtaatgtctcataccaattgcaattctgaagttattagctccaaatttcactcttacgggagttacgaatttaagctacaacttacctagagcaggtcccaccatcatgatctggactccaaaaattgatgatcaacctcagaagttaatttttaccattaatcatctaaaaaatagccaacttgtattttttcggtataattaatatgcaagtatacgcaattgaatcaagtagtataatgataaatagagtattgttctcacgatgattgattataattatcaatcaattaattcttcagttctatatgatgaataaaaattatggagaaagagtaataaatcaagaaaataattaaaaatagaaaaataactacaaaaagacaaggattattatgatccccaattatcctttattatacgtcctaatacaattatccaatctctcttcttctcatccaatggacaagttgaattaagtaattcataatctggttaagaattataaacccaatctatgtgaatactccctatattcttatggtaaagttaatcacaaagaaaacattaagcaaaacaacctaagaaatcatacaaataatctgcatattttcgtcctaaattgatttgcatctaaaacaatcaaagcatattaaaatctcaccttccataattttgattcggattcatagatagcaattattgattgctggtaaataattgtaaaataaaaacatattgtatgaaattgaattaaaagaagaagaagaaattgaacaattacatcaatccataaaataaattcaagtggttcacataataatccttaaaagaaattatctaatacaagtcattctaaattaataaaaattcaattaaaaatataaaatatggagatataaaagacagaacacgttttggagtctttcaatggcgccttctgctcctaaccttcctcctatgctcagattttttctaaatttttgaatggtataaaggctttggtatcaaccctctttttatagttagaatatgaagtttcccaaacaataccaaggctagaaaggttgtggccttacaaatgatttcccaaaatcaattcttcgctgacttctttttttcctgtttccatttcatttccagcgaacaagggtaagaccgcaaccttgcttaccaatctgcaaccttacaggtcatgtttcctttttctttgattttccaccttaattttggaaattgaccattatcaacctttgaccaagaatttaagagcaaaaaatgccattttgacatattttggaaataagaaatcaatcaaagctaaaaaaaaacattttctttcttcattatattttcttaattttgctcaacaagtcttgcaaaacaccaaaattaccaaaattgaagatctccaaatatttttcctaaaaaatacacaaaaacaaaaaccaagcataaaacacaccctaaattagattcaaaaagtacataaaaataaacctaacatattctttcattattttatttttattttcaaggacctccttcccctataaaatgagaggtcctctagcttatttttcacattcaaaaaagtagccataaggtcagagtatctctctctagtttctctctctagaaatcaaagctactacacttaaccatctttttgtaattatatctcgggagaataaaaactcgaagtagatgtaccaccattactgtcccgatacagggagtgaactactataaattgttgtgtctctctatttatacttaacatatatctcattctcaccaatctagcaagcaggtgtgacttagaaatctctatccatatttctaagtcaacattttggtgcttttattaagagccacaactcaaggaattcatttacaagatggttgcaatgcgctcctcaagtgtcgatagagaagacttgacatcctgccaaacaactgggggcacgcaagttacttaggctggaactaggactactcctatgcctcaggtgctaggaggaggcaccaaaaccttggaagaccctaaggaggtcgatcctcaagttgaacagctcagacaaactatggctgatgtacaacaatagctacgagattctctcaacaagcaattcaaacagtttcaacattggttgatggagaaatggcaggatagtgaaagctaatgagctgagcaagaacaacgaagagctagcctgtctcaacaaatcatagaattttatcactctggtcgcagaactacccccgtaggggtcttttcaagttggtcagagaggtcccccatcggccaattggccatgtaggaactagtgctcaaggggaaacccttaatgcacgggatgctactaccacacctggtaaccgtgaaagcactaagaaaacaccaggtgctgaggctgcccagagggatgcaaactttgagcaagagtctgaaaagactcaaactcatgggtaccaaccaatgagccttccacctgatgtggagctaccttagaatactgagagagcaaacatgactcctccaccaagtcctcttcaacactctcatgacaccaggccttgataccatgccaagggaaagggacttgcccctcaagacaatggaggtaatcaaagaccctactttgaaactagaggctatgagatctggcgagtaagaaccaatgagccacttcatactcaaaaatacttttgagatgaaagggttagttgtgtcattactttgcccatggctccgatggccaacagtatgaatacttccctcgagtacatggagaggagttaaacctaaccaaccaattcaattctctctatacttgtgatccagatgaagctactttgaggcaagtagccactacaactatccaaatgaccgctcatgccatgcatcatctcaaaaccatcgagagttcatttcaaaatcatcaccaatattgccttcatgaccctatgattaggagacaacaacaagacccaagtcgactggagtccatgatctacttggaagaccaagagacctgcgtgacaccttgaccaaaaaaatgattggtggaagcaggggcttttagaggagaccatgactgggtaacagaagttccaattaggatgcagacaaccatccacactgttaatagggtagagttagacaacctagcagccttattgatatgaatcatgacccctaagcttttagaattcatacttgacagagagcgatgctcacccttctttgatcaaatcaaagctctattaatctctccaaagttcaagaatccttcctaacatcaatatatcaagaaggaagatccagtgtctcacacccattacttcgaagtgcaaactgatctacaaggagtgagagacgatattaggtgcaaaatctaccataccacaatgacgggcctagcttagtgatggtaccttaagctccctgttagatcaatcgactcatggaaagatctagtggatgcttttggcaaccaatgtgctccttcccggcaatgccaaatcatgcccaatgatttggtagacatcaaacaatcagaagataagaccctcaaggactacattcaacagttctttgaggtagccactatgactaagaggcttagctaggatgcaagggtaatggcgatcacagccaggctcaaggagataagtcctctatggttcaaccatcgtctcaaggttgtttacaccatgaatgacttccttgatagagcagatggatttatcaagctagaagaagctgtcactaaatcaaagggctcaaaaggtggcaagaagaagtcaccagactccctatcccctgacattgaagtacatggtagtgggaagaaaggaggttcaaatggagggaaaagatccaacaatggtggaaaacaacacaactcccctagtggaaagaaagcctaaactgggggtaggcccttacaagagtacgagcctcgttacacaacctactccatcctattggccccaagagaggagatgtatatgacaacacaatccatagtgtcgtattgcaaacattttcccttcaaagagttagggaaaagaaacatgaaaaaattctatcactatcacaatagttacggtaatgatactaatgaatgtaatgagttgcgagatgagatagaatttatcatcaaatagaaacatgatgctcttcagtgatatgtacaacctaaagccccagctaggggacatacgaatctctagcctgcgctagttgtaggtatgctcgagaatgtgattagtggacttatcacactatagaaaaaatagcaacatgtcacactccttttgctctaacctaagggtagaaagccatgatacatgtagagctcacaccaccatcacatcaaaggctaacatatgaccagctaaccaaccatcaatttttggccgagtctttagatggaattgaagaaatcaaagaaaggtataagcttcaaaaggcggtgtattagcaaagagtcacaaaacattataactctaaggttaaagataggaaatttaagcctggatatatggtgttacgatgagtattcttgaacacaaaagatgcatcaacaggattacttgggcctaatttggaaggaccatatgtccttactgaagccctagaacctgagacatacaagttggcatgctatgactacaacttgaatccagtaccagtaccaaggtactagaatagggtgtatctacgatcgtactaccaataaaagcaattatcttcagcttcacagtgagattcacttcatcttatacaagtgaattgatcgcttcttaaaccaaggggatgcgacgaaattgtctctgagttaagaggtccatcactaaggtatggcccctttactataagtcaaacaaggaattagtgtagtggggatccctttagccaagcttggaggaacaataaaatctgtaactatttcttcattttcttctaactaagctcatagtaatgtaattgtatttaatttgatgaataagaattctaaacatatttttttttttagtacttcattaaaattaatcaattatagctcacataccttacaacgct

SEQ ID NO: 21169 - DNA, 3816 bp, Cannabis sativa
ggttttccaaaccagcttcttcaattcaacattgtgtttgttcttgtttattactgtttaaaaccgaaagagaagttttttcgctttaattttcttcttcttgatttgcatttcggtagtacattacatgtttaaatttcttttacatgagaaattgcagcatatggtgcacttgacaatcgaaatttattttattctgtcatagttttgagataatttgtgttttttgaacactcaggcttggtttagagaactcccaactgggattctagattctttatcacccgagaaagtaattcaatgcgagacagaagatgattgtgcagaagttgttaagcttcttcccccgatcgaggctgctctactagattgggccatcaacttgatggccgatgttgtccaattcgaagatgtaaacaggatgaatgcaaggaatatcgccaccatttttgcaccgaacatgactcatgttagtttacaaaaggtttctttttttaaattcacacgacatgacatgacatgacatgactcgaggattgatttcgtgtttcattttgttcttgcagatgcttgatcctttgactgcacttatgtatgcagtcaaagtcatgaatttcctcaaaatgctcatcactctcaagctaagagaaagaaaagaattgatagttgatccctctcccgttcgtgatttagaacctttcgatgagaatggacacgagagctcatcacaaatttgcatccaagatacttctcaagaagaggaagaagagacagtgctcgagtcgaaaacctatctcgaacctaatcaaactagtcactcgaagaacaaagaggtttcgagtttaacaacaagctcagatgacaccttggtcattgaaacaaatgatggcgaagctcaagaaagcccgagaaagagcaagaacaccggtggtcaatcgagcaattcgagtctcaaaaagggattgtcaagaaaagtaattgtggaagcaagtgttaatgagaaaaggaaagagattagaaaactgagtcggatgaattcgaggatggagctcatcgaagcatggctttaaacccgaaaaaaagaagatttaacatgaataataataataattcaaggttgaacctttaactgtttttcatgacattgttggcattttaagtttgatataagtttgtgaatttgtttttcttttttgatttgatctcatggatggcattattctcttaatatttttcttgtgttttgacttaatgtgtctttttatctttcatatcataaataaactttgctcaaaaatgttttaaaacttgtgttttggtaagaagataacaaggaaaagaggtatttctttagtgaattttaacaagtatatttttaatacaaatgggaaacaaaatgatttaaaacttgtgttttggtaagataacaaggaaatgagaatttttttttagtgaattttaataatagtaaatatatatattttgagaatagtatattttaacaatagtatatttttaataatgtaatttatgaacaaaaagatattttaaaacttgtattttggtaagataataaggaaatgaggtattttttttagtgaattttaactaaagtatattcttaataatctaatttccattatagatggacaaatatttattataggaattgggctaataaataaagtaaagatttgttgttgttgtttatatatttaataaaataaataaattatagctttttgatgatttggaagtgtgtgatttgatggtttaatacaaacaattgaatgttgtaaagctatgatgaaagaatggtcattgtcactaaaagaaatatctttgtcatcactacatatgcttaatgtgatcaaaaaggaatatttaaagaacaaaaaatcttaaatattttgttctttttaaacaaataataaatggggtttttaattgaaaaagtgaaataatgtctaagaaaaatagaagattttttatacatattatgtcggttaaataaaggaaagatattactatttttttaaaaaaactacaaaaggaatagtgaatatttataaggaaaacacacacaaaaagaaaaaagaaaaatatttcctttaagatttggtactcattaggggaatttggaagaataataattaattttctcaaaaagagaatcaaacataaaatgagaagttaattattcttaattttgtgatggaaatcaatttaattattaattgggtcaattcaatttgatgagtaaagtggatcctataatttaacaattttaattacatcctttcaaaaataaaaaataaaaaaaattcccacaaaaataaataatattgtgtgaaaattatttaataatttttttcatttctatttcttttctctttcaatttgaagggaacataagaatatgccttctgaatctttcttctttctccattttctctcctaccaaacaacaatttttttcccttatacaaacataataatttaataagcaataataccaagtttggcaacttaaacatcttatataagattagatattttaaagtaaatttaatggatgatagcaatgcttataaagtaggctatataaatatatatatatatatatcatttatgtctatataggatgagttgtacatgatcccttgttgaaaatgataacatgaatttctctatcaaatctatgatgatttttaagtcatatttgtctaaattgttatcacaattattattttttttttctactttgaggaaaaaaaaattgaaacttctatggttgaaaatgtttattgataatttgtatagtgtccatgatgtctaacccaattaaattaaaaggtgtgttatttattaaattataacactaataaaagttacaaataattctctctctctcaaaaaaagttacaaataatttttttattaccttaattagttgatttgtgttagtgagttgaccaaactttaattttcattttttgagatatattttttacaataattaaatgaaatcaaattattattagaatatgtttttacataactagagcttaaatccatttcaataattattgggtctaataattcttgaagaaaaaaatgagatataagaaaatttaaaaattaaatgcttatctaatgacatatattttgttcattccaaatcttttactttggctagaaaattatatcattttacatagttttaatttaaatcgtcattcattattctaaaaatattttttctatcttataattctgacttcagaagtagtcttgctcctgaaccagtctcattgcatactataagtaattcttgaaaatccgaaatcccaaaacttaaaaatatcataagtgtcatagcatataatgtaaataaataaaccaaagaaaacattgaaaagaagaataaaagaatggaatgggtttcaaaatagagagaatgacattgatcaatacctaaccaaatatgttgacaattagtgaatttagggattaaggcacaccctttattttaatatgatgtaaaattcctcaagtgtcctaataataagaataaaagtaagctttttcttgcttacactttataaatgcacaaaattttgaaagctttggccaattgttatgaacaaaaaagccaaaactcaattttctaatttgattctaatccaaaacaaagccatgatctcaaagggagtggataagaaggaaaagaagtattaagggttgatgtgaaagatgaagagttgaagattaaaattgtaggttcatattttcttgcaaatcacatccacctat

SEQ ID NO: 21170 - DNA, 4400 bp, Cannabis sativa
aaattatgcatgaaaatagtattttttttgtaaaataagacaaaatatcggggcgttacaagaatcaaatataatatttgaaatgatttcacaagaaaaagtcgagaaatttgtgggtgtttatatcgaaaaatttataaattttaaaacaagtcaaatattccaatactgaaaatagacacacattgatggatactaaaggagaagccgaagattttgttttgctcgtctttttggattgatgacactttaaacaacggatcacaaacaactcttttataactcgtctttttgaatcgatgatactttcagctcacaacaaatcacaagcgcctctaatcgtatttaagaatgaaaatgattaaaatgtaattaaggtgtatgagttctatcttctattactaatttatattcttgcatcagtaacatggactaattctaataatatgttgggtgttcttccataattcattataggaagtatattgtaacctttttcttttctttgttttgaaattttaaaatatatatacatattttttttcatttatccgtaacatttaatggagctaggagtaggaggaagctatgtatatgattgatgataataaatctggtttttaaagattgaaatgattagttatgcaacgtggaataatggagtttgtgtttttgatatgatattttcaatatctatcgaaaaaaagattaaggcccacgcttgtctggcaggtcagatcactaaatatgaaatttccaatacacttttggccttttacactttaaagttaaacatcaatttttcttttctttctttccatattatcctaaacaattcagtgctacttacttgtcttaaaactccattcttttattgtaaaaaaattaaatctcaatattttactattttttttatcattattaatacctctatttaattataacatctttataaagatataattaggtaatttttgaaatcacctatctaaattgagtacttgtcactaaatttttaaatgtgtgtcatgtttcgtgtgatttttttttttatttaagcgtttatatattacatcagcataacctgggattcgaacccaggacttccaatacacacgcacccctatggccacttgagctagcctcaagtggttcatgtttcatgtgatttatgtgtatatttttactcttttaaatttagtgaatgcttaactaaaagataagtaataagatagtggtggagtcccacaatgtagttattatttaaattatttaaagttcgttagatataatttttttttaggttctgtattttacagggcaaataaattctttttaacttgaataatattttttttgatttttatcaaacaatatgctaatcatgttgttcagtatttgactagaaatttgtgattaaatacgagttgtacctatttaaattctataattatgaatagtttacctgatataatttttgaataatttgagttaattaatgaatttgcatttttctattaagaaaatgaaagaaaaaagatgagtaggaagagaaaagaaaaaaaaaaaagtgagaatccttcttaaaagaattatctcaatctgccgatctatatttcagtttctttttctttattataatgtaaaaatgatataatttttaatcacattatataattttgaaaattcgaagtgaacaataccgatttccaaactacattcaggaatggatgtagatggaaaatttcaaataaagctctatctctatgtgctcttgaaatatatattacagaaatggaatcttcgatttctagaatgacacttctgttaaagaatatgcaacaggccttttttttaagctaggccatcagctcagttttctttttttttaaaaaaaaaaaataggtactaatactatagaggcaacaagatatatttatatcgaagcaatcgattttaatatgaaatcgttgtcagtccaatacattatatgcaaaaataaattaatagttgtactattctcttattggaataatctatcgatctttaatattatttcctttcaaaaaaaatacttttaaacagtaacgtccacatggtagttcggaggtttagtcctcatcaaaaattattttttttaaaaaaaatagaataaataatttaatttaatttaaaagcttggaaaactaaaattaaaaaatgtcactagtatctaaaaaaataattcctgatttcttcgtaacatccaagcatcccagcaatatattctatgtatgtgcaaaataataatgtaagatatgtgcctgccatatgtatgtctgaattgttatagcttgttcttgaagaacaaaatattaatgcatattattggtgtataataagttacgatgattaatgatttttggtatatatgaaacgttggactggtggtcgattagaataaggccgaagacatgtgaattatttggaactattagaatatttgacatgtacattttgtccatattagcattatatttatatgattcactcccggtgattcatgcccactaactctaacaataattacaaaaacaaagaaacgtttttttgttttctcttgagactaaaataaacatataagcttcattttcaaaaagatcataattgtctctggttgaacgtgcttgagtactgttttctatggctttctcattcatatattaaatgtggaaacttattaatttaacctcaaaagttacaaactaatgcacaccaaagattctttgttacatattaaaatgtttcttatttcaaggagcttccaaagatggttagatttttctcttagtacgacaggtgtgtcagcatttaaatttaccaaatgcttcatatacatgctgtcactaactggaagaaagaaaatgaaaaaaaataatttaccctttaattttcacattacaccatcttctaaatcatttaaaattttatttttatacatcaaaacagaatgtaaaagtaaattgaaaaagtgttctggtggacatgcactactgcacagatgaagataaaacaccatatacctcattgatggatgcattttttgggactaatttgaactaattttttaacatatgaaaaattatttatattgaaacacctattatgaattgtgagtatctaccactatatcgtacccaccgaccattgaccactgatttggatgtgcattcattagtggaagtcccttagactcactttcgttccgtgtagataatgttgatgcactgtgtttcaaatttatgaattaaaatagttctcatttctcaaataataattgaaaaaaaaaacctgagtcgctattgttcaaattaactttatttggatttgagtccaaaaatacatacaaaaaaaagagtgacaaataaaaagaaaaatcaataatagctatttttacaacttctaaagttttattacacaatgaaagatgaacataaacaataacaaaatgatacatacttttaactattcatagccgacatttcaaattggcaagagtgtaaaatctatgaacataaaaaccagcttaaaactgaattcaatctgatatttaaacaagacataaacaatgatccatttgcacactccagcagcagctgtgtttagtcctttctaggttttacaccgccattttcttggatgctgctcacaggagttgtggagccacttttccgattgctggattgtcctgtgatggtccttcccatgaacttccctgctttgctaaggccacttcccacagccccgagcccactcccgaccattccaacaccagtaccaattccacttcccaccatcccaactccagtgccaatgccacttccaaccatcccaacgccagtgccaatgccagtaccaaccatcccaacaccagacccaaccagtgatgccgctccatcaagagcatccattgtgcttcctataactccctctgctttaagtttctttctttcttccaagattcttttctcttcatccactgcagccagctgctcatccttgttgaattcatggtacaaaacctgaggaaagaatccaatttaattagcatatagtattggaacttgatgaggtaagaaaatccacctgtacaacatcattaagaatgagttacatcgtcaagtgttttatcaaaagccactaagactaactgatcccaaaaataataaaatttagtttcaaacccaaccttaattgtaacagttcctctgtccttcttgtcttttactttcagagtgtcaagtgatggcaacaatctcagctcaaactctttcaaagtttctgcttctagctcaatcaaaggtacttttgcaattcctaagcgcttatcttgcccaatatcctgatcaaaaacctgtgtt

SEQ ID NO: 21171 - DNA, 2738 bp, Cannabis sativa
tttttttttttttttcttacccagtgtgaagaaaatcgtcccccaagactgacttgaagtagttaacaacgacaggtaaggagtcgtcgttttcgtcacatttttggtaaccaaaggagaaagtctctttccatggtaactttgacgtgtatcgatctgcatgagcaccagaatagcctgaaaggctgccacgttttcgtcgaatactgagctttttggctaagggcaagctgaaaatggagtccatttcgtcgtgtgctgcttggatgaggctttgatcgatgccatggttgattacttggaaaaacccatggttcaagcaagctcttctgactaactccaccgctttcgctgtacccaactcgtctccgctcaagaagccttgtaaatctatcactggctcgttcagctcttcttgtgtatccactaagtccccgtgtggccacacgaactggtttggtatgtttgactgtttttggagtgagttggagtcgaatactaatgctccattatcaatttttttattttgatttttattattattctccattgatgatggaggagtacataagagaagaggtgaggaagtcgagtccatcaagagagacattttgaagaaagttggtatgaggacttcaacctatttatagatgtacattcatatatttctgtgagacaattatgagagagagaaagagagggagagagttatttttttttatgaagagagagaaagctaaaattaaatgatgaagggaaaataattatttgagcacagattttagtctacttttttaaagggtgtttttattcgacaataatagtgtacttagtagtgatatttttaaaaattattttcttaacttatagaagatggatacttaattacaaccgatatgatatggaaaaaaaatactaaacatcaataatatcttttaataattctttttttgaaatacatcaataaaattttatttcttttattttacctcatttttttattttttattttaactcgagcttttactttatttaaaataaatagttaaaattttaccgttttataaattttaaatttttttaaattgttgttgttttggtgatgtaatttgaagaaagtgatgtatgatgtaatgtaaaaatatgttataaaataaaaaaaaaaaaattgttaatatattttaaaaaatagactggagaaattcactgcttttaatgtatataaatatctctatataaaaagaattttaaaatttaaagtaataataaataatatttataaatatatgaatatttattttttcaaaaataagaaaattaaaaatttatttaaagtattgatgtttttaatttagttattgaaataatttaaaagttaggatttgaagtgaatgcataaaaaattatgacattaataatgataatagtgatatagagttgtaaaataaaaaattggaagaaaggtgattgagaaaggccaaaggccgcccattgggaaggtcgaagttattagagaatggtttagtaaggaagccaacaacagagacgagtggacgcccttaagtcctttcagtcactttctcattcttggaaacaaattagattatcaaatccgcagcaactcctataaatatatatataattaagttactctctcttctcacttatgttttgtcttttctgtgtgcttattcccaagataaacactcgtcaaaattgagaaacaactcaaaaatataggtggtatatgcaaagaaagatcaaccacctgttacaattttttaattactttaaattatatgtcgatatattttcaagctatttaaaagaaattcaaaaaataaaaaacaaaaacaaaatttctatttaactaaaaatgtttcctactaaattacttgaggctagttcaagtggtgtgtgtgtcttggagtccatgtaaaatatgattataatatataaacgtttaaataaaaaaaaaaaaaattcctactaaaataaatagaaaatgtaccgtaagaacatttgtaagagtgtcctgaccgagtactacgtaattatgtgatatgtccaacatttagtggagtgtttatgtagtgatgacaagtcgaacagcctgttgttgcacaagtgtatttattacaaagaaaagcttagttggttttgttttgtctacatgcagtgacagaaaattttattcaattaaaaacttgtattgaagagccacgtgctgtgaaacttgatgggtacaaacagtttcagcccatatgagtgggtcttatatctatagttcaaccgcaaacttattttgacaacaatgaaatattggacctgatcgaaaggtgaactatgaattattatctaaaaaaaataaagcgtattaggattttatatagtcaaatattatcaacccaaatggaatgagcccttctacaaaagagaatagctcttatagtatatcctttatgtccaacatcaattgtgagaagttcttcatatactctctgggtgtctctgttaatgtttgtaaatgatgaacaatatgaaagaatgctctgtttttctcattaatttaagaaaatacaaggctttatatacatgagaatcagctgaaaaagactaagcaaccactaatagaaagttagttgacaagaagaaagagcaaaacagaaaactaacaacttataactaactaacttacgaaactgtagcataactattgcggaagagagaattgatga

SEQ ID NO: 21172 - DNA, 6965 bp, Cannabis sativa
  modified_base (2236)..(2239): a, c, t, g, unknown or other
aattttttatttatgtatataataaaacaaaaaaatgggctttaaaaaaataggagccttgtacaatgactgccgaatacttgagccagacctaagtaagacgacgatgagtggttgcaataatggttcgatactaagtattttttctttcttctttgctatcttagttttagctttcgataacaatactgcgattcaaaatgatttggaaacttcacgattaactaactgtgacacattcagttttcagaaattaagaagaaaagttgtgttttgttttcggattgttttgacaaactattgagtttataatgtagttttggtcaaattctaaattctaaacttaattttgttttaagttttttagtattgtttattttggagtgtggtgtaatatgaggacctaaattaatcgtatggaaaaggttggagacccgagctgtagtattaactaaaaaaaatgtcaggtattaactcaatctcaatgttttaaattttcttattaatattaccttttctttttctcttttcaaagaaagcaaataattcctcacaaataataaaaaagtcaataattaatattttctgtattataattgtattataatagagtaatttgcctctaacccttccaactatcatttcacttgtacttaatcttctaacttcaaattttgatagtaaagccctccaaactgttaaactgttagcaaattaaaagtgtcattcatttatctcagttaactgctgacatagtgtaacgccctgacttgcagggacgccacgtgtgtgtgcttttgcaaacttattcctagctattctattagtttattagtttataaaaagtagggtttaattaaaaactttttgattaaatcagaataaaatttctttatgaaatataactaaaatatagggatcccttgtttataaaatttctttataacaagttgcaaaaccgttaatacaaaaataaaattacactttcacacataaaagaaaagaggttgatcctgcttctcagaagccaaaacaccacggctgatatgtacactgctgggagacttctaattcatggccgaacatagctttattcctcttacctgcatcatgaagcacccgtgagtcacaatgattcagcaagaaaagttattagatcaaaagcattgtaaacgcagatattcacatctcaatataataagtatatatatatttgtgactctcacatatccattaagcacaaccatatagtattagcatttatacattcccacatactatgcattatgataaaatcacaacaccttacagtcaacaactttatcgttacactaaatgaatatctaatcaatacataaccacacattttcagggcttcataaagcattctaatcttacatccctataaacacatattcttacatcccgtgagtcattgaagctctgcaaggaaagtgactaatttcataagtaatataacattcatcctgtcacactataataaaaatatattcaattacagctcatcacataatatcacgcttaatcaatttcacaacgtcgtaaccacacaattttggtacttcataaagtacccttaccactcgttaaccacaagctacatatgtcactatcgttgtccgatacagcaaacgataagtaagaaacctatgtgtagtttcaggagtaattactcataacggtaatgattgttttcaatcctcaccactcgttatctacgagctacgtatgtcactattgttgctcgataaagcaaacaataagtagaaaacctatcagcggtttcaggagtaattacttataacggtaatgatcgtatcttaattcattcacaataacggtgataaccgtgttcttccctcaatcataaacaattcacaaacgaaaataatcatatctcatcattacctcaattaccatctagtcacaaaaaatacatattattaatcttaatcaagatcgagtcacaacaaacacatatcgaaatctcaactataatcgagaccataacaatcatatcattaaccataaacagtgcttaatacttttcttatctcaggtctaaagtcaggtatgtgggccgacgtgagtaaaatgatgctcgacgatctcgggtcctttatcatgacaaaggtaaatcaataagggtatattccaaaatactgtttaaaatttgcataaaataacctagggttttctaccaaatcttatggtnnnnacaccctaaaataaaatacatcttttggctctaatttatgtctcatactgtagagctcttcataagcttcaaaacggtatatagaatgtctaaaacggacacccgagttcaaagttatggctaaaatacgaaaaatcggcgattcttgaaaattgaccatccggaattccagttggtgcagtcctgtaccatccggaatttcaattcactacaatagaaacttgaaaatttcagatcttcaatgtttcaaaacttgctccaaacctaaccaattgttcccaaacttcataaaataacataaaaacaaggtattcaaatcattaattcaccataattcatcgtagtgcttaattcaccaatcaacaattctaacttcaaaatcaagcagccatgaaattaaactaattgaaacctaaacactcacaaaattaaaaccaaaacaaactctaagccaagactaaacataaagccacgaaatcctagtagaaccctatctaaactaacctaaaactcaagaaattccaggggaaaagtattgaaaacttaccttaatgtttaaccaacttctatcccttgtctactcagtccaaaattgcataattaaatgaagaaagcccatagttgctgctcctcaaaagggtcggctaggaaggaagaaaagaaatgaatggtagcttcaaatttctatctcatcttatccattatttctattttatcattattgtttttttttttaattcaatattaacctaaactcagccactatcatacataaaacaaaatcactattcaattcccaaaatgactattttacccccatacaacacttgacctataatcaattcctaggggcatttggtcactagctaactatctcgccaaatcgataacttaaaattctatactagtccggtataatttcaattccgatttatcttataccttcgtgacatctttgaccacttcgtcgagttttcacagccatcaggcccgaaaatattttatttcaaaaatagtatccacgatacccccgtagtccgataaaatctccgtaattaataaattacgctttattaaccacttattaaattttctctaatagtcacctatttagcttaagtgagatcataatcttactccaacattaatacaatcacatatttaataaaatatgcccacttaattatcataataattttctggaatattacaactatccctttcttatagaaatttcgtcctcgaaatttgtctaatcacctcgggacaccactcccgcagccgtgactctaatttccatgttgcctttaatcttgttgttcatctacaacgctttagctcacgatatagtctttattttgcaatactttctcttttcttattcaaaaaccttaatcgactatttctcacatgacaaatttattcaaaattccatattttcgtaactcggtatacgaatcatatctgcctcatacttatgaacattgagtatggctagccgataagctatctaacctcccctttccagaaacttaaacagatcgatactcttgggacttaactttcgtttctttcccaatctttgaattcttttcattggaagcacttaaagaaagataaaattccaaacttggaacttaatatctctacattttgaatcagcatagctctcccatccactctataaagctaacatacgatctggaatctttttttatggcctcactcggtccttagaccgcatcaggtctaggattcctccattcactgtcttcattccaatgaatggatgaacgaaatttccttccataaagcattttatatagtaccacatcaacagtactctgataactattattgtatgaaaactcaatcagagaggaggtgcttatctcgggaacccttaaaatctattacacatgcttgtcacagactccttgagcatttagtggtaacctttaaatctcaacctgaggtaattacttttgaagaatcatagggttaaactattcccttgataaatagattagcacactaatccaccacaaacatattccactctgataaagaaactatactgaatcttatatatcttagttactccaaagtataaagaatatggtatagtatgaaactcatttagaaccttctattcaatatccttatttgactgatacaccaatcttgtttgtatcataaggtcccttcaaacaaaatcaaaaagtccattgccaaaccggtttccaagtcttttcttataccccctgtaattcgaagtcaccctactgagctattctaactcttccgaataaataaaactacaatgtgatattaataagttctccaaccacgaactcaatccctttctagttatacctctagcaacctttggtaagatattttctttctacaaacttatcctagacctcttcaatttaaagcatccaccactaatctactttccaaagtggtaaagaatcacaccattcaaatttcatttaactctaactgtcgtcactgcctcatactccttcaatgatctaagtacacaggcaataactctctcctatattgtattagaacacaatctaatctttgtttagaagtgtcacattaaattataatttcttcttattgactggcaatgttaacattggtgcaaaaggttaacttatgttttaattctttcgatttaatttctgctaaaagcataagaattcttcgacaaatattccataacatcctgataattctagaaacctctaatttcagctgctgacctgggttgaaatcaaccctaaactgcttattcattactaaatctatcaaaatactctctatggccacctcatgctctatctaaaggcctctcgtatgcctcctttgaattgaagaaaccaaaataccattaatgataacatttgcaaagtcatcaggtgaaaagttgctttgtaaaaacctactcttgaatcttcaactggtaataaccagatcaaagaacgatctcagaaaagacagtccttccctaaaattaatcatcatatcttctatccttgacaagtgaatagttattcttcacaaataaaactggtgtactccagaatgaaatactcaaactagcaatttcaagcccaacctttcctacactgaattttcacccctttcagttctataattaccatctaatttggaactttaattcaagttttactcctattatcacttcaattcagattcaatttctcgctttaccaataaccctggtggctcttttgaaaaggcatctagaaacccttggaccacaagattgtgtctcaatttcactaatgttccctttgtaatattcaacacactagctaaatattgatacatccatcccataataaaccttatgccttaaatgccacgattaatggattttaggacccttgaaccttgcccaagaacacgaatgggtcctcaccttctgattcaagagttaccatcttcctttctcaatcgatgtttgcattatactttacaagtcaatccaattcccaacattacctcaaaatcctctaagttagttcaactaaaacaaccaaccattcccttttttcccataactcgggaagggattaaaccacctactagaaaaataaccagtttttgaataaacagtaaagtaccggagccacttgataacacatcattaatttatacaaactttcaatcatcattctattctggttgctgtaactatggacagtttctttctaaatggcccattacaccaccttaaaagcaggctcaagtttagcatttatcctaatggcatctcttgcatctcaatccgatggatgggtttacaaatcttcgttcccatcacattagaaaagctttaactaccttaaattctcctactagaacccataactagtgggttagtaataatttttttccttgagatccttagggttaacaccctttacttgatccaacattggacatttactttcatgaatctgtcttcatactatctcctttgtgatctagtccttgcaccctcagcagtaagggttatctcaaccacccgatcataaaactagacaactcctagttgtttagccattatatctatattcaaagcaatttactcattccaccttaaagtcttcctagcggctttagcaaccacttcattaaaacaaaacttataccgtcgtgacatctttgaccactccatcgagtttctacagccaccgggcccgaaaatattttatttcaaaaatggtatccacgatacccccgtagtccgttaaaatctccgtaattaataaattacgctttattaaccacttattaaattttctctaatagtcacctatttatcttaagtaagatcataatcttacctcaacattaatacaatcacatatttaataaaatatgcacttaattatcataataattttccaggatattacacatagactgtctatgtgtaccatccacatgtcacatgtatattggtccacctaatataattatttaaaaattataaaaaaatattttctaaatatattttaaaattaaaaagaataatttaaatttataaaattattaataaataaataatattttttttaattctttattttctcctctctctctctcactctctctccccgagtcctcttcttccttcccagaatattcccgggtaaataaatagcgataacggtaa

SEQ ID NO: 21173 - DNA, 2609 bp, Cannabis sativa
attttttggaaaaccgtaaaaatgtaaaaaaaaaatcattttttaaacgtaaaaatgtaaatattttacaaaaatatgttaaaatagactaatacattttgtacataaacaataattaattatgaaatatgcatttatatatatatttatatttataactacctgcaaaatggatagacctgctaggtatccacgaatgtcacaattggcataaccccagcctttaagatctccaatggctacaaacatttcatgcccttttggcattctacaataataataataattaatcaataacgaataattaacaaggatttatgtattttttttttactaaaaattaacacaagaatatagctagataacacgttttcccatttcacgggatggaatgtatactgtctatgatcaattactgagccaaaacagaggagagatgtaataatgtacgacctacctggtacatagtttttcaaggcaatagacaacaaaacctgatgatcatcataatgaaattattaataataagaagagaaagtcataactattaataagatatataaaaaatatataatttacttacgtttaaggtgatcagggttatgctgcttatgcctgccgccatagacgaggagaagtgggcgtccttgtttgtcatggccttgcataaacaccttgttgtgagcaatatcagtggcaacatctgagtttgtgaagcacccaccattgggtggcatgaaagagtgtctccagcttaggtactttaggaacatttgagaggctttctcaacatccatgtctcgagctctaagaaatcttcgaatcatcaaatcatcattcacttccttacaatttgaaggatcttgtttttggactagagccctcatgatccccactttgctcttctccatttcactcatttcaactttcacttcttcttctagatttttttcttcttttacactactagtactactaattttaatctgatgatcaatctcattggtattagtagtagtagttgttgtgttgaaactggccatatctatcagtatatgtgttgttgtattcgtttggatccacagagaaaggaagagatatctatttatataattatgtgaattgataataagaagagtagtatatgtagctgtacgtagcagtgatgaggtgggtagaattaaattgacttgaactgaatttaaagaaaaaagagaatttatgatattaatctcatgatttgaaaaattagtaccatcctaataagtgaactttaattttgcacagtgggtcttacatcaatgcaagaaatgataagtcacaccaagtactacatgagatggtatattactatccatacattctaatattttctcttacattttaatttaataaatattataaatttttttaattaattataaagttattaagcaaataactatgctccatccaaagcatatttgagatgagatacaacattttcaaactaatatatagctactatattattgtcaaaatgcttgatcaaatccaaacaaaacactgtgcccccaatttcatagacaaattattaatgagaaaagattaaacattttcaccaattaaatgagggaaactacacaattcatgaactgggatgcatttatttagggctaaactctaaaatttaaatttgatgaaagattttaacactatttttttttttattccaactacaatactaaaaaatacactttattattatattgttttattaaaatttaatacgtacatatttaacaaaatttaattattcaaccattatataattattaaattttttttttttaaaaaaattatctggtatacagtacccactaaatttagtgggaccctaccatactcatatttgattaaattttattattattattaacttttttgttttgaaagcttattttatcaaaattttacatatatattcaataaaatttaattatgcaaccaatatataattattaaaaattaaaaaaaaaaaattaactggtataaaatacccactaattaaagatagtgggaccctagcatgagaaagtgtgaaatgagtttacatttttttttctcggttgaaaagagtttacttaagcttctcaaaaaaaaaaaaaaaaaaacagagtttacttagtgggacatgtaaaactctagcgactctacaaaaagtttatttttaccctttaaaatcatgtacaacccaccaaaaattaacatttttccacatttaaatttaaaccaaataataaaatgtgtacaaattcttccacaatcatacactacccactacacctctccaaatatccgtgtaagaccacactatatttgacattttgtcatcattcaattagagttggccttaaatcaactttccctaaatttaattgagcagtggtactcataaaatttgcaaagtcatccatacatatgtataaaactcattcatcaacatttctgtagcattttattcatggtaaactcaatcttgaatccaacatgtttaaaaatggacccgtgatcaattatattgttgggagaaaaactatgaatgtggttgatttttgcatatttatttg

SEQ ID NO: 21174 - DNA, 2990 bp, Cannabis sativa
  modified_base (2035)..(2045): a, c, t, g, unknown or other
ttttttttttaatttaaattgttcttttctttttcttactggcctgttaaacatgtgaaatatttagatgagaaaattttctttcaggacttgtaaactgggtaattatttggtgaagttttttaactctgttattcttgttgtatatgcagacgaagagaaccaagaaggccggtattgttgggaaatatggtaagttgtttttctttgttatcttatgtttcattgaattatcctgatattgtgagttagaacaaattgatttgttaaaagatgatggaaggtaggatattaaattatcttaaaatggttgcattataaataataatggggtattattacaagttttcaattgaggttttctttactgtgtaaagaagaattctagttatcattctaagacctgcaatagtgacaacataatctaaactctccattttgttctgtttatgattgaagatttttgttttaccgcttactcttgtttttctatcacatacactaaattaatggtgttaatgatggccttaatttacttcaggtacccgttatggtgctagtttgaggaagcagattaagaagatggaagtcagtcagcacagcaagtacttctgcgagttttgcggaaaggtagatttcttatccctgatttcgtacaatccttggtccggtattgcatacacgaaaactaggtttagatgcatcaaatcatctaatgaaaacttccatgcttttgtagtatgcagtgaagaggaaggctgttggaatttggggctgcaaagactgcggcaaagttaaagccggaggagcctacaccctcaagttagtacttaatttataccttttctaggattaatattccaagtttagtttcttatccattccttcttatttttttgcagtaccgcaagtgctgttacggtcaggagcaccatcagaaggctcagggagcagactgagagctaggaagtttcagatttctttgttgtttttcttctttttaccaagtgttattgtgctacaagaagttttatatttaatggaccaaattttgttgtctattgactatgtagattgctttctattttgatatatgattgtttactactctgagctgtttttaacttatgggttccaatttagttattttttaataagggaaatttgcagcaaaagccttcaaatctaatctcgaaaaatagcggtaatagtttttaaggttatgctttttatttaaacgttagttctaattttaattgagttgtttacatttttaaaattgttacgtgttgaaatattattggtccaaattgttattttgattttaaaaaataaaaataaataaataaattatttaaaaataatttcttttttctttttctttcttttctttgtcgtcttcttctcattgccaaaataacctaaaactaataaactagccctaattccatcaccttcatcttattaattttttgtctcccaagcttgaagatgagtcttaaacatgcgtctattggagtatgaattcgtcgaggttattcgagctttaatagtagccgaggaggaggaggaggttaatagattcgggtttgggttgccgatttgggtcaccaagcagggcagggggcaacagatatacatcaattattgatacgacccaaaaccctatctcactcctaaaactaaattatataagaattcataacataacaacttaattaatatcaactctgggatttcaagcatcaaagtacctgggcggagctagaagtgatcactggatcgccatggctgccattggaggattcctggttactgtactcttcatacgagcagagaatatcatctgtggcaaaatcgaatcctttggaactggagttgggcctacccaacgatccaaatgccatagcttctaagatcaagagtggagaagggtttcaaaataccgagaattagggttcgttagttaggagtggacgaaaaagacgaagaaaaaaagaaaaaagaaatcatttttaaattatttatttatttnnnnnnnnnnnttttaaaattaaaataataatttaaaccaataatatttcgacacgtggtaatttaaaaaagtaaacgactcaattaatattaggactaacggacaaataaaaaccatgaccttgaggactattaccgctatttttcgaagttggggacttatctgtatcaaactgaattttttgagaacttttgtcgcaaattttccaatagataactaagctgattctgcgtagttattaattgtgattggatgtgagctctcatgttatttattattgaattgattttgttttagttaaccattagtatgtcgaggagatatattttactttttaaatcaaaatatgcatacttcattagatagaatcacctatcaaaatagctcccagttgattgcttctaaattattatggacaattctcgaatttgaaaagcgagctaaccaatcaggaatgtcaaatgagaattaaattgaagattttttttcttctttattattattattattatttgcacacctccgttaccttttgagaggcctacgccccatagaaaatgtgtacctgagactgtcccttggcccgtaggtcctgacacaaggttagaactattgttgttgttgttgttattgttttttggtagaggaactttttgcaatattgataatatggaacattgttaaaaggacaataacatgatagggtacagaaatagagttgccttatcaaaacaaatacaaattaaacgaaatattaagtatgtaaaaatatttaaaataaaatgttaaaattatgcttacttttttcttaaactttgtcctagattaaggcgggtttggctcgtgtttagggtcaactcattctaagggctcaaataaaaaaatatcttttaataaatataactttttttgggataattacataaggcacaattttttgtaaaaaaaattacat

SEQ ID NO: 21175 - DNA, 2834 bp, Cannabis sativa
aaaaaagttcattcaggttttgtcatgtcaaagtttaggggaaaaattactaattagcctaaaatcaatgtaattatttttagtaaaagttaaagttattattttagacctttttaaaaaaaatgacaattttagaattctgtactttggagtacttaaattgaggtctagcatatttttgttgatcattattgaggttttttcatttttacactttaaaatagttttttttagcatttttactgaattctatatagaaactcctattacaattttagagctgcaacctaaatcgcaacaaaaactcgtataacaacttacatagaaaccaccggagaaactactttagaaacctctacgataaatttaaaaaaaaatattaaaaaaccagtatatgaggtaattccccaaaacggggataatgtatgtaatgttactaattcatgtttaaatagttgtcctcgtcagaggtactaagctagtcgacctttcatggttaataggaattgcttttggatgaattggttaatggaagtcagtatgagtcaaatgagcccacccacaacaacacatatatgccaactagtttaaacgtgtaaggccacaaatatcaccacccgtacggaatgttagaataccatagatataatgtattatgatttttgcaggattggtcaaaaaaatattccaatggtaaaaagaaaaaataaaactaaaattcctctaataaagttaaaagtattgttgagatataattttcattgggaataggtgccgctttgtactccaacttaaaaaatatataaaataggattgattggtgtaacacctcaacttccacaatagtactttcaaattccacatcattttcatttaggttttgctaaattgatcctcgtgtttatgactatattctagtttataataatgattgtgtgtgtttatcgatcggttgatcatttcaaatgcaataaattaataattctcttaataataagacgaaactcttctcccacttggaaacttttttattattacgtttaacataattcatatcccctttcaaattctttacgtagtaaaatattttgaatcatatattttattatagacaaattttcgaaaagcttctatttgtctccccatacattaacattcagcaaatgacaaaatcagtgatggtaaaaggcaaacaagcacagcttactcaatcgatcgaactctcgtttagaatcacatcaactttaggttaattacaggcatattacatttattattttctgtaccatcaattaacagtaaaataaaaattgactttgacaaattaaggtatttttatgcttcagcaaaattctatatatttatcaaaatttatacagaagtaatatcaattcaatatactcaatagacatatatatggggacaaaataagtgtagaacttttctatatatttatatttttgataactacttggtattgtatgttactatttgaaaaaaaattactagtcacacttaattattatttaaaacaaaacattatataaataatataacataaatatgtataaataaacgatattcttgcaaattgaaaaacaaacttaaaaaaataaaaataaatgaacattaatgtgctattcttcaagataaattctagattcaagaagaaagtaaagctccaagatctctataactctttgaacgaaattaatcaagtgccaaatccaaataagaatgaaaaatcctaaaaaaaaaaaagtaagaatatgattttttaatcaaaatgaattgtttcattttaattaagcgtgaagtatatatgttggatttaaattttaaactaaacatagctaggggagattatggagaaaaaccaatacaaaaggtatacatttatagcatcaccaaaaacattaataaatacatattgataagtagaagacatgacaatgacatatatattggagttaagctttgttggatggtgcagcatcaattgcgtcctgaatcctatgaatacaagacttatacaaaaatcccaaataatctacaatactctcctcacataacccatcatagggattaacctcaaaagaccactcaaccagagttgagtcttccccataatccaccactttcagcctattcacagagccatctaacccaacaatattggtggcctccattctataaacgtagctacacaatggggtatccatatccatatccatggacaccaacctctccttgatccatgacctttctccatcttcctgtggaaacatgaagcctgatataagcctagtgtaccctggaatcccttctttcccttccaactctgtgcatctttccaccattgttatccactcccgtaaccgcttcgttttggacaccaacccccatactttctccgccggagcttccactatgccgctcacccttcctcgccactttgccacctctttcttgtcctcaatttcctgcaatgatcatcacatgaagtaattgtaacacaatcgaaagaaaaaggaataagaatgcacaggtatttatacgtaccatatgatgagtttgagcctttattgtttcttgttctagttatgttttgtgtgaagaactatatatggttagtgaatcatgagatcagtatttagaatgaataaatgtttttgaggttgctggtaataaatttgtagattctcatagtgtgtaatattttaactaacttttgggttgttacttatttggctaggggagagtactcctaggatgatctctaggaatttacaacatatattatatttctattaaaacagctagctcttgctaca

SEQ ID NO: 21176 - DNA, 1766 bp, Cannabis sativa
ttattattattattaaattttgtagtaaatttattatgtaaaaggttatatatttagttagcgaaaatctgtgttaacaataatcaacctgaattcttatacgctagggtttctttgcaacctagccaccaaaggtcttggatttaatatcagccctttcatgggctttggcggggctctgatcatgagtgattgttatgtcaaggagagtattctcagtgacggtttcatgaggttaaattggaggtcctttcctctttttttcgtctgacttctcttaggacggccatgaacgttgtttcatgggatgaagacagttctcttgctcgtcgtctggttggttttttaaggttctttttctttggtgatctgtaggtcagtcggagtcgtgctaggttggggatggctgctttagatttatggaatggcctggcttctagtttctttccaatctatacgatgggtgggagactagtcaattgagggatcttgctctagttgggattgtaatctgtttcgagttagtggggagtggtgtctaattattttttgtacgactgctgcggtggagttttgagatagagggttggttctagttgattattagtgtcgagtgggtgggggatgagttaggtttgttgggatcctaattatgcggtggtatttcattttttttattgttttgtttttcattattatgttaaattttttagtcacttcatttttttttctaataatggtgaatattcaccaccttattagattaatagggtttgttatcgtcttggtgagagatgctagttttctttcctattgatttgctggtctattatcaatggatctaaatttctttggcaaggacgtcttggtctctctctttgggcatcaaatctgggggatctatctttattggccccttgttatgagcttcaatctttcttgatacagcacttcaagtgttatttcccttatttatgatttaaataatggagttattatgtcccaatttttattagaagatcattagctgatagtcattgatatgtggattcggttaggggttcatttaattttgcaatctatcatacttcacacttctttgatgtttgatcgttggtagcttattggatccttaattgaagttgttattaaggttttcttccatattattataacggcttggtatgtctattctcgatgatttttctctttgaactatatcttcatgtaatagattttatctgagttacttattaataattttttttttcaataaaagtaaactttcattaaccggcaaaatcaaccagtacaatattacgcaattcaggacttaactgataatcctaaaaagtacgacctagggaaaaacaagaactacgcgccaaaaaatgagcggctttgttcaaagatcgttcaacaaactgaatagcaacatgactcaaagaagctaaagcaattctgcaatcattaaccaataaaccaaactcacacggcatatgcaactcactctggatagcctgaacacagaaccaaactatcagttttcagcagaatattttgccaattatattgttggatccatcttaaagcttccttgatcccgatgatttctgcaatctcgcctaacaattcccctcctgcttgtagtgaaggcctcaagaacttaaccagcatggttacgggctaagcaacccatcccaaaacggctaacatcattaaatagagctccatcaacattaaccttgatctgatcagaaactggt

SEQ ID NO: 21177 - DNA, 4053 bp, Cannabis sativa
aataatttccaacaacaacaacatccgaagtccataaaaccaaaagacccccacctaagcctattcttgggacctcaaaaacatgatcaaaaggaagactgcgacacaaactttctccacggccaacagcacatttggtctccataaaaaaaagaaaattaggcctatagtttttcacaaaaagggagaggttacggaatgctcgagaactccccaaaccttgagcattccaactcaaaaaattcatttttctgggcggggttgctccgcaacacccgcctgttccaatgaattgttgaaagcagaagaaacttcagcaatagtgggtccagctcgagcacgtttgagaatattccgaagagagtcaccaaccaccgtagttagaggaagaaaggcagctctcttagcaccagcaacaaccttacctttggccttttcagaaattcgggggagaaggccctctgtagtagcaccctcattacttcactcactagtaataatagcagcatgctgaggagtcgtgacaggcaagtcacagaggacagcagaacggatttcaccaccatagataaaagtagcctagttggatggagaggaattttaaggagcattcaaggaaataggcccatgatcaaactcagccgtggttccaaaagaaacagcaacaaaagacccggtaccaatctcttcagtagtaagaaattggctaacggctgcagcaagggattggtccacattttcctgatgagaagtaagttcatcaaagggaaaagagttggacagatcgaaagggttccttttgaaggttgacttggcagaagccttaagaggaattttgtagggaagagatgatgggaaagaatgatcatcacatttcttaagataggtgatacacttagtaagtgtgtgatcgaacattccacaatgatagcagatattgggaaagttttcatatttgaaatttagccacttctcacgatgaatacttttgaagtccacaaggatacctcgagtaatagatttagatacgtcaataagaacacgaatccagaggaaaaggccagaaactttcaagagagtaagtttatcaacttccaagaaatcacccacctcatccccaattagcttagcaagcttcaaagatttttgaccaaaagggatagagtggacttgaatccaaaatggtgaatatctaagttgattgggaagaagagtatcaaggccagctgggttagcacaagtaaccaagcagtgatcaaagtgccagggctgtcgctcaagaactcttctcatgtctccttcacactgaaactccaccatgaacattcccgagccatagtttgaaaaagtcagaggtgctcgagtaacccaagcattcctcatggcatgttcaaaccattcgggtttgatggttctaggggaaaggattcgaaaaaatagacagatgggtttgttattcaggttaacccccctagtatcatcttcaagatcatgaacgacaacctctttataagtgaggtttaagatttcagaaatattaagggctaaggaatccattatagtgtaagggaagcaacgagaaatcaggaagacaggggagaaatgaaaaaccagtaaaagaatgagtaaagagcgccacagaaaccagaactttaaatagaggaaattaaaatacctggagagacgaagcttgtagaagaaagatttgcaaagatgctctgtaagtcctttcagtaaccctacaacaaccccatagccgataggagcaatgatcaccacctctcttgggttactcaaaacgacggcaatcatttaagagaaacaaagacaaacctaaaataagaaactaaagacaagaaactcaccaaaaataagatctattagataataaatggggatctagagtaataaatgaagattatttgaaaagaaagataataagtgctcacagggaacggaaagtcaatccccaaacaaaaccaaaacaaaagaaaatcaaactagtgcaaggcaaaccaaaagaaacaacacggtagtaataagcagaaacaattaaaacgacaccatgaaggtgaaaaaacagacaggattcgatccagaagaaatttgggatacaggatgagaaaccagaagaaatggtacacagcccgctagaaagtttcagagctttttttattattattattatttgtgtgaaaagaaaaattttggtggccaagttttgaagagtgttttaaatgaagctttggaatgtcttaatcctcaagttatcttaatgcgcaattttcgtaactttataaatatatgtttttgtgtgtgggtgagatgtgtgtgagaaaaagagtgagccatgaaaagaaaagtaagtgtgagtttgtggtgttgtgagagtgaagaagaagcaaatagtatattgggatttaggtggagaaattgagatagtgagtgtaagttccatttggctaagcttctacttttgcttatagttagaagtataaaataagtataagtttagacatatttttattatttggatacctattatataaagatctttttagtatttttcaaagcatttaaatattattaagaaaaagatcttttgtgagtaaattcctaatttgccttctgctgtttgtaatacatcatgtaatagtgtccattcttggcatgctagacttggacacccctctatgtcaactacaattttcatcattaaaatgttacacgttaaacattctactatgtttttcccatgtacaatatgtcatttagccaaacaaaaaaagcgcctttctcttccagtaataactttattgcctctatttttgatctcattcatatggatatttggggtcatttcatgttcatagcgtggaagatttttgttattttttaagtatagtagatgaccatagcatattctgttgagtttacatgttaaagttaaaatatgatgctcaacatattattcttcaattctagagtttggtacatacacaattttctactaaaataaaagcaattaggtgtgactatactaaagagttaaacatgtcatccttctttgctcacaagggtattcaaactcacaattcatgtgttaaaatacctcaacaaaactcagttgttgagagaaaataccaaaacatcttaaatattgcaagggccttagcttttcaatcttccctggcattggcatgctggccttatttcattaacaatgatgtatacctaattaacaggactcccacacctcgattacaacataaaactttttatgaattgctttataataaacaacctacttatgatcatcttaggacctgcggttgcttggcctatgcctcttccctaaccaataagaggcataaattttctccaagaggacatgcttgcatattcattggttactccaatggtatgaaatcttataccttatgatgaatgcagatttgtacactcattcttagtcaagtattagttaaattagtatttatttcttaagttttgtataaatttgatgtgttttctatagtgcacagtattatgcataaagtgatgaaattatgataaattagaagtgaattgtacatatctgagtaaaatgccaaaatcaaggagcagccgagtcgagaaacaagctgaagtatgaaaaattggtgcttggcactatagcacagggtgtaggtgctatagcgcagctctggaaaaaataatgtgcgaggaaaaaaaatgatatttcagcacgtggtcattttgggatatttttcatggtgctatagcgcagcacttatgttttttaataagaaaatcctaattctaagagaattcatctatctttattggcctatataaagaagggtgtaaatcgggttggggtaccactggagagatagaacaagtaactttgcgattagaaaacaccttgaagagcgagaaagaagaattcgaagcaatcatcatcaactttcattattagagttcttttcttcttcttcttattcttttgtttagttatttaattatgaacataattattatggttattat

SEQ ID NO: 21178 - DNA, 3167 bp, Cannabis sativa
ggtttatcaaattatcaatccgttaatcatgatttaatggttactagcatggctgaccaattttatttaaaataataataataataataagcatatttagatttcacacttttattcaaattaatttctaaaaaaagggaaaaatagatccattaagaagcctaaaaattcaagaagaagaataaaaaatggtagtaaaagaaagtggcttaataataggagaggaagaacaactcacaaccaagtaaagtgagcttgagtttaattggggaagaataatttcaaaaataggcatttaacaaccaaacaaacatgtcaaccagacacagcagcaatgagcgggttatcaccagttgccatgcatcattttcattttttgttggctcacattacattaatcttctcttacctaaagaccaccagttatatataaatatacacatataccagaacaacctaaatgctcagagactccttcattgtcctttgcatctcctctcttcctcttttgtcaaagaggaagcctaaagagaggagtgccttttttcctgtgtaaatttttaaatataatatttacatataagggaaggttatatatatttcatcatggctgatatctctttagaagatgttaagaatgagaccattgatcttgtaagacattcaatatatatatatatatatgtgtgtttgtgtcccatttatatttatatttaatatattaattgtttgtcaatgtaggagcgagttcctattgaagaagtgtttgagcagctgaaatgtacaagagaaggtttgacaagtgaggatggagagaggagactccaaatatttggcccaaacaagctggaggagaaaaaagagagcaaagtgcttaagttcttgggtttcatgtggaatcctctctcatgggtcatggaatctgctgctatcatggccattgttttggctaatggaggggtatatactcagagcaaaactactctttatgtttttttctctttcactttctcaaatacataaggaaattattcttaaccatgcacagggcaagccaccagattggcaggactttgttggtattgttgttttgcttatcatcaactcaactatcagtttcattgaggaaaacaacgcaggtaacgctgcagctgctctcatggccggtcttgcccccaagacaaaggtatataatgtccattgaataacgatatggattgatttttcaataagatttgtactaatcttcaataaaaaaaatgaaggttttgagggatggaaaatggagtgagcaagaggctgcaattttggtaccaggagatgtgatcagtatcaagttgggagacattgtccctgctgatgcacgtctcttggaaggtgatcccttaaagattgatcagtctgcccttactggtgagtctctgcctgttaccaagcatcccggcagtgaggtctactctggctccacatgcaagcagggtgagattgaggctgttgttattgctactggtgtgcacactttctttggaaaggctgctcatttagtggacagtaccaatcaagtcggtcactttcaaaaggtaagagtgtcttttatttgtcgtggtcagccaacttcatgtcaagttagtgacaaaatttcactgttgttttgaattgtttgatcaggtgttgacagccattggtaacttttgtatctgctcaatcgcgataggaatgttggttgagatcattgtaatgtacccaattcaacacagggcatacagagacggtattgacaatcttttggtgctcctcattggaggtatcccaattgccatgccaacagtcttgtctgtaaccatggctattggttcccaccgcctttctcagcaaggggccatcaccaagaggatgacagcaattgaagagatggcaggaatggatgttctttgcagtgacaaaactggaactcttactcttaacaaacttacagtggataagtctttgattgaggtgagtaactatgctcaaactttagtactttatagaagaaaataattgataatttgagcctttgttataacaacatgtataatgaatgtattgcataattgtaggtcttcaacaaggacatagataaggacactgtcgtcttgcttgctgcaagagcatctagggttgaaaaccaagatgccattgatgcatcaattgttgggatgttaggtgaccccaaagaggtaaaaagatttttttccctaacatcatttcgattctatagcaattgaagcatcctactcttgtttattcttgttggtgtgtgttataggcaagagcaggaatcactgaggtacatttcctgcctttcaatcctgtggataagcgcactgcaatcacctacattgacaacaatggaaactggcacagatgcagcaagggtgctcccgagcaagtaagctaaaatcctcctcttgatcaaccatttgattatctccaagctttgatggaaactaaccatatcatttcttttatgtgcaagattattgatctttgtgatctcaagggacaagtgagagaaaatgcccatgctataattgacaagtatgcagagcgcggtcttcgttctttggcagttggtcgacaggtaaatctagcacaagttactttattgactctattatctgaagatgaaataagttttctgattgtaatgagttggattgtacattatgtcaaattatagactgttccagagaagagtaaggagagtgctggagggccatgggagtttgtaggtctcatgcctctctttgaccctccaaggcatgacagtgctgagactattcgccgagctcttgagcttggtgtcaatgtgaagatgatcactggtgatcaacttgccattggaaaagagactggccgtaggcttggcatgggaactaatatgtatccctcgtcctctctccttggtcagaacaaagatgaagccactgctggaattgctgttgatgagctcattgagaaggctgatggttttgctggagtcttccctggtaacaacaatattgaaatattgataatcaatgatttatggtatttttctattcattagtattaactaatttgatatatttttcagaacacaagtatgagattgttaagaagctacaagaaaggaagcatatctg

SEQ ID NO: 21179 - DNA, 2410 bp, Cannabis sativa
ttaataaaatgaaatatttaaaactagtaactaactaccctttaattggattggtcgaccttttcaccggtcagagtcaacatactaaggctcatttagtatatatggttccttgcaccttttggctttgattacatatacatagagtcacagtcacactcacactctctcccttttcttctccattaagccttgctttcaattaatgctttggtaataaataaaatacaagtcagaaaaagtcatcctcttttatttcattattattattattatttagaaagaaatagtgaatattatttattattggtagaggtcatattccaatgttgcatgctctagaaaaatcagaaatcaacttttgaagaaaggtagatctttcgtagagtgtatgtatagtgacaataaaataataataaacaaacaaaaaacagtagacaaaagtaatgatgctatattattaaaagataaatgttatttttaaaattttaaattgatattatataatattattgatgttaggatttttcaaaggagcagtatgtatataaaatagtttaataataaaaattatatatatcatgagattataattatagcattcgtgaaagatgttatactattaaagtattttcagaagtgttgagacagctaatgatggtagttagagtcgttagtctgttagtttgttacaggttgttataatttgttggttgctgatgtatgcctctaatgttgtataaataagtactgtttacaatcctaacaattcaatgaaatcattcttttcaatttcaatctttttctattctttttctctctttctctgttctttctatctctttccttctctctgttcttgtcttctatacaatgtcgaatagacttaatatggtatcagagtgggacttttctccattgacgaaaaacatggctacaatcggagctcaaactacacagaataatagagctgctaatctaccaagaaacagagcaacaaacgagaatcccacacctgtctagttcattcacagcctctcaatacgccttaatgatcacaatttcttgttgtgggaacagcaagtccttgctgcaatcaaaggtaacatgttgaaaagattcatcttcaatcatccttcagctcagtatctcaatgatgaagatcgtgcccttggaaatacgagtccggtttacaatgactaggaggttcaagatcaacttcttgtttcttggctcctctcctctatgactgaaagtcttctaaccagaatggttggatgcaatacggctcaacaaatttgggatactctggagaaacattttgctcttcaagtttcttccaagattcttgaattcaaaaccaagttgcaacagattaagaaagggaggatgtcattgaacgagtatcttcttaaagtcaagcaaatggttgatcttcttgctttggtaggtgagaaactcagtgcacgagatcacattgctactatattcaaaggtctgcctagtaagtacgatacttttgtcatctcctcaaacacgagaattgaaggttactcggttgccgagattgaagcattactcctttcgtctgagtctagaatcaagaagaaagacactgaaattgacttgagtgctcacatggctgtccaagattcagacatcaatgctctaactgaagctaacatggcctatagaaatttcagacagcaacagcagcctcgacacactgcaaattcagggagcaaaaatgtctttcgaccaaattaccaccaaggttcttcattgggaccacctccaagttcctctaatcacactccatttaataatcaattttttggtcgaggaaatatgaatcaaaatagaattggtagattaccccctgcacctgctaatcacagacaacagtgtcaactttgtttgaaattaggccacactattcatacatgtttctacaggtttgacaaatcttttacagggttggttggtaccacacccactatagatgttgccacatcctcaaacattgttgctcaagaaaacttggctgctgctgctcaagaaacagatgacagttggtaccccaattttggggcaaccaaccattgcacacctcatgtgaacaatctcacaaactgtacaagctatgatggccttgagagaatgtatgttggtgacggttcaggtttgtcaattactcatattggtcaatctcatttcttaaccaagcacactaataaacctcttgttctaaacaatctgttgcaagtttcagaaattacaaaaaatttgtttaagtgtatctaagtttggccttgacaataatgtttactttcaatttcatcatgacatgtgctatgttaaggacgagttgagtcatcgtacacttttgatggggaggcacaagaatggc

SEQ ID NO: 21180 - DNA, 3593 bp, Cannabis sativa
ggcatcttattttacgtaagtaagtgcgttacatctttagagcctccattggctctcttcttgctcggttttttgggtggggcatctgaggtgccaaaggtaaacgatgtcggtgctcccacaaatgatttattagtatccaacagagggattgaaggtcgaagtagggcagtggaatggttggcaatgaagttggatgagttgcctgaagaactggagtgagaggaatggctaaaacccaaaatcagagacgtttgttggtctgatatgttactcgtggtggtattgagcaaggcagtgaaagaaggtacaagttcaatatgtggagtgggaactggaatagtggtatggggtggagtgttgttccagggtgaggggttttgtttagtattggcattagcaaacatgtaaagacctgcaggttgagtggaggctaagtttgctatgaaatttgtcaattgcagtgacgaaaaaatcactgggctaacttgggtggagacgcataagccactagctggatataactgactccaatattttgcaccaatagaaaaacacacaaatttgagttataatacagagcctctcttccttacaaatatccgttagaattatagaggaaattacattgtatacctactttattttatttgttttttttttttacttgtattttcatattctttaatatatacccacttttatagataatatatatccccattataccttttatgttaatataaattatgtactagacttaagtggatggtaaaggtatattggacaacccacccacaaaagtgagtacattttaatgaaatatagtatgagagtatttttgattaataaatataaaaaaaaaaaaaaactatatttctcaacttatttcaaaattatatgcgaattaattatttcaattttgaaaatatcttctcaaaactactcttttcaaaaaggtttttagaatttcctaacttttactaaaaagaatacttttaaattattaaattatatttttatttttatccacacaaactcgtacaaggtaattttgttttttcttgattgtaaaaactgaaaaagatcacatctaagtcaaaccagccattaaccagctataatataactgagaaaaatagctagaattgtaatttccaaattaatcgctattcatttatttcataaactctcattactatttttttgaatggaaactctcattactatttgtataacatattgtagtcacacatacatgatcaacattatttattcttctcttatcacctatatatttatatatatataggaattttgtctcacgggcagaaagtgatgagatagttagcaccaaagcacgtaaaggtgctgttcttatcatcataagcgtagctgtaagcttcagggcatttttcctcgaagaatttagaaaattcagttggaggacacgtctctggcttgtcattcgcccctttacaacagtacttgtcctcgttgaacttggcacaagcgctaagacacccaacgacgtcgtttccagatttgacctggaactgagccgggcatacggcgttgatgttgaccggacatgatgactgcttgcagtcgcctctaccgccttgcggggcaaccgaagcggccacattgaagccgtctacattgctgacgtcgtagtagtcttttccttctctatcttcgatggtgaattcgatgagtgtggccggaggttttccagtaccaccgttgcactcgaccttgcccgtgccgcagtctccagtggcgcaagtgaacttgccggaggggtcggctgagcatcgagttctggcccagaaacgacctttccaaagtccctttggaatgtccaccgatcgggttgcaccgggtttcaactcgaagccagtggttgatagttggggtttctggtcggcagttagggttgctggccagataggtcttggacagttgtttttcatggtgatggtagccgcatttgctcctgaaataatatccacgcaatgcaccattaatatttatatatatagattaaccaaacatgatttaatatatattattgcaacgtataaataacatatatatgtacatttatatataaacgaaaattcatttgtatattattgcaagatatatgtacaccttatccatcagtttttactattcaaaaagggtccattaatacatttaattaaaatatatatacatagaaaatgaattttagatatttactataaaagagccgaatcatcattaggtgatgtaatataaaatttatttggtatagcctaacccttaaatttactgaatctaatagtgatcaaagtatggagacaaattccaattagtttttttatattatttattaatttaaaatgtgtgtgggatgtgaatgcttgatatttaaggtagcccttagcctttttctatatatttgcaacctgccatacactatacaagtagttagcaataatataatcaaccaaattacatgaacaaagagaaaagaaactaataccactataatgtagtgttattcatttataattataaggaaataaaaataacaattgtcattgtttattttagttttgaggtgaagcatatcgggcgtaagatagcaatgtacaattaaaagaacaagcattgaaaaaaaaaacaaatttatttttacctgcaacaaagaaaaaagctaaagctagagagaccaaaacagttttcattgtgagcgaataatatataaatagcttatattactttgtttgatatatatgtataagtgatggattgagttttgattcatgaattgagaggaagcataaggtgttatttataggcttaacgaacccattttcttgggttgggtgttttagatttcttagtaaatttcaattgcgggtctaacttgctatgatgatttaagaaaattacaaacggttgtaaaattacaaatatattgtgatatacgtggccggtactcgattaatcggctagttaaatcgtcaaatatgttctgtagtttactcagaaaaaatacatacaaattagatgaatttagaacattcacgccatcaacgttatctaatattatattatatatatacgcggtgaatttggagggtcccttcataagaattttttatttgttttaaaacttgcctctgtctgattataaggtagaatttcccactaagatcagatagatttggcaatgtcccactgagtctattaatacgaatttttcataattactcaaaataaataatctacaatatttaatattcatatttctcctacatttacaccatcttgtttttcataaaaataagagaaaaaaataattgcatacaataataaattaaaattcttaagcaagtaaaaataataaaataactcagtaaatatataatatataatcatatacttagagtttttatagatataaattctgctatagttcaatagcacaaaaatattacaagaatatattgagccggcatattaaatatttatacaacccaacaaaaaattattacaaaatatcttcttaagagtttttataaaatattcaatccaat

SEQ ID NO: 21181 - DNA, 2686 bp, Cannabis sativa
aaaattattaattacatcaaaaaaattatctctaaaatagaaacaaaatgcatttgaaatagctcgaggaattttattttttaaagcaagtctctttttttttttttaagaaaatcgtacttataatagatagcaaattaattagacctctcggtcattacataataggtttacaaagatagttgaaaatggaatacaactaaatttcttgtgggtaaaaacccatttagccacacaaaggagaagacctgaaacaaaagaaagtataattgagcccaatgaaatttcgtcccattaaaagcattgagaagtaccatcgaatcattctctcaataagaagcttaattataatatgctcatcgctcagttttcaaatcatctaaatcagagcacaaggttaatacaacatccccactattttaagtctatgccagatatcccacatgaatgatccagcaaatatggcaaatatccaacctcagaagaaatttcattgggctatcgttgtttacgctaaagttttgatcaaactaaaactcaaaaccataaaatgtccgttaagaatggtaagaacataaaaccaacatttataaagtgtaatctagttccttggcatcttatatttataaaaatgttttggaaactatgatattttcaactgtcgaatcttttctccaaagatgtataaattttgctgaaagaagataaacaataaacgacccagttacctcaactactgcatatagagtaaatgggtataacaaaaatcataatagcatccactaatataaaaccaagaggtaagaatacaacatccccactattttaagtctatgccagatatcccatatgaatgatccagcaaatatggcaaatatccaacctcagaagaaaagttagaagacacacaccaacccctccctacaaacgaaaaaaatcatctcgccactcaccacacagccatggttgaccgcgttagtagttttaaaccgaaacaacactcatgtgctgggtgcagcttcctttttctcacctgaagcaccgacttctgtcgtatcagcagctgcagctgctgccggtttcccatctccctttgacacttcttgctctgcaacacacatgtaaacattacatttctatcaacaaaatacaataatcccaacatagaaggtgaacacttctaaatgatcagccaccattttacttaaaagcaattaagagctttttaatccagtaggatcgaatttgaataagaaaaaatacagctggcctagttaccttcgtcgtcactatcctcaaaatcctcaggcatccccattccacccatgccacccattccccccatgccacccattccacccatgccacccaggccttccaagcccgccatgccaccgagggcttccatgccaggcatgccacccattccgcccataccgcccatgccgggcatcccacccataccgcccatgccgccaaaattctgggaaaataaagcaagagtcagtataagcacacaatcagagctacttcagatacaagaaagcttgtgaactgatgaatactaaccgagaaatccattccccctaaatctgcgtcaccggcaggagcacctaattaaaagagcaaacaaatcatcatatgacaaccctgaccaaagccgaaagtagaaaaaatgacaaatagtattagacattagtattaccactatcatcatcttcatctacccacttatcccaatctactttaacattgtggggtgtctttccatctccacgcaaaagcttcttccaccaagccttctctgccttctccaagacacagaatatactcctcactccaacattaattttgctttcctataccatgcagaaatcacaagtccaacagttaaataagattcccaattaacagtgtacatagtacaatgctactagaagtaagcacaatttcaaccgcttacctccacattgaccttatcaaagagttccaatttcagttcataagcttggttaccagaaccggcggcactagcagaaaaggtaaaaactccttctgggtcaagatcaaccttggcgtcttttgcatcaggaagtagaactgtaatataaaccttgtctactctctgggcccacttcacttcaggatgacgactacaaaatttgcgtaagtctaattagagggcgcatcaaattgaaaaggcaacaaaataaatatgcaactcggatggtaatggacttaaaattatcaaaacaacaactataaatacggaaactaaagataattacttatacacaagactcataattaccaactcgttattttggtctacacaaataaaatagcctgagtagcattactcaggctcatgggctgcagcccaggattggataagtataataatcaccttccttgtaaaaacataccacttccaaaaacaacatacaacaaagtttttgtgagagagcaaaaccacaaactcgatcgcaattgaaaacaaccttaaaatcaccatttcagaataatttccaccaaaagacatcaaaatgaataaaattaccgatatatacatatcaaattctccccttaacaaaaaaaggacagaaatgagttacgccaaaatcaaacaaccatttccaaactttccatatttcaacatcgtgaatcacaaacaccaaatcattat

SEQ ID NO: 21182 - DNA, 3028 bp, Cannabis sativa
  modified_base (256)..(265): a, c, t, g, unknown or other
  modified_base (689)..(695): a, c, t, g, unknown or other
  modified_base (2987)..(2995): a, c, t, g, unknown or other
tgtatacttcatacattcgatactagtaaactttgccaatgccctaaaaatgacatagcacttatccaaggtgtaagtatacctatcgcagattatcatggctgtccaaatctagtgaactgacaaatcatggaaattaaacttttgaacatataatcatgaatatattccactgtgctgacaacgctataatcatgaacaaatacataggttctggagttaatagaatttatacatcaaacataatcatgaaatnnnnnnnnnnaaccatgcaacataaaattatttctgatctttattaattagtaaatctgattataattaaataggttttatttagggcacaaaactcaacatggcctcttcttggtagagctatggggaccgactaggtcctgtaggccttaacttgccaaatgctgtagaccatgacaaaacgtggacaacaagccatgggctacgaattgggccctaaaagcccaacagaatggctgaataatatctagattcagaggcactttagtcttttgtaattatctaacaacctatgcaaatatctaaggatttaaattgtaatctactatttagggctcctatataaaggcctaaaccctatcctagaaacaaaagtcacttggcctccaaatcactctaagcttgaaaccgtattctctctctctctctctctnnnnnnntctctctctctctctctctcgcgtctcacttcatctctcgcatgcctttaaggttgttcatctctctcattagagatctgcctacttgattcatgctgtctatcctgatagagagctatatcagatcccacctatagcgatctaaatagtattatctcttggtatcaatacaaccaaaagtggagtaggtaattacccactatcacaagagagacaaacgtctataacaactctttgtgtttattgcttttcattcttatttgtgtaatacctggcaagcattagatccatacgaccctactgtctgttgaatcacttttcactttttaatttttaaggtcgtcaacagtttggtgctttcattaagagcatatatatcgtattttatcaaacaccgcgattaacaagagaagaactcttgtcgcaccatatgcatctttgggtctccctcaagacccacagattgttggtccagatactcaagttccattcacaactggaatcccgatgaacattacagatgtggtcactacagttcgccaaacagatacaagaatcccaatggatccaagtggcagacccctgactacaagggaggatcctccataagtgcctccaacaaaaggaataatccttcggggcactccctaagagcaaagaccggccttcatccccggtactatataggagagacgagaccaggaactggcgaggcccacgtggacttgggagaagatgtccagttagccagacttagagagggcgtcttccaagtcagcctaattgaagtaccacacactgctgactacgatgtatttgcttagtagagactctaattccttgaagaaccatgcgctactagttgcgatgtgctagctcaacagagatccaaattcctaagatggatggttaaccaagagtacatcaatcaatcttaccaagcagggttagatcaccgcaacaaagaggccgacgatgtgataaggcagtttaaccagaaaactgataaaagaggccaagatctcatcagagatccacttccaagaagacttgttgatggatcagggaggatctattgacatgttgatcaacctagttccttaagaactacgatagatcttccattacaagaggacggacagacctttcttcaaaggtcaaatgacaaaaactgccagatcttagcaactagcagcatggggggctggccaaggatttagggctcaacgacagcccccattattcatcctatggccggccaaccaccagcaagatttcccatggctaaaaagactcctccagaagtccccatgaccggccagattcctctagaagtccctatggcttgacaaagaagagcactccctccctaaggggagcgagtcacttgaagagcaatttcaaacgaacgaggactgggagttggtggaaacacacaaaaaaccaatttgagaagtgaaattaatcactttagatagctggatccaccaagctccaacaattggtgtgatctagcctatgtcaatgcacaagctccagtagctaggtaaagaagagtggctggtgacaaggccctactcagcttagggatggccgaccatgtacaagcaccaaactgagggatggctgaccttaattatagcctctcccaaggtatggtcgtccaggctctggccaatttgaggctgcagctcaatcaaagaaggccaataaactaggcccctacagtaacagatccttctgtgcaagcacaactagatcaaatatgagacatgcttaagggcctagttgatccaaaaccttcaaaacttaagctagaaaagtcaaggggatcaccattttcagcaaacatcaataccttgcccttgcccaaattcaagatgtgagcttggaagatgtacacgagaaaagaagaccctctagtacacctaaactactttgagatcaaaatagagctcctacaagtatctggagatgtgcgatattgaatctttttggcaactctagctgaaataacccaacaatggtatttcaagctggccacaggaagatttaattcttgggatgagctctcccgagagttatacattcaattctctatttcaagacaaataggtgtctgactagaaatcttgtcaaaataaagcaaagataagatgaacccttagagaactacatcaatggttcatggctgaggccaccaaagtgacagacctgatagaataaggtcgatatacgaccatactcataagcatcctaccattgagtgacttcttgtaacaccctaactannnnnnnnntattacgtgatttttaaacatattgtgcagctc

SEQ ID NO: 21183 - DNA, 2459 bp, Cannabis sativa
aaaaaaaactttattttatatttgtatgaaaaatgtacctaagatataactctttcacttatattataaataattagttggctccaaacccaatcctgtgcataaatgagctaaatctgttcttagatcctcctagctgagggaaaagaaaaaaataaactccctttaaaaatacacattttttttttaattaattttgaaaatatcatattttattttctaagtaagtgcctaatttttttttcttatgacccactaatatttagggtcaaccctattatcgataatttagttttaataatatttttagctataaattttttaatcacaacataagaataataattaataattagtcacaacttttttacttttaattacaaattttattgtaattcaaaataaaattttttagagtgaaaattaactccatatctctcaaatctaatcatataaggcaagtttttaacaattaatattccaatgtaacaaattcaactacatatatgcattacttcttccgaatctttcataaaattataattataatctttacgattaaatcaatctattttgggtgcatgcatgtatgcagcgtaaaaagaaagaaagaaaaaattatatctagtgttcattagggcgggttaatcataagataatttaggtaaaacctaaaatcttacataatttaaaagggtaatatataatcttttttaataatatgatatgagtgatatacattataaagtatatttcatatattttcaagaaggaaaaaaatcttcttcatctaaaatttattactaatgtttatattatattccaattaatctaaaattttacaactattaattaataattaataatttttaaataagaaattttatgtataaaccacctctaaataaaattataattatatttcttataagtatacttatattttattatgattatttttatgacggttggtttattattttatgaaaaattcttataaataaattaaagttgatttataaaaatagtcgtagtgtgatgatgaataatatgtgaaaaataatatgaaataaaaaagatttaaatcttattaataaaattttaattaattaatgtatcttttaagtaaaaataaagttttaataaattttaataaaattaataattttgtcaaaaaaaaaagtataatttaatttttgctcaagcccttattcaagcttgagagtttgatagaccctagtgttagtgtctacagtctacactactactatttaagcgtttatgcaaattaggaacacaaaatgacttttgttgagaaattaaataagcccatacttatcttatatgtacagtaaaacctttacatatctttacatataattgcggctaaattaattgtatagtttattaattgagaggatataattaaatagagatattggtaaaaaaatttctaatttctaaaagagaaatgctaaaggatattaatggtgcctagtatctttctatgtgtgaatatcgctattggtccaactaagtatcaggtcttatataatttaatataatagcttttagggagtatcgctagccaatcgcaacgcgacatgtcgagaaagtgctaagcactactggtacctaatagcaatgctctttctaaaaatattaattttaactataataaattctgtaataattatgtcagaaaaaatctgtaataattattattcaaaaaatatttgtataactacatatatagatgtatatagagtgaatagggacaaaaatgacacttgaaaaaatataacaatgtatattttctcaataggaatcttaaaaaatttataactaattaaaatcgagatataattttcatcaataattacctcatattggactaaagtatgtaataacttttattatatactatatatgttatacaaattttttaaaatggccgggccgctctattgaatttgaatgaagtttctcttaaaggaaaagaaaaaaaaatcttgcaagacttataatcaagttgtggagagaactttctttattacacacaaagtcttctaaagcatacattgcttttattgtcaagtgggaattcattaaaaaataatttgtccataatgtgaacaagttgcactatgtcttgtcccaaatgaaaatttgagataaatgtatatgtatatcctcaccatcaaatcaaatgaaaaggcaaacaatagtgtaactgtaatacttaaatcttgaccgttgttcaaattttaaccaaaaaccccatatagtatttggttatttggaatggattgtgttaaattctagtcaattatcatcaagagtcttttttatatatagtttgtagataaaaatagtacttataaaaaatcatgatgaaaatgagatgcatggcacaagtggcatacaaatcaactagtgatgaaataaaaatagtatat

SEQ ID NO: 21184 - DNA, 1723 bp, Cannabis sativa
  modified_base (1566)..(1571): a, c, t, g, unknown or other
attttcgttttttctaaatttttaataatgaatgatgaatttattcatattaaatcataaagagacatgtagatagagttagatatgtagaaacactaaactgatttttaatgtttcataatagttacattacaattgcataaacattttgctaacaattatttcgtctgattgaacccttcgtctgatgcaaccttcagccagccaccctcaacaactttcgtctgatgcaaccttcgaccaaccacccgacaaccaccctgcaactatcgtctgattgtgtaagtgatagtgtaagaagtattttggtaattaaaatcacataaaagatataaatattgtctacacagagatatattttataaataaaatatcaatttatattttccatataataatttattagatatatatcttatccatgatgacatactgtacatatgttattaataattgtaaaaggagtaagtcatgtttaatttttgttcttggttttttgtcctacttcgggacataaaacactgagtccaggattttcacagttgataatcaggacaaaatcgaacgaggatcttaaatttttccacatatcttgaaaagtgcagcaattgatgagaatggttgtgattgtggaagtgggatagagctaaaagatctcgtatcataatagttattattgccaataacttctttatgggtcattgcggttaagccgcctcatctttatttttttctctttcataagctagctaccaagtaataatattgagacaacggtaggtttttggtcccctttgctcgaaggaaactgttcaaaaaagcatgaaataattaacagagtcagtcaatatcttctaaaagaataaaattacaattgtgtcagtgcactatctataaagatgaggtttccatgagagtgaatactgtttatgattcacgagagagatctctggctcttaatatattttgactctggctcattgcaaactctataatcttgaaaagtagatttgttaataacttttgaagttaacagctataatattatatgtgattgcctcaaaataaaagaacttgtttcggagattactcactttcatcaatcattgatagatttcaaatatatgtatgagacactcgaaattagaggtgttgatcaaaccgctcaaaccgtcttcactgcaaaaaaaaatgcggtttgaaattctttgtggtgcggttacgatttgaatttttcttaaatacagtttgcggttttgaattgttaatatgccgttcaaatcccaccgtaccgcacaattataaaaatacaaatttttatatttatttaagtcaatatgtgaatgtttgcggttttgaattgttaatatgcagttcaaatcgcaccgtaccgcacattataaaaatacaaatttttatatttatttaggtccaatatgtgaatgtccaatctaaagtccactaattattgtattattaaaacttaatttttttttatttattttcaagccttatggtaattttgacaagtgttgctcaagctttgttgtatttgtgatagtttannnnnnggtgatagtccaaaccgcaaaaatgcaaaaatcgcaccgcatcgcaccattttttacggtgtggtttctccggttttttagttttgcggtgcaggtacagtttgggaaattaaaaaacccgcgtgtgtaggttggtttgaaaaaatagtcaa

SEQ ID NO: 21185 - DNA, 3804 bp, Cannabis sativa
aaagtcaaaagattactagaatatgaaaaataaagcacatacatattaatgttctgaattttgatgaaatagggatccgtttcgtccgtcaattaaaatttcaaacaagtcacagtcctatatattatctgtttgtggattttttggtgttgatttttgagtacctgtttgtattcattttcaactcccagcagtagcgtaatacgctttagacattttgaaagcttgatttttaaattactccaaatttaaataattaataatgtccaagatactatacatttatatggatatttgtgatatatatatcttagaatattatttatataaaaataaatgaattatttgatttatgaaatatgactaatcattttaataattaattaaaatattttatttatattcagatttaattaacaaatatcttagttacctatttaattttttaaattaattgtcaaaataatttgacaactaatatgacacaaattttaatggaagtctcatctatataaatatagggtattagttgctcatattcattcttcaatcactagtataaaatagatttttgatgtcagttcgaggaactattttttcttttagaaaaaactgatactagagaccacctgaactctaaggtgtcgattcataacgaacacctataatgactttaagtgccagttactagtctatcactgaaacaataaccgagattgaaaaacgctaaaaaataaatatacatacaaattaagtataagtgtcggttcataatcgccactaaaaaagatccttttgtgttggttataaactaacacttatacacacttttcggttataaatttaaaagtggtttcgaatcatgattttagtatgaagaccacgttaaagtatgaaagtttttggtaaatttaatcatgatttctatattttttatgcatacaaatgttagaaatctctttatatacattataaactaatctaagcaaaagcccattcattttgatattgaacaagatgtttttcagttgggctaaaattatagtacgtgttcatggccgagagtttcgataattcaaaatggttttatacgtgttcatttagattaaaaacatgattaatctctttccatattcatttttcatttgatctataatagtaacggtttgaaaaaccttgaaaatctaaaaactttcttataaagacgtttatagccgaaaaaaattgtgaaattaaagtcgatattttaggtgtttttgatgtatgaaacatacatggatatcttaatttttgcatttagattcaattggaatcgatttcatgagttttccttgtcagagttgatatgtctaatcaagtataatgagtccgtttggcacaattttcgaaaaagctaaaagttactttttaaaaaagttatatatgataaaaaaaagtttggtacgctataaaaaaacagtttattgaagaaattatggaggagctatagctaaaagctaaaactggtgtcattcgtgttttcggaaggatgacacgtggatttctagagaattatcaaccagaaatcgcctgggccaaggcccttccacataagaaggcctcgtctagacagaagttgggctcgagcccatttgaagcctaaaagcattgcctccgaggatgagacttacctgaatctagaaggcttctcgcttttcaaaagacagaataagcaaaaccctctgcatgaacattgtgatgcacttggagaggaattccaagaggtgcctctagaagccctttgaggggtgacgtggttgccctctgactcccgatcccaccaattcagactttgtctcctatgtccgaacatgataatgcgtacactaccaaaaggaatacatcctctttgtccaatgatgcttatctaaaatttttgtctactgtggaagtactcgcgtgtgacacctgtccagaacgcgtgggccccatctgtacagacaccttcgccccacgagctagaatcatgcagtgggcctcaagtaatgtatttcatatatttatcccaatagtgggcatagtttttacaataaccataacaggtcacgggtatgcccagatcttgatcttagcttataattacctctttttacctacaagaaaatggggatggggaaactctaggtatattttctttagaatttcttcttcgcaaagtaagggaaacagctatagtgatatattaggattcttcaacttgtaagacttcattataatacattaaaagcctttaggctaatacattgtaatgatcgcctttaggcaattagcgttaattattaatttttttttataattattcatgaatttatttaattttgggtcccattattaaaagtgggcactagagttataatttctcaattccagagatattattaaactctatgggtattatttgtgttagatatgaattgtgctatttttaacatttttgcttggcgatgacgaaaaatgcgatggacggccatttgagtcacatgggtaagtctagaatttttttcttagtgtgataaatatttgagatagatagaataacatgtttgagtggggttatggattttgaccattttaccccgaggcttgcattagcttacgtttaagctttaagggcattttggtcatttggcgatggggattaggtggctgcttgggagagtggcagctggccacaatgttttattttagccaagtaaatgaattattgagttttatccttttagagaaaatagagaaaatcaaaagaaatcaagaactcatcacccttcctctctctcttgtgctcgaccaccacacaactagcatgagaaacttgaattcacctcttttttggaattttaacaaggatttaaggagtaattagtggaagttaagccctagaaactcttaattaatgaactccttaagttctacttggttttggcatgtaattttaaagtataggggctgttagagtttgaatgagttaaagtccgatttttatattcaatttaagttagaaatgggttcttgcaactggtttttgagtttggtgtgatggatgcacaagtttgagtttgaaaactcaagcttagttcatccatggcatgttttaattctgtgtgaatttttaaattctatggctttgaatatgttgtgggaggtcaatataggtgttttggaagctttagtgaggtttggacatggtttgagcaggttttggattgtttggagaaagctggtgtgaaccggttaaccagtttgccaagtcttgtaaaaccagttaaacggatctgggacaggtttcccgaacaatccatttcgtcgattcgtgtccattttagagccatggttgggtaattccttgttacttaggtttcaattgtctatggcggaacctttagttgaaggttagggtttcttggattagggttttgggcatgtcgtttactcatttatgttttgtgattagggcatccatccagcatgaggtttttcgttcagattggccaactcaattgaattcggaaatgaggtaagaatagcatagaacatatgatatatatatacgaatgtatgtatgtatgtatgaaatatatatatatatatgcatgtatgttatgcttagtacaataccaacacttgtatggaagtggtacagagtgcattggtataatgtacaatgtttaagagtacttacggtgttaccagcacaagtgtgggaaagtacagtgtgtttggtacaacacttagtcgtactcagggtacgaaacaaaccctaccaac

SEQ ID NO: 21186 - DNA, 2786 bp, Cannabis sativa
gtaaacagaattaactgttaacagaaaactaacataactgtttattatacagttagtataagacatatagaacttaatacatacatatagtggattgtcctgtgttggagtcacttctgaattggggatcacactccaaagttgagaaaattttgttatggaacacaaaagcgctttttgagaaccgtagaaattaattttcttatggattggggatcacctcttttgtttgtttattccaattcattatatttcaagtcaagacaagacaacaagagatgaacatgcaatctcagcaataaaaatacttatataaggcttttggagaatgtgttttgggtgtggatatcgagttgcagtgctccaagattctaagagtttttttgtaaagaaactcaagttgtacattgtaattaacacattctgagtgatgtttttactttctgttatatttctcatctggtttgttgtgtcattgtgcttaaatgtttcttgattagaatttgttgaaacacaccaagggtctaacatcaataaatagtattacattattctgtaatttgtataataaatttgtagcagtccttatatattccactaactaacatcatattatattaagcaaccattgtcttttttcacaacattacacgtgattcagcatagaaactcccaagtccaaaataaagtaacaaataaaatagattactgttgagaataatggacagaattccaattcccttccaggactaatatttgtgagaaaatacaatgggcacacattcttttttgatgtgaaagatcagtagcaatcacaaaacatattcaaaattttcagatatctttcaatgcaaatagtacttcacgaataataatcaaagcaccaaatgcacaccaaaaaattatctcgtggcaaataaaaattacgataaccttccactataacaataattggtgatgcaatggaggcttcaaaggctaatttaaaggataagaaggaccttacgaaactaactttgaggtggaacaacgatgttgttggggttgatagttcacaaaaagagttagatgtacttgagtcacttcgacaccatacaaacttgaagtgtcttgtgattgaaagttatagaggtacaacattccctaactggattactgatcatgcgttttctaatttagtgtcaatcacgttggaagattgtaaaagctgttggtttttgccaccactcggacgggtagcttctctgaaagatcttagaattgaaggatgtgacagtgtgttatcaataggtgatgagattgatagcagtggtcctcaattcaggtgtttagaaagttagtattgaaaatatattgatgtggaaagaatggtcatttggtaatgaatctattcttgaagaaggtcaaatattattccctcttcttaaaaaacttcatttgtctaaatgtccaaagcttaatgttgggttaccttgttatcttccattcttggaacgtctcactatatggaattgtgaagaaatggaggttttgcttccgagaactattcaacagactgtcacagacagccccaccctttcttcattacatacagataatgaattttcctgtgttggagtcacttctacattggggatcacactccaaagtagagagtattgagttatgggacataaaatctctttatgataacagtagtaaatggaatctgcaaagactctcttgtttgaaagaggtaactatcagtgggtgggaaggtgaatcgtttcctgaggaagggctccttcctatcactcttgataaacttgaaatctatttttctagcaaccttgagaccctaaatggcaaggcctttcaacaactcacatctcttcaaacattgaatattcataactgtccaaggctgcggtgtatgccagaagaaggactgcctacatcgcttactcatttagaaattgatgaatgtcctttggttgagcaacggtgtgagaaagagaaaggagaagattggcctaagattcaacacatcaaacaagtgtggttagattggaaacttatcaattaaatggtatctttaggtggtaagtaaataataagggtacatttttttacagttttatttatcatcataccaactaatcatcaataattaatctaaatagataatcgttccatctaaattttatttctagcttcgctcatgatcataaatgttgtttgttatgtatgtatagggtgatcaagctaagaaagacgtgaatttgtgggtggaaaaagagaccaaaggtttgatcaaagaaattttgtgtgagagagaaagattaggaccaccagtactctgtgttgcaaatgcattatatttcaaaggtgcatggcaagtttctttcaaggcctccaacactaaagagcacgagtttttaccttctcagcgaaaaaacaagccgaccatctttcatgaatgctcatcatgtttaccactcctactcctccaacgatcgtttcaaggttctcaaactcgaatatcaaagagtcaagaaacagccagtaggagacctcttaataagcctcctcgaatatcatgttgaacagtcttctcggcttgttgtcttcactggaccacttgttcatccaagaaactaattattagaaaaccattttctcttcttcttatgattattattattattataaacagaatttgtagtgttgtttgtactttgaaacatttgtctatttcattcgctcaatactttaaaatagactgatcaaatctgaaattactgata

SEQ ID NO: 21187 - DNA, 2261 bp, Cannabis sativa
taacacaatttaaacccatccgctagagatggtctaataaagagttatgccacaaaatgaccttgtagtgatacaaaagatgacataatcaaaagaaaaaggtgctgttggaaatcaatttgttattctgttactcaatgtcatctataatagtcattttatatattcaaagctatagctagctactaaacatagcctatatgaatatgacccctttattattggtcaattttagtttttggtcaattttagttaatattggattattactttcatctaattctatacttggtgacttgaatgaatgaaatgacagtgtgaatatgactcatatagccaagcactttttttttttaactattttattgggactgactaatgattataagtaaagacatttcccaaatttaactttatacgtcagcactttgaccatatgctaatgataataatcataacaatgatcattctgtgaaacacaaaatcatgaatccagggactttgaatcctgctcacaatcaattaaaaaaaaaaacttcaaaatagtaacacatttctcattattatcatctatctactagttgaatccatcattattatatatttctagtgaattccctatatatatactcttgaatgatacattcttttaacttaaatgtttttctttgaaaaaaaaattaaaattgtgtagcaattaatttttccattcattgtgattcttatccagaagaacatgtataatacatagacactacaacagtatgtatacatattaaaaagaaaaggagattttttatatttacactttaaaatatatatattttttttatatttttacagaattttacatggaaatttttagcgttgcaacttaaatcgcaacaaaaaatcgtgtagcaacccatatagaaactactggataaaccactttaaaaactcaaaccgtaaatttaaaaaacaaattaaaaaaacagtacataagataattctcttaaaaaaaaatcaagaaaaaaaatataaaaaattaataatttaatatttaagtatctttactacatatatgagtgaaatttaaccaatttcagccgaaagaagatttattttttgctgttaatttcagccgaaaagaagttggtaggaaaaaaaaagaagaagatgtgtttttttttcctaaaagatttgaaaaagaaaaagaaaagacggctggtcaaggaaaagtgattataataaggaaattttatccgaagtaaaataattgcactgtaactgaactttctcttttgtctccaattaatatcaatcatcatttcttctctgcatatcataaatagaaaaactgctatagaatagtgctattgaatgattcatataattaataaagaagaagatagaacaagatcgaagcatggtttaattaaataattctaccaccaacctttgtcactcttctttatatatatgattataattatatatatttgtccttttatgatgttatattaacaaaatactcaattcaacaagtttatttaagttttctttaaactattaaatatgatcaatatactaatccaatacttaattatttaattatgatatcatccaatctaaattatataaatgttgttttcctcttaatccttttctataggattattatatatatgtacatatttatctgtccttttataatgttattaatacactatgttggataataactctcatgataactttaggtgccataatgttacaaatataatggatcataatattttatacaatcccttgtaagttttaattacgtaatattattcatttccattattatacacatgcttgcaattgatgaactctctctcggatcctaattgggtcttgatcatgacaaaaaaacacatttaatatagcaaaacttgaaaagaatcttttgactaaaaacaacatatataggttatgttaatataacttaagaaaaaaaggtgaaaagttcttggtatatgcaaagactatttaattcatttttttttttcgtaaaaagaggtaaaataattataggattttacagcaataaataaataaataaaagttgaaagtgaaagggatacgtatcaaaatgtaatcatgcaaatgagctatatataaactttgaggtgatatagatgtttgtcactcactcttttgaactaataacattatgtacatatacatatatcaatatatatatatatatttatatatatataatcagtgagctt

SEQ ID NO: 21188 - DNA, 4845 bp, Cannabis sativa
tccaaatccattggatgtgatccaatgaacacccctactaccagttattcttctcttcatgttatatgctcttacctttgtcaacctcttcactatcctactcaactccagtgttgcatgctacttccgatgaatttcgtgcatttgtccaatccacaatccgaattgagaatttcactcaaatattctccttaaaaaatttcatagccaaaaacacttgccagagtttctgatcaagttcttcacatgttttagaaagctttcggaaagcatacctattctctgacagttaagaaatgaacaaagcaatgtgaataaatatacgaatgaccatagaagacagttattgtttctgaatgaggattttcagtggacagaatatcttcatttcagattaacttcccaaaaattggcctcataagatctatgggacttcccttatttttcggacaattgctgagaatctactaatagctaatgggtgttaaccgctactaagaacatgcttcacgactgagaaaatgacctactcaagtatacaatttcaaattttcaatctctcaataaagttgggttgatttgataccaaataatgagtctatcctcataataattcacccaagttctaagcttaaacccaaagaagattagagctaaatttgaatttaacccaaccttttgtacatctacagctataatgaaagagctgcatcaactacttcaatttcaacgaaggctctttttaaatcacttcttttttaagagtttaaaaagttttgtcattgtttttttaaaatagtaattccggcagccttgtcattgattattatcagttgaagcatttggagatagcataacaaggttaagctatggatcttttgctcgagattctgagaatggtatcaaatgagttttcaggctgattaattttatttttagcaaaaaaaaaaaaaaaaagagtttccaggatgattagcatcccaagtataaacagtaattctttgatagtaacttattagaatataaaaaactttaaataacatactatgacataattctatagtatatttcatatttatacatgccattttaatttttaaagtaaccataaaagaaacaaatacatgggtcaagatgctaagacaaaagcgttattttcttgaatttcttattgctgaagaaaaagcatcaaatttcgttgcttagttgatatacacttgctgaaggagtacaaaaatttaattaatagtgtgcaagataaagtaactttaactactaaaaaaattggtaatgatctccaaatccttccccaaaaatgagtaagtaaaccaattatgaaatcatattatgggcttccaaaatataaccagaagcttcaaaaccagcattcctggtcctggaagtgtgtttgcaatatgaactttagaatgaatcttcaaaataaccattgtagtagtatcccacagaacatgtttgatcctacctagtaaaaagaaccaaatatctgtgcctcttgcacagctagaagctaatctcgcgtatggcttattactcgcatatatcattcttttgaacacaagcgctctgaaaataatacatatgtaaacaaaacaaaggatgcataagtgaaaaaatccttttaggttcatgataaccaccaaaaacacaggaatactatgcaaaagacaattgtgccagatagaaatgaacgcaaatagaataaaggtttggtgcttacttagatattcgtaagtcaggatcattgaagttccccacattgacatgctgaaaaatcttggacccaatcctctgtaaaaacctttccagccctcgtcatgaatcaagcttttgataacttgccttgcattttgtcccttgtcatgtccgatcacctttggtacaagaggtaattaaaatacagcaacagatatatctatacagcaaaatattttaaaataaaagtttctgaaacaatataaagtcgctcccttcttggctctataaaagttgataattttttacagagtagacttcccaatagaatgtccactgagcgtgtaggaaaagctacttttcaatgtcatcttataagtaacattaaaataaatgccaaaatgcctcttaaaataaatagctaagattaccataaaaaatgaaaaaaaaattcaagttaatgaatcaagatggcttgtaaggcgaaagaaaaaaaaattaagaacataaggtttgacatcagctgaattccaagaatgcaagttacctgcaatcgtgtcttgatagtgtccaatggggtcgttatgcaggatgctgttgcgccagcaacaattcctccagtagcttgaaccaatactatttttctttcgtcaggaactaacgaagaatcagacccgtggcctaagaagctgcagtcataagcaatcatccataagtataatacatatgcctatttcctgttgctcaaaagtaatttggacattcagatcatgtttggttgcaaaaaagagaatagaaaagaatatatttatagttctttcttttgtttgattgcaatttaaaatacaggaatgtcattataatagaataacatttcaccatttttgttaattggctattcatacaaatataaggagaaaatactaccatgcttatacagtatttcttaaagaaataaaataaaatttgttctattaatttttactctatttcattttctctacttattctcattcttctacttttactactcccaacccagagaacaaactagtatcttgtatcttcttatacatattaaattggaataacttaagtatggagtagactccaaatctaagtgaagcctaacagcattgcctttcaattatagccactaattaattactagccaaaaatttcaaaaatcaacatcatccccttttgttgtactgatacttggtgaagtctgggaacatagcaaccatttagaatatataaacttaggtggcatttggttggaggtaataaaatggaaaggaaacactttattccattcatttatttggttgcattttaaagtattacaatatcattctaatagaattactttttcatcattttggtagaatgactattctattttgaaaagggaggaaaaccattccaatgcaaaaatgagaaaaaacttgatacttttctgattaatttttttatgcattttaaatttaattccattctattcctattcctgttctcattctcatttttattcctatgttttcattccttccaaccaaataccaccttaatatctagtggagtatcatttcttaaaataaagatatagaaaacacctaatgtataaagatacattgtcaaatcttccagtagcataatgtataaagtgcaatataaaagaattccattgctcacctccagatcaagcgctgacttgaaccataacttgcccaccaaacagcactagagggggaataagtcataacagaaagaccaaatcccctgtacaatcctcggatgccatcagccttcacaatcttacgagcaacgtccaaacccccattatagtttgcttggccggaatatccttgtaccatcaacttttgactaatctgataagaatcgtaaccataataaaaattgcattagcatacccagttttttacttctcacatatgttgattatggtggtggctcaatagatccctagtagacaacaccaaatccaaattagttcacaatgcatatcacgggcatccactttttcttttcttttcttttgttaacttttttggttgttctttatatcattgcattaagtatattatttagcactccaaatgagatggcatgaaaaataaagcaacaaataaacaccttaccacatcaattggaacaaagacagcctgagaaaaaagagaagcggtcatgcccgctaggccatttgctatagctgccttggttggttctgacaattttactggttccaccaacttgaaggctccaacttttgtagtctctaaagcagtaagaaatattatcctggcaggaacagcaccagtgatcactgtgccaaagcctttgtaaagtccaggaatcccatctcttcttagtaagccacgggcgatagaaaatgcattcctttcaactgcatcctttgaagcaacctgtagcctggttttcacaacactaacagggtacagtgcaactgtaattcctgtaaagagaccagctcctacgacataaaatttagttttgtcaagcctgcagaagtggatgaaaaagacacaaaaatcaggaacacaaataatccaacaaaaaggcacagtaatcaataaattgcacaagaggctgaaactaacattaagagggcgggcaaaataacaaggacacacttaaaacacaggaaatagaaacaaacaaaacaaagataaagctcccaaatgaccaagaagaaaagacatcataaattttaacgattaagatcaaccaaaagtttaagcatcctttttcctgtaccccctatctacacaagtacaaatagtgtttctcatagtaaaatatcaaactcgaagaagaatcaagaaaccacaaattcaaaagaaacaaccatataattgaaattaactttatattatattaagagtatatgtaatgtaagtaggtagaaaatattcataattttcgcaagtaattaacaatggctataagccaaataaactggggggaaatcttctcttttatttcattcatttctaatatttttcgtctcaaatcgatcaaaggtgcaattttacaatttaaagtcaacccaaaaagggttcacaaaaaggatagcaagacaacaatttt

SEQ ID NO: 21189 - DNA, 4096 bp, Cannabis sativa
atcttaccataaaaaggaaaaattattttgtcacctaacttgccaaaaaaggactttacaagtagaattaacagaaaaactgtaggtgttttataataaaataaaatgaaaaaaataatagtttttacttttaataaactgggcttgtaactaataacatagttttttaacgtaaaaaattgtttagactattatcttaagcaaaaagaaataaacgaaaaataatttaagtgttatttatgaacgttagaatgtcttctctacaaaggtgaatgtaagatgatgattgtgaaatgactcgcacaatattatcttggaaactgaaataagagggattatgtacaaattttagtgatataattttatgtgaatgtgaaatttctatcttaaattgtaatgataaaaaggaaggtcgtgatttataagactaattttctcataatgaaattgtggtatagttcctctaaattaaaaggtctctaatatcattcgtgaaaagttgtctttaggtgtctcccagaccgtgttcctagatagctaacttgtccatctcagaaggagtcttctggaatgatagtcgagtccggatgggagttctaggatgactatcatgtccactccgggttcaatcttcaggatagatagcccttctctagagaagagttttagctggctagttgtccctcctagaatggtagatcaggatagtcgactctagcagactataccctattcggaagtgtcttcaacaagtattcttggtccgtgagtccgggagctcatatatgttcctggaggctttgttacttaagctgacgtggagacttcgctcaaaggagagttagttaagttagttatttcttgcagctaccaactttaggatcttgatcctaagcctatataaataccacattgtctagctattttagacaacacgagagatagagatgatattaagagtttgagagagaaaagattgagaggcagagagaggtgcagagaaaagagagagagattgggtttgagttttgtaagaagaatcttttgtagatgaagaagcttttgggtgtaagtgtgagaattgaaacacttagggatgactcaacagagaatctcttcttgactgcacctattcttactcaatcaataaagaaagattacagtagtgtttcagaactggagtagagccatagatcacatcgatctataagacttgaaccaatatatatcttggtgatgattttttttttttattttatgcatttattgatttctggttttagattctctgtttgctcctattttttgttcgattgttgtttttcgatttgataatcttgtcattgctaatcgtttgattgtttagagtttcaatgatttgattctgcacatttagttgtaattttttccacaaaaatatttatttgtcttatattgttttgcctgatgatttaataaaaacatagataataaaataataaataaagtatgaaaatgattgtgcatttttaattgaaaaagaaattgtaaaaatgtgactctttattctgtgggcaaataagaaaatattttgaattattttgagttttgagaaaaaaaaaatataatatatattgaagtatttcaaaaaaaaaaaaaaaaaaaaaaattgtgaaacaaatattggaatataggctggttttttaatttatatataatccattataaataatactcttacaactaaatcttagctcaaaagaaaatggttaattatagcctttatttcttttctaagcaggtaataaaattaaatgaataagattatatagaccaatttataattaactttgttggtaaaaataagtcccattgcgtgtaatcaaatcgatctcacattagcttccaaagcctcatcaatatgtttatcaaattaaaaaaatttattaatatttctccaattttattatcactaaataatttggaatcttaaataatcaaagtagtaaagaaaatcgatgaaagttttgttaagctttggtataattttggactaatctcaataaggagacaactttaaaattatggataaaaataatcaccttttttttttttataagtggtgatgtgagtttgttattttagttttgttgagaggagttataatttgttgtcacttgtaactcttgttttgatcacacataattagtgtaataaaaggtttgttacacaatttgatttaaggaattcaagactacaatgatatagttgttataaaatggattaatatttatttatgtgcgagaaatgaggtgtggtgtgtctgaattctaagtgtgatcacctaaacactataaaaagaggtctttggtgctcatttatataaaccaagttctatcaataaattaagtactttgttaaaaccctaaaagacttgataattcttaaaactattttcatgagagttccctagtgcttagaaatagagaaaataaacttttagacaaagatataatatcttattcaaatcatggtaatccctactaatctacactcaaaattataagagagtgtatatatatatcttcttcttcagattatattatatatgttgtatattatgtgtattgggatttatgtcttctacttttcttatatttaatatatatagtatatatatatatatatattgtatacttaacatttatataataaatctcttattataatctttctattaattttacaattgagattttatatataaaatctctaatatataaatcggacatgactcatattgttaaacgggtcatattagatccatatgaaaacgggtttttgaaaaaaaaaaacaggctgaatcgggtcaggccgcccgaatgtacacagttagtcccacccattatgataaattttagtagaaactaatttgtttaagcccttcatccaatgaaagctactgatttgtgatttgtaaaaccatctttatcaacttcacaactcattattgatgtcttgaagcattggatgagttggattattatggcttggtgatggcattgcaaccatgcttgtacttacacatgaatcacattgcataggatcagttgtcccttgttcaatctggctcattaaggtgttggcatcgttgaatttccaatcaaccaagtaaccaggcctcgaaacttcagtgccccccgcatcagtgtctcctgtaagcattgccaccactttggacattgatggacgagctgcaggtgatgcttgagtgcataagaaagctactcttatggttctcctcacttcttccctgttgaatttttttgatattttcgagtcaacaagctctatttcgcggtcttcttcatgtagatcccaagcctatatgatttgaaaattttgtcattgaacttttggtaatagaagtttatttagaaaggaatctagttttagtacccattcaagaagataagtcttttcttcacccaagcttgagtctgaatttggtctgccagtaacgatttctaatgccacaactccaaaagcaaagacatctgttttctcagtaaggtgaccaagcatggcatattcaggtgcaagataaccactgcaacacaaatgaaaaagttcagtgagaaaagaatcacaaaacaaagtctggtcataaagaaagtcttacatagttcctgcaactcttgtacttatatgagtctttttatcatcataaagtttggccaaaccaaaatctgatattttcgggacaagatcagagtcaagtagaatgttgctggatttgacatctctatgtacaattcgaactcgtgactcctcatgaaggtaagctagacctcttgctatgcctaagcaaatgccaaaccttgttgaccaattcagattcaagctttggttacctgataatgcaagccagagacatattattagctttgtttgatttattttaaatatgtacaatattattcaattcctaccaaatagtgcttgatcaagactatgattctccatatactcgtaaacaagaagccttttgtctccctcaatacaacatccatataatttgacgaggttacggtgttgcactgcagatattgtggcg

SEQ ID NO: 21190 - DNA, 3305 bp, Cannabis sativa
gtctctattcactaaaatatatttttacacaccatttcagctgagagaataattcttaaagtatgttgatttctatttattaataaaacataatcatagcttaaatattactctggacgtaagcaaataaaattcagtcgaactacttaaatttatgtgttacacattttatatatatatatatatacttattttactataattacatttatttctatattaagttattatgcattatattataagcattttatatatataagtaaatgttgagttagaatccctaaacaaaaaaagttcatactattttgtaaattacaagcttattatgtcgcaaaattcattagaattgtaacaatgtaaagggtacaattaatgtgtaaacgcagacgaatataaataaatatgttaattccatgataaagtataatcttaactatattcgagtattaaatatgttaattcctttacgaagtggtccgaatcaaagtacttggacacaagaatcacgtgagatggaatcccactctggcaaaacggcaccgttattgacaaaaagaaaaaacattgccaagctctccacagtggcctatcctcaattatctccataactcgtgtaattatttttgctaggaataactctcgtgtaattactatgaaaaccatgatcctgtcttttttttttcaccagctttatttatcagcctttttcttttagctttaataaataaaagtccaaaacttgtacaggtttatataaaagtctaaacattactagctgtagtgccaacattttaaactctttcgttcactgtaagatatcttttgtcgtaaatcaagttaagacaaagttatgtgtatacatataattttttattttcatgcaaatatttttttttgggtttccaaagactaaatatttgtttggtttcatgcttggggccaaagcattatacagtgatctataagattaaacaaagagtagcattttccttgaacaaaagtggtggcgtatgataaagacatgtacagcaaatataaactacgcgttatgcattataataataataataataatattatatgctctactagtctttgtcaattttttttttttttttgataactagtctttgtcaattttcattaccataagttaatccatgctgattgatggccgtgacttaaaatctaattataaacctttttttaagtgaaaaattatggctgagtttatgtactacgcgacgcggaatggttgaccatgactcataacataatttcattttataatttaaaaagccatatgcttattttagcaagctactttgttttgtaacaaataattggagattatctaatatgatatgatgttgaatccaatgttttggaaaaagacatgtgtttgggaaattggtattatattttagtgtgaatgagaattaatgttatcgaaattgcatatggtggatcaacaacaacaactactactagcatattacaaatttacaaaactgaaaaaaaagaaaacaagtactatgcacatggtttacaacaattattcaacgtatcatttggctgtcattctagccatgacaggcaaaaatgggtcatgtgacgcgcataacttgttctgtttctattccttttttcttatttagagatgaaataaagaaacgaagaccccacataatgatataatcattttaatccaaaccacttttctcccactttcacatctttatcactagtactaatactactacatgctatcttattataaccaaagcatatattatataaaaagctaataatattcgtatacctaagaaaaaacccaactcacaaacacaacaacatacacaaaaagaaaaaattatagagcagatagagtgtcccccaaaagctcatatctataacctctgattccctttttcctaattctaattctatcaaaagcaaaaaaaaaaactcaaataatggaaggagatgagaatgatcttacacccttttggctacaatcctcagatagtcgccggcaacggcggctgagccgttcatcatctctactcttcaactctagtgcttttctcatagtcttgattgttacaacacttgcatttatcttctttattattccaacgattctttccttcgcttctcaaatattcaaacctcagtctgtaaagaagagctgggattctctcaatctgattctagttctgttcgccattatttgtgggtttctaagcagaaacagtggtgagaacgctagcccttatgaagatcgaactgtttctaaatcttcttcaactcgagaggttgagaagtccaacccatcaagtccaaatcgatggtaccagtattcagatcggacactgtcatataacaatggaaatggacttactagactcagaaatagtagctcataccctgatctacgtcaagaatcttcctgggttaccagagatgaacaatggcaattctacgatgatacccaagtctctagttaccgcccactcggctccgatgggctacaccaacgtcgccggccattgcaggaacctgaaaaggtagaaaaagatcaaaacttggagaccaagaatattgaggtcgacacttttcaggtccgaacagaggtaaaatctcaagcgcctgaaccaacccctcagccttctacgcagcttccgcctcagccacccccatttcctcctccgtcgccgcccacggctccggtgaaaaagcgcaaagcgaagaggacctaccaagatattagacaaaaagacgagattgaaagaaacaacttttctgaagttaatcatgtaaattctcaaccaccacctccaccattgcgtccccctccacctccgccgccgctaccgccgccgccgacgtaccaagaatcggaacccaaaagtggaaaaagtgagaaaaagagaaatacggctaccaaggatttcttaatctcacttaggcgaaagaagaaaaagcaaagacaaaagagcgtcgaaaattttgaatccattcttacctcaatcgaccatacttcatcattgcaatcttcatcttcatacccatcgccatcaccgccgcctccacctccaccgccgccaccttcagttttccataatctgttttcttcaaagaaaggtaaaaacagaaacccttactcgaggtctcagccgccgccgcctcctcctcggccaccggtcaatacttcaacactaagggtttcgaagaacaaagctctaagcaaaccgattccagtgactcacaaactaccactatcggctacaaccggaagc

SEQ ID NO: 21191 - DNA, 4152 bp, Cannabis sativa
  modified_base (1047)..(1049): a, c, t, g, unknown or other
  modified_base (3178)..(3185): a, c, t, g, unknown or other
aaaaaaaaaaaaaaccattaacaactcttctcttagtctctttctcctttggccaaaagaaccagcagaaaataaagtttttctttattaatttcttgtgatttctagtagaaaataagggtgtagatcaaaggtaagccttagaaactctttcttccttaattttgaaagttcaactttagttcaagcatgcaaagtttgaggtttgattatatttgaaccctaggtgatgggtttgctgggttatttttgagttagttgaagtttatttgaactggttttggtgcctagtttaatggttgagcaattttgagttcaaaaactaaaacttgcgtcaacaatgacatttttcgattatgtgtgttcgagctactgctattgcttaggttatgtttattgtgatgtaattaggtgatctgaggcatagtttgaagtttggggttgtattgagctcgaattcagattttgtgttctttgtagcagaaaatggtaccatttaactggcaaaatcccaaaaaaaatagtctttcattttttatagaaatggcctgccatttttcaggctgttttttcacaatcttgttttttcgtgtttcctcgatatttagggtattgtcatactttttatcgatagaaaacttctatttttgagtttcggtccccaaaaatgcttctaatttcttgttcactgaatcccataatgtgtacccaaactcttcatgaacataccctaagaaatatatggttttgccttgtcatcaagcttggatctctcatctttaggaatatgaacaaatattttacacccaaagactctcaaatgatcatatgagacagctttccctctctatactctcttaggcacatcaccattcagagcaactaaagaagaaagattaataaaatcaattggagttctcacagcctccccaccctaaaagtacttaggtagcttagcatgggaaaacatacacctaatcctttcttcatttgttctagtcattctttctagcaccattatgttgaggagtttttggaactgacttnnnaagcttgattctatggagtctacagtagtactcaaatggacccttatactcaccaccattatttgcacgaacacacttcaactttcttctagtttctctttcaattttagcatgaatttcttttaaagcatcgagcacttggtctttagatttcaaagcaaaaatcaaaaaaaaatctagaatggtcattaataaaagtaacaaaataaagtgcacctcaaagagttctagttagcatagtacagaaatcagtgttaatcaagtcaataacattagatcttttagatggtagacgtgtatgaaaacaaactctatgtgcttttccatctaagcaatgatcacaagttttaagaggcatattttgcaaatccagtaggaattactttatagtaagagtttgaagtcctttctcgcttatatgatcgagcctctggtgccaaagatcaatgtttgtatctttctgaactaagttaatctctcctttgtgtatcttagcttccaagacatagagagtattcgctttctttcctcttgccactacaagagaaccatttgtgagcttccatttactttcactaaaccaatttatgaaaccctcatcatcaagtcttctagtagatatcaagttaaggcaaatgtttggaacatgcctaacatcgttgagaatcaatttgctaccaacattacttttcaagcaaatatctctaatacccacaatcttcgatgaaccactgtgtcccattttgatattgccaaagtcaccagtagtgtaagaagtgaagaaatcactacgatagtaacatggaatgaagcatcaggatcaataacccaactccaatcttgggttgcaagacaaacacacccatcatcacatacaatgaaaacattaccttcagtggcaattgtattagtctctttctagtttttcttcccttgattctgctctctttttaattttatacaatcccttattaagtgacttggttgttacaatgataagacttaatatttttgttagacttggatcttcttctagaaccatactaatttctagtctgacttcgtccatgcatgtcatgcttttcagtaacaagagtcccagaagaagaaaaagattcacattgtgctttcattttggcttcattaagcaaactatctttgaccaaatccatggtcaaagtcccttctagtgtggaattagaaacagttatcacaaaagtttcccaactgtcaggtaaagaactgaggagtaatgatgcttgcatctcatcatccatattcatcttcatggcaactaactggttcgcaagactctgaaattgacttattttctcaaccatactaccacgatccttgtactttaaatttacaaatcttctaagtagaaaaatattattatcagtcgttcttttggcaaagagattttttagctttttctaaacagcatcagctctgatttcattagagatgtgttcatgaagatttatatccatccatcgtgtaatataggcaatgacttttttatgttgaacttttcattcctcatcatgtaacttagacagtttctcactacctttaataggtttgtacaaatcttccatcaattgcttccaagaggcataatttgacaagctcaattctatcattccatccgactcatccatttttcaacacacaagaattcaactccaattaaccttagctctaataccacttattggaaaaacttattgaaattattcataatatttttcgctttgtatgccaaaaatgagatatttatcaaacatgttagaaatattaaaaccaaaacaccacaagtaatagaaaatatacaaataaagcataaaagtataagacaccaagatttttacgtagaaattcaatgcgggaaaaaatcatgggaccgtagtccgctcaaatcatccattatgtatcaccaaagttcaataatgagattacaatattcttctctagtaaaactagaggctcacaattagggatgcacatagcgcgggaaattggcagggagtgctcccctatccccatccccgcttattttctattggggatggggtgggaacggggcaagaaatcccctaataaaaaataaaatttataataaaaannnnnnnntataaaaatattaaattacgtaaaaattaaaatattatacattaattattatttaataaactaattattatacaaaccacaacttataattcataaaaataatactaatatactaaaaaaatacaaacataaattataaattataaaatattactagaaatataaaataaaatactaaataggtccccgtcgagacggggagtgtgatcctcgttcccgccccatttaacattcgaggataaaaagtaatccccgtctctgcctcgttccccatttagacggggaatccccgccccattaggggcgggtccccacgaagccccatctccatggagaaaatgtgcatccctactcacaacaacatcaagattaaacaatcttgaatcactaatacaatcatcatcatcttaaagatggatacacaaatgaaagaaagtttgggtctcaccaagtgagtattgtggaagagcactttagagaaaataatcgtaaaatcggcctacaaggattcaacatccaaactttgagctaaaatatgaatgagaatcaactacttgatcttcaatgcaaaatagcaaattccactttctctctttagctttcttctcttctttccctctctttttctttctttttcttggctgctagcttcttgttctctaggacaaccatcagctatttctctcctttttttttaattgtttctttaaatgggctagtgcccatttggtccaaggcccattaaaagggacgggcccaataattctcgcctataaatagaatacctcattactcaaaaatttacgaattcttgaacacatcagactaatcaaaattttgttggaataccagtccaaactagggctgtacagaaattttcgtaaaccgcccaacccgaataacccgactaaaccaaaccgacaaaaccgaaaaaaaatacaaaccgacataacttgacaaaattcta

SEQ ID NO: 21192 - DNA, 2468 bp, Cannabis sativa
  modified_base (2198)..(2199): a, c, t, g, unknown or other
aaaataaaaaatataaaaataaaatttctttatgccgataaaccctaaccacacaaatatgtgaagagatatatcttagttatatatagatggtgatatctatctatacatataattatatacgatcgagacagaacaagaacgtttctataaaatagtccaataagtttttaaattgtacgtacatgtacatgtgtcacacgcaaaatttttaatatttattttaacatgattagtatgtggtaaatattattaataaatctagtatttcttaattacttgcatcgaatgctaaattcaacatgaaatatttttatttgttctaaaagcaataatataaaggagattatgttttattagttatacatgaaaactctattgaaattgtgtttggttcaaaaattgcattgtttagttaatttttaaaaagaaaaaacttcaaagtctatactacatatgtatatatttttctatatatgtttatacataatatatatgattttgttaatatcattgagtaagataaaggtggaatttcttggttctttttattgaagagtgcatatataataataacaataatcgaaattagaataaattattaaatacaaaaattagactgagttggaataatttaatctttgtttattttactcagaatacttaaattaattaaaattattattttaattaaataaattacaaaataatatattgtttcaaataataaaattcttttattctttattttttttatttaaaaaaaaaagaaattaagattattaccgttattgacattcagtaggtgattgatatgatataaatattctcattctttttgttttatctcatcatatttctcttattctttattttcaacaaaaaaaattactcatataaatatttaaacatatatacacatttttaatactaaaataattttatttttaattacacccctaatctaataaataagctaaatagttcaatatttaaatcatagaaaaaaatgacaaaattagcttctatcaagtgaattaaaatttagctattttatatttttatctaaataaatatggaaaattttataatgtactccctaaaaaagttgcatcgatgcacttctatttatttccgcatctgagagagtttttaatctaatttttttatggtcgtgtacgttatagttatataagacatcatacaaaattttgagaaatttgaaaaaatttaatacgttaaaaataaggtttaagtagtttgttacacatgtgacacttttattttatacacgtgtgaaataaacgggttgaatactattttctattttgtaaattatttataatttcttaaaatttacaagatatgttaaataactatatcatatatacaattatgaaaaatttagattgaatttttttttaagaagcagaaaaaaataaggattttatgaaaagaataaaatttattaaaaatataacattttaataatatggaaaaaattaaagaaattgatggtgtaatgttaattgttttaggtggaatagagaaatagttagaggatagagtatagtagtatacacacatagataagaaatgctaaaaggtaatattgtatcaatcggcaaaatttgagtttatatacatttggggtatattaaaattttgaacacaagcttacaaaaatataaaaaaaataaacatattttatattcatagccattatactcttctttcttctcttctcttctaattttaccatccatactctgtattctcatctacactgatggtgacccgataatggcccgatactacccattttttttttaatgtttttgtacatgaaaaaaaattacatcaaatgactatcggatcactatcggaatgtgtcacctaataacaatgctccacatttatataagtgctaattttaattttttattttacacaatgggtgttagtcaataaaattaaatatgttatagtaatattttttaaaaaaattagatggagatattgttgtaggaattttgttatacagtgaggccagacaaacattaaataagggaccattaggcaggcaatgtacccgatccctaggcctggtggactataccctctattctattcccttcatcaaggctaaacttgtcttttcattcctttcttccctaatattattattattattattnntattattattattattattgatggtggcctttttgtgatcatgacgacgttggcgtatatattattatatcacaattcaatttataaacacagagaaaaaaagaaacaaaggtcaaagcgaagcagttgtagtatagcgtatagaggtaatgatttacagagatatatctatacatatatatcagaaaataaatatatattttttctgtttggcagtgggaatagcagagggtgtgtgttaatgtatttaaaggaaaaaaaaaaaaaaa

SEQ ID NO: 21193 - DNA, 1566 bp, Cannabis sativa
tttttttttttttttgctatgtttttcacttttacaattacaatctctacatttgtattggagttctgccaaaaaatgttgtttcttgtacgccatatttcctaaacaagagttgctatgacaacaattaaaattgacttctttatcttgcttatctttgccctccttaaccaccttatgattctatgatttgtattattgagtttataagaacactcacatcaatttctttactttattttttaaaatgctttattaaaaccctattttttatttatattttacctcacacttttacattatattatagcatacatcaacttctctattttttctctatactatttaaatattataatttttaatatattttatcatacaaaccaaaaaaattaaatgaaaaagaaattaaaaaaagaatgagaaattattaaattaatatttgaagaataatttttttaatgaaatatttgaagaatgattagtgcttccctaacctaaaattttgaactatattagctcaattaatggagcctcctttaaaaaattcttcattttttattaccttttgagttatttagctcctgaaatatgagtgctctagctagacaatcaagggattattaggcacttttttatttataaatcatatcaaacttagcatttatcaaattattaaaaaaatttattttggttttaatcatctaaaacttatgattcttcaaataaataaattatgagttgtaataatgaagaaatgaacactattttttcaccatataggcatatacgagtaatttttatgtcaaaataaataaaataaaataaccttcatattcaaactcttttcaaaacatgtcttttggataaagtcaccatggtataaactagtgttactatctcgagacttcaagtttgaatcctccctcgcccaatatcaaatttactactaattgaatgcaataaataatattgtcactaaactctataccatagttattagaactagatagaatcaaccaaaacatgtttttagcccttcaaaaggacaagtcatacaaaaaaagagatgggtggtttgttcacaatcgccccgagcatgcaaccccgaagacctacatggcaggcacattaaaaacggctaatctacaaaaaaaaaactctgtacaaacaaccaacttcaactacctaaactctatactacagagttaatccaaaatgaacccacataggaagaagaagatgaggtctccttagtagtctatggagaataacagacatagatcattaacaaaaagctcccaataaaaaatgaaaaactaccaattgcctcgttcgtttgtcgctagctcttcatcttgtgttagacaaggatttcgaccctgtcaaatgtaaagatattgatcctcagaagcagctcaacagaatcaaaacaactagaataatccaatgtgtaagttaccgagaaagctacgatataaacaaaagcgataaaccagttgaaatataagtctaggattgaacaagcattacaaagatagcactactattaccatacatgcagat

SEQ ID NO: 21194 - DNA, 4477 bp, Cannabis sativa
tcatgcacctccaccacacaccagcaattcccacttaacagaattacacagtggagtgatcccctgctgtcattcccacagtacccttcctaggcccccttctagagtacacaaaagtgagtggtggtctatcatcatcataggcgacacacccctcgttcacaccacaaccaaatgcttttatgcaataattcactttgctataatttagttttttattgaaaatgactgtttattgacaacagtcttgtggtagattctttgtcttagttttatttggttcttgccaaaatgaatatctatggaaacaataagtaattagaatcaaagaaatttaattttaagaaaaagaaattcataacaaatattttctgtcttttttgaacagataaatataacattgaaatacaacagcattattgccagcaaacaaaaaaactctcatcatcaacaaatagtagaattgtaacaaaataaacacctaaatatacacatattacaacataaataataaataagaataaaagaatttcaatagctaaaaactctactcatctttactcatctttggttccttcttcagtggaactagcagaaggtactgctgctgctgctgctgctgcctctggcctaatctcctcaagctgatgaagaacttgttgaacttcaggtcttgcttcgggtgagggatcaacacaatgcaaggacaatttcaaagtgttgagcaactcatcgcctatagccggtgcatccctcataagttccaaatcaaaaacttcatttgtccactcttctttaacaatggaagccacccattggggtaagtccataccgtttgttggctcccctggcgattttcctgttaggagttccaatatgatcactccaaggctgtagacatcggtttttatgttggctttctttgtcttggtgagttctggtgcattgtagcctagtgatccagcagtggcaatcacatttgtgtttgctgcacttgtcatgagacgggaaaggccggtgtctgcaatgtgggctttggtttgctcgtctagtagtatgttgctagatgttaagtttccatgaaccatgttttcttgagtatggaggtagagaagtcctcttgtaacatccatggctatgttcatccttgttggccaatcaatcacagtctctggaccccgagctgcacataatacaaagtatgattcacatgaaaaataagactaaagaatcataatcaaatgattgattgtatgttgcttaccatgaagaaaggaagcaaggcttcctttagacatataatcgaaaacaagaagcttttctcctttaggtcccaagtaataggctctaagagcaaggagattaggatgtctaattttcccaagtgcagcagcctcagcttcaaactctttttgccctttagtagtcttttctctcaatctcttcaccgcgacttgattaccgtcctcaagtgtcgccttgtatgatgttccataagtactctttcccataatctcagctgttgcacataacaaatcatcagctgtaaacacaaatggaccatcaaagtgaacaagctttccaccagcatcaccacccgattgaacttcaacgccagctgaagctgccttctcggtggctgcagcctgcttagaagttgtaccatcttttccttttgaagcagcccttttcctgatgaagcaacaaagcaaaaagcagcacaatagtagaagaaccagtaggaggcaacctgcagctattagaagaatatcttttgtacttagtttgtggtggtgatggtgcttcatcttttgagcttctggcgatggagctggagggttttcgggtgtttgagatgagcatatggatgaagtgctataaccacatagctgaatgttcccaacaaatgaacttgaattgaattttttggagagtagggatgggacagaaccagatagattgttgtaagaaacattaaaagaagtgagatttgctaagttgacaaaagaagctggaatctcaccagttaacttgttcccagataaatcaatttgattaattccagatatgttggaaagggtatctggaattgaaccaataaattgattatctttaagaatcaaagctgaaagattatgcaatctatccaatgattctgggatctgattcccaatgtggtttcccccaagattgagagtaactaatgaagagagtctagaaaaactaacaggcaaacttccattgatggcattatttgacaagtcaagattttgaagtcttgtcaaactccctaactcacttggtattgtcccactaatctgattattgctaagagagacttgttcaagttgacccaatttgctaagagtagttggaatcattccagagaagttgttatgatcaagggtcaatatttggagttggtaaggaaaatttcttgtcccaatactattactactaccccaactacttggaatagaaccagagaacttgttgtgttgaagatcaaggaatgtaagggaatgagagctggtgagactgattgggatagaaccagaaagagaattaaagctgagattgattctaaacaacttggttgagtttgaaagactagaaggaattacaccagtgagtgaattattgcttagatcaagagtttgaagtaaaagacagttaccaattgaaggagggattgagccagaaagtctgttgttgaagagataaactcctctgagattaggaaggaacccaagtgagaatggaacactaccagaaagataattgtcatgaagactaatctttctaagaccttggagttgcccaatcttctccgagattcggccgcccagccccttccatggaagctgaatagcaataacttgtccctttaaacacttgattcctgcccatttaccagaacaagcaccatagccagtgtcattccagctcctaagatagccttttggatcaattagttcatgtttaaaggcttgaagagcttgaaaattagcttgtgtgactattataccatcccatgattgtcctgaaacaggctcagaatagaaaaagagaataagttgaaaaaacaagaatcctccatataacaaaaacttgctaaataagcatttatttcccatgagagaaactaaaccaaaaaaagaaagaagaagaagatgagtttctattgtagttgttgttcaatcactctactctctctttatttcaacaaagaagaagaagaagaagaagaagaagaggaagtgagtgagtgaaatggtgaagaaggaaagaaagaagaaatatggtatttgaggaagaaatgtgaggagtgagagagagagatagataatgaaatcatgtgagaatattcatggggttttttgggaggagagagattcaggtcaggggaggcatatggggtcagaaagagtcttcatcttcgttaaatttatcccccccaacggctagtttttcttcttacaaatgataacggtttgtgttgaaaaacctggacttggtctttcaatggagtcgtttatttattcctaacggctatatttcatcggtgccacgtaagcaaacactagaatactactactgagctcctttgtctgttttggactttcatgcacgtgcttgcttcatgtaaatttacgaatttgccactatgaccattttgaagtttgaccaaaaagtaaatagtaattttctcaattaaacattactataggaaatttacataatactagggctgaaggttgtacataaatttttgtaaatctttttattcaaaccatttgtttaaatcaaatcgagataattccataaaaaatacaaattaaaaaatatatcttctcaatctttatattaaatgggttgaaaataatatcaactcgcccaatcaatctgaattaattcgactaactcaattaaaaagattttttatatatatatttttattatagaatttatatattatataatttaaatacacatttataaaaaaaaaaaaaaaaaaattaaactactatatttttattataactgatgatttataatttgaattcaatctatataataatacaattaaaattggattttgtctgtttacaattttgcagattttattttttacacattttccactaagttttgttaaataaatgctaagcaaaagtactattagtacaattaattattagatttcatatttgtttcgtattttgtttgatctactatttatttttatgtaagtcttgtcgactcacttttaactagattaatgctaaaagggttaagtagtgcctaccatcttaatatattatgagcccatttagcacagtttttggaaaagtaaaaaactgctttttaaaaatactatgacaaaaaaatgtctggtaagcagttaaaaaacagcttattgaaaaatttatggaaaaactacagctaaaagctaaagttggtacaacccaacttt

SEQ ID NO: 21195 - DNA, 4512 bp, Cannabis sativa
taaagctctttgcatggataccttccaaacaaatgatctcatctattcctcttttttaactgcaacccaaataataacagccctccaatgaagaaaatggatgatgatttcgtgttattattattattatcatcaattccattatttctactctttgtttaattacttatttaaccatcttcatcatttgttcatacataatattataataaacacattcaatattaaacatataacctcatcaaatgcctgtacgagatccaagagctggacgagcgttcatatgcgtgatctcatggtttctgttcctcaccatagccggtggcggtggctgcctcataatgtacatgatcttaccggagacaaacaccacttcatggcttccagtcgtgggaatcacattggtttgtctcccttggctcttttggctctctacattcatgtacagaatcctatcccggatattcgggttcaggatcggcatcggagaagacaacgacaaccacaacaacatcagcaacaacgacaacaacacgaacaatgtgataccggaggaggaggaagaggctggggtggcggcggcgtcttccgatcattctgagcagaaaacagagtactctccagctgaaagacggttgcaattcgaagctaccttgacggtgcacgatgatgatgagaatgaaaattataaggatgatggtgatggtattattattttagatcataagcaaagaagtattaagcaggccatcgtttccaaatcttcgtcttcgtcgagcaattcaagcgtcttgtctcatgagagtgaactgcctttggcatcatcaagggccccttgatgattaaagtaataaaatgattctttttttctttcattctttttgggttgatcatatatattcatttatatgcatattattatagagacattgttgttattagagatttttgtatacctaggtagctttatagatcttacgtatagtatatacagtacatacgtacacaagtactgttataattttttaaattttctggaaatttgggttcatgcattgtacttgtgcatgtatatattagaacaatgtcgatagtttcaatgtattatttattatgattgttttgggtattcgcgggctgaagggatcccagaatatctgcttccaaaagaagacaattgattgtgattatggttttattgattgaatatttcttgtgcattttcccttcctacgtatgtttttttgtgggcctcacaagtcatatatatgttgggattttgtcaaggcgaagaaagaaaaaaaaaaaaggattttccataaatatgggaataaatttgaaagcaggaaaaaaaaaataatacaaaaatctatgagactaatgtgagtgaaaaatcataaacatatgataagctaaaactatataaacaagtgttgtagttgtgccacaattataccttttcagtgttagttaaccactaaatttaactttttattattagagttgacctagtatgtttggtttattggaatgaagattgtaatggaataaaagttaccattacaatgtttggtttgtgtttttaacctttataatagaattccattgtaatgggtattacaccaattccgtgaatactcattacactcctacacgacatgaatgagcattacaatcactattaaataataaaaagacaattttaccttttctctttctttataaataataaataaagcaagggtatttttgtcaattcaattttgattacaatgttcattataaaataaaccaaacatagtaatagtattcctattactattaccattacattccattactattcctattactattacaattacattctcctaaactaaacaccacctataaaatagctattaagaaccttcatatatggaagtcttgtcttttaacatggtggtggtgtcatctctatgattttatcagtgatatgcgtttcgtttggtttctttttgtgcttttcgatctgttctcactctatactatggctacaacatggactaatgaatctagtttagaagaccagtatatgagcataaggttatagaagacgatgatgatggagtcataagatatggtcaagggttcgataacctatcggagattgatcataattggtgcttggttgggcgtttcctcacagatcgctcacttgattttgatgcaatgtgacataagatggcatcactgtggagactggaaagaggcttgtatgttaaggaacttgatccaaatagatatcttttttagttttatcacgaacttgacatcaaacaggtagtggaaggcagcccatggacattcgatcgagtccctctaatctttgaacgacttaaagaaggagagaacccgcgtatggtggtgttatagaagctgcatttctgggttcaattgcatggtatgactatgggttttatgtcggcaagggtggttcgagacataggaaattaaattggtggatttgttgaatctgatcccaaaaattttacaggagtctggcgtgattatctcagaattcgtatgtcattacaggtgtatttgcccttgaaaaggaagatgaagctagaaaaaaggtggactttgttgcattgctcagttgatcaaatatgaagactaacctaccttcttctttatttgtggtattctaggtcattttgagcatttttgtgaaaagaattttgaagtaccaaaacatcttactgtaaaaccttatggtcttggtatgaaagcggctccgagaagcaaaagtcactcgattgattcgaaatggctaagatcaggggtggttgtcaagggtgctccggtgaaggacatgccaggggctcagatggtggtaggtagctcagagatgactatttctttgatattttaaagacacgagcctaggcataagatttcagtgcctaggcataacacccctaaatttgggcagcaagcttattgataatgttttggccataattctttcaatattgctcagaattgaacgattcaagatgttttggaaagctgaaagagagatctagaacttttatgttttgattttctccaaaatctaaacaaagcatagtctgatttaggtttgaagtttcagctttttttcttgtaattttttttctattttatagatcatatttttttgaaatttgacaaatttatacattctaagtgtctaaacctaaaattaaataaaacaagcgtaattctatttcaaaaagtgacaatgaagaagaaaattaactctaaaaatgacataaataataagctaaaaatagcctaacaaattcccccaaactaaatccttactcgccctcgagtaagactaacaactaaaaacaacacaacctaaatgaaataagccaatcaaccaaaacatgagtaattttcaagtaagccaaatacatggttttgtacgaaattttttacctatatattaatccaaaatttcagttcaatcacactcttgacttacttcaatcttgcattcagttcataaaaccataatcaacacttaactaacatttgatataatttatgcatgccagataccaccttcaatccactaaccaaatatattctataagcttgcaatactcactattctccactaatgtaaatagatgcataattcagaatcaaaagatctttctagtcttgtaaggataaacttaggtacaggtagatggaacggtcatttaggtttgcctataccataagcttctccaatcaattcacccataactttcacaaatgttcctggtatctctttttctttctaattacatgagagaaattattttcaacaatattgcaacaactttatttttatttctttttttttttaaatgttttcttcaaatttttttcttcgaatttgacacttattttcaaatttttctttttcaagttgttgccaatcaatttttttcacattctctcaatttcactcttatttccacacacacatatataaaactttccattaaaattttcacaaactaaagatccacttatggtataattatggtcaaatttaaataataatgggtttatcttgtttaggctcaaaatgtgtagaaacaaagaatcaagataaagctcgaaaagggtaacgaagataaaaatcacaaggatggcttaaaaggcacaatagatctaaagaatgcataaattactttcctaatcatgcatcatttattatttcacctcaaataacaagcaagcaagttctaaaattttcttaacaactttccacatttcaaatttaacatacatataccaattcaattgctaaaaatttacattttatgattatatgttcttttaaagtacaaaattaaaattaatcaagaatgtaatcttaccaagcacacggatttttcaaaaaataaataaaatttttaaaccatgctatgtacctactttcacattgactcatgtagtgcccaaaattactctaagcccaac

SEQ ID NO: 21196 - DNA, 2889 bp, Cannabis sativa
  modified_base (2855)..(2864): a, c, t, g, unknown or other
catcaaaggaagacacgtgtcaagttgaggaaaatatgaacccagacatgtaattataattacatttgacgaggaataactcgttaaaagcataattgacagagtatatttacaacttggatgactgaatagttttctgcgagataaagatatacaaactgttgccttgtgcatcaacgagaaaccatgtaacttcaggcggacgaggcactaacctcgttacgtaaatgggatataatgactgtgaagacactaagcgtataatatatagtatgcaaactaagtataatagacgggtaaaccaaagcaagtgatagtgaggcgtccatctcgctataagaaggcttgctcgcggtatcttcactaatcaaccctagacatccttcaatgacgttcacagctccatcgagccagtactctcagatagaagccgaaattcaaacagtattgacagttgaagatcaccttttcaccaaaaactgcgattgtcatgacttcagagcagaagcaacgagatttacattatcaacctcgaaaagatatgggaaagactccagcttgctatcaaggttattgatattgaattcctaccgagacattccaaaatattgacgtgttcaatacacgtttattttgacccagtaaaagcggattaatcacagttctgtgatattcaaatattaaccgcatttatattacgtgatatgtaatcaaaccccacgattttaagggataattgttgtaaatattatagtcaactctgtaattaactgcctgactatatacttataaatagaggcactgaaacgaaaaaattcataagagaaaaagcccaagaaaagtatcagaaatctaataagcttgactcgtgaactatgcaaaattttaactgcaaaaccacgtaaagaacctttgtgttcatcatttattttatctctttactgtttttatttttctgtgcaagtttatcactcaggctcaaattaagttaacgaaaatctgcattaacagtaacttaactattttttctcaacatctggtaagtatggtttgtatttgagatactagattcttatcatctttgaaagcataacatggttatttgtccctctatgaaaaaaaggaaagatgtgtgcttaagattaacttgatttttgtataaaaatattttagttcctttgtatttttttctaatttcaaaattcataaaaaagggggaagtcggctcacttggtttatgggctaagaaaatttggtttttacgtttttcttttgctaagtatcaacatgtgctttagttggtaaatttttgatgagtttctcttaaaattgatttcttatttgttgtattttgttacattaggaaatcttactttaattgctcttttgttgcatttttttcgtgtgcaaaataataaaatggtggttttcttttgtaagagggaaaaggttggttgtttatcttagtttcctttttcaattttaattgtttttctttctttctttcttttccactacttatttatattagttcgtgttctttaattctgaaaatcactcatcatctaccccgacctctctcttcttactggtataatctttcaaccatcagaatactttgatggtgctttccccaaatgcctaaaaccttttgttggagcaggtccctctgctgctgcaagttccagtttttctcttatagaagtgcaagaagtcaagcaggaagtggctttgttgaacagtggcttggctgctatggagggggttcaacaagagatgtctaaacaattgtccactttggtctagctttatcaagctcaagatttgtattctcttttgttacttcactatttatgttttgttgaacttgctttcttttatttttttcttttgcccttatagataaacgaaaagagggagtaatggttttaagagctgaggttagtgtttgtgttaaaactttggttaaagttagcattttattttggtttaatgttgtgcttttcaggggaagtttatgtctttgattttgctaactttgttttgtaggtgcttgttaattaaaaatatttttattatctaaagtaacaaaggggaaattgtaaagtcctttttacaatttctttaaaaaaatattttctaattaatgtgtatttctttgtgtaattaaattattttcttgtgttaatttcgtggctttagttgctcttttcttttaagaaaattttttatttacaattggtgttttttgtttaggaaacttatcttacaagagatggaattctctttatgaaaagttttccatttttgaaaaaattgactttctctttttctaaatgttaattttagctttgctatgtatatagcaaatcaaataatttttatttggtaggtattgaagacaaaatcatgatctcggtcctctctagaaagtttcttgtctggtctagatctgctgcagcagagtctgaacttgatgctgaaaatcaaagcttttttttaggaaagctttctatagttgggaaaacgtgtttatggttgtctctagagtttataataggacctagagagcagctaaatgttttcaatctcttaaagtttcatatttttatagcttccttttgtaagaacattatttcttttataaaaacatagagattcaacaaggttttagttttcttgtaatgatctcttattgttcatataataagttgaagagaaggttttaacaagtttgggtctttgggagaagactttcctatgtctcattttaggaggaagtgaggacatatctttggaagaagatttgtcaaagactcatttcgggaggaagtgcgtgttgggttttatgcccnnnnnnnnnntccatttcaatgtaatccattttat

SEQ ID NO: 21197 - DNA, 3587 bp, Cannabis sativa
tatatatatcttacgtaccggaaatgaaaatacagagaggtctccaaccctaaccgatttgtattggaccaatgggttagctgtatgaagcatgcaagtaagagattgccattggtttaagctcaatgagtccccaacaaacattatgctttttcctctaaaccttgtcaagaaatttcgtccatcgaatctataagatcaacaaccaataatgtctaccatcattttctgtgtccaatccaatttaattataatacaatacaacaaattaaagggattagcgccatgtattattataagagaataaattctaaaaaataccgataatgtctagtatcattttccgtgttatattattagtataattaagccggatttcatatcataatactaattaagataataacactaaccaatatagagtgcttcctttaaatatggtgcctactgtgtctaatagcggcgcttttattatcagtactacccaatacgttttacaattggttagcgatattttttaaaattatataaaactcgatactaattatactaatagtgtattaatttgcgcatttcttgtcttatgatatggtgaggtgaggatgaggaaattcaccaacagcctttatttgggtccctcaaatatgtctttttcctaaatggccatgtagccgccataatgatctattggactactggactagggtctacttccattgacaaaactattaagtaatcaataaaagaaaaactacatatcattggtttttcaaccacaagagattgtggtccccctcatctcatatatgtacattatgtacctataatatattaattaacatattgttctatatatatatttatatgactgctcattagaatcgtagacaaataggaaacaagcatataaaatagcccctcttcagtcttcatcaccaataaataatgccaataccatgatgatgatttaagcaaattcactcaatataatcgattagagctttataaatttgaagataactctaatctctcttccatgaaaagaagctcatatatgaattaattgctagccaaccattaatgtgctttgtacttatataagaaacttattgttattattatttgatatattaatttcaacctagctaataattaaatgcattaatgtctacaatcttgacttatatgtaaacattgtatatataagtcatgaattaaaccgatctaagtgatataactacactttaatttgtacagcttatttaataagaaatgactaaaaaaatttaccaaacaataatatttatatatttgttgggtggtaactaattagttggagtaaaatttaaggaaaaattaaaaacttggagagtgacttttaaaagttttggttggtatatatatatgatatgtttagttacaaaaatatcaatttggtggattggttaatttccaataaaaagttgaaaagcaaccacaatattttaacacatgctcaatcaaaactattctctgcattgaaagagaaaattaaatttaaattatgtatatatatggttaatttaattaattaagtggccaaaaaccatagagagaaaatactcaaaactataacatatgcagacaaagggaatgaccacatgaaatggacttatccagcactcacagctgtatatatataacacatatttttgtaaattgtaataataaatacataacttcagattatttattattaataattaaccagcccacatattattccgctataaaaatttaaatatttatattaatattaacattccaatattatccagcaactattttttgttatgtaataatctaactcatcagtcgtcagttccagcagaactttcccaatcctaactaactaaaggaaaaatacatgacaatcttttaaaaagaataattaataaataaacacaaaacaaaaatgtaagctttctattcaattatacaaattataaacaaaaaaataccctaacatactaaaagccaaaagatatttttaaagtaaaaaagaagagaaggggatgaagggtaccttggtaatttgcaggaagagggctgccatctgagcttaaggtaaagcttgtcaggtcgaccgttctgtacacaatcaaattccttctctacaaaaggacattttaaggtgtcgtagagtggatacgacgtgtcgtatacccaattaccatcccagaaatcacaccccttcgtcgtaattattctcgtattattaataatatcgttattaccatgtactactaacctgttgaaatgatcatgatgctcaatattattattattattattattattattattaccttttgcttcgtttagaactaataataataagaggaacaccaccacagctaaaatttgccttattattatgatagaacccatcatcgagagaaagaagagaaaaagaggtttttttttttggtaggtgttaattaaaacttacgtgactcaattttgagtctctattggaaataaatgaacttattttggaggctatatatataagaatattgggatgtttttttatttgttaaattaatgtaaaatacacttataattaactttgtaaacagggagaaagagttgatgaaagtgatgggctatcaaaggaaaataactctatcaaagtttatatgtttatccaattagataatttttatttataattagttacatagcggtggactcaggatttaaagcaaaaaaaaaaaatattgttggtgggatttaaactttaacctctaaaatatatgcaatttagcttaattattacaccaaaaataagattatgtttataaatattatatataaattatgaaattaattatattagagaaaaattaaatattgattagctagagccacgtttaaagaatctctccaatctctttcagttggtggtggacatatttggtgtggagtgttgaagacaccaaaccgaaggcccttatttttcaggtggtcctaacgaatattttctacaattaatataattcaaaatatataaaatagtaatgttaattattttccagtaaaataataaacaaaaatatataattgtgttggtttggttggtttgtttggaaagatccaaaaatatgttttaattctctcaaaataaataaataaaaatgttgtgtgtggcttgtttatattatgtgatggactatactaaatatatctataattatttagctttttcctactaaaacaaaaagaagaagaagaattaaatatttattaacatagctatctaactctcttgaatattgattataatatatatgatcacattattttcataaattaagagatatacatgatatatagagctagcttagcaagaaaataggctaggtgttagctaattcattgaaaaatacatgttaatcaaatattattgcactacatataagctacattaacccaaaagtggattgaattgctccatcaccttcttattaatggaaaaacaaactctaagataatctgtcttcaagatgactaggtaccccaaccgtttgcactgaagaagacta

SEQ ID NO: 21198 - DNA, 4370 bp, Cannabis sativa
gtgagatttactacttgattgcgtatacttgcgtagtaattaataattttcatcaacaaaatacgtcacagaatatactatcaattattcattgtatgtaagttggggttgggatattcttaaaaaaaaaagtctttttttttagaatctggagattgagttaataagaacttgagaaaaataattattttatttttaatgatgagttaataagagtctgagaaaaataaataaataaatgaaaggtgacagtcttttttaatgattgataatttatgcagttaaatatatattaaaatgtgtacatggaagaatgctcaagataaattgaacattgctcattatctttcaaatattacaggtgatgggcggtttcttaagttaagcttattaaaaatgtacttaaaatctcagttgatgcaacaacttttgaccacagttcattatatgattttgagttggtggcaaagggatcttaagaggtcaaaacagtctatcgtagggatataatggtactagacatggctaaagctttagccattaaaaaggcgttaagttggattaaggatcatgaatggtatattgaactcgagttcgattgtctctcaattgtccaagttatccgaagtaacatcaccatagtttcgcctcttgaaggaatggtgatggactatcgaaagtttcaatctatttttttgtttttcattaaactagctactaatacaaaaagtgtgtgtaatattttgttatataaatatatatacatatacacgtatttttacacttttaggtgcatatgttattactactcttttaattttttttttttttggagtggggcaggttaggaatgaattgcataaaaaattcttccagcagagagaaaatgaaaaaccgaaaataaaaggtttggccattatattagcttataaaaagcaaaaaaagttacaaacatgaacgttttgtaacgtcaatgtaaaaatttcaaaatattttaattaaattttgtaaaacttcactattcttagtttctcaacatattattaataaataattaatgcaaaatgtagcattatgattttttttaaaaaacaacgtgatctgaatcatattaggacatttttgagaagacttcaacaatcagtgttggaatttttttaaatcagcataactcattgtcttgcataaggacgtgtttattagccaaaccatgagtcgcagtgttatttttgcaggacacatgagacaaaactgtcattagaaatttaaacaataaagctatgttaccctctaacagcacacacatctcatttgcgaataccttcctgttattgatggccataactacagagagagaatcagatttaaccgcttatataggagaatcctacacaaatgagcccaatttagtctagttagcaagacaaaagttttaacttttgatcgaagaacagtaatactaccggtaaagaatcaaacaacatacaaacaaaacagcattataatatagcattatgaatgattgtcttaaaaaataacaaaattgtaatgtgatttatgattaggtaataattattaggttcaaaatctataaatttataaacaaatctaaatcgtcatacatagatcttgttaggaaacttccatcattggcagaacatggtcattaataaggaaagaatagcttaataagccttttttcactatatagtctagaacgtatagtatatagttttaaaaaatggctagtggttactacttgtcttcattctaataaacaaaacttgtgtagcaagtctcctattcttgagtaccataaagcatgttatgtttccttgggaaatttcatgtgaaactactcatagtcatagtaataatttttcaaacattacctcctacttcctaccattgagaagctaatcgatcggttgaagctaaacttaatctaaattagagtctgcctaatttgatgcatttttggatcgagttttgatattagatttgagaattttgaatttcgggtgtgattaaaattctaaaatgtataatatctataatcaaagccctatacttcataatattctaataagtcgtctttttttcatatataaaaccacctagctattgccttcaattcatatatcttcaaggtttctcttttaaagagtcaattatgtgtattgtatttgtcattttgtaatagtgttttttgaacaaccgaagacccaattattttttcccaatcaattagttcaatttattttttcagatctgtaagtatgaaattattgagaaagagagggagacaaataatggcgttgaagaaagaggtaaagagaaatagagaaatcaatgtctgagttgggtgttgaacaaaaccagcgaaactcaacaaaatcataatcttttcgatcatttttcttctaatgctttattcttcttctaattttggtgttgaacggttattgtgaaccaactaagtgtcggagtaactgtgtgtgtagagttgagatttcttaatttaacttgttgattcttccttttgggattgatttggatgttcttgttttttggttgattagaagtgttattaagtcaaatttggcatttgggttttgcttttatggtcttttttttttcctgatttattagttatttaggtcctctcaagattaccgtagtgaattatagatcttttacaattttgtaaatttttggttatagagagttgttattctaattatgttgattttgcggttaaaatggaccattgtggttgggagttggccatatggatgtaaacggggcggggtgggtgcggggattgctcctctatctccataccttcttcttaaattcaccacatatctgttctaatacccgtttaaattaaagtgatgggagagcgaaaattactcgacaataaaatggatttctccgccttgttttcgactcgagtatgaaaatttaaactcatacccgtctcgctcgcgtcccattaggggcgggtacccaaacctgtgagtataattgtcatccctagtttggttgtgtgattagttgtgtggatggtgtcttcgagcttggtgaaatgggaatgagagggagaagatgaggcttgaagaggacaaagaagaaaaaagtattttttttatgattttaaaataataattttagttttaaattagttttaattaaaattataattttaaataataaaaaattgacatgtggtatcttattagtatctaacatatcaattagaaaaatgactaataaacttacaaaaatgtgacattgagaattttagataattgttaaaaatagagttagtctctctttgtaatattttaatttgcaatttaagtaggcatatcataactcaaaaaagaaatataaaagagaaaaataagtaagtaatatcttcttttggtgtaataaaatgcattatatatttctccctccaaaggggagagaaataaaaaagaaaaagtttgattataataaggataaatgatattttagacctgtgttttgtaaaagttattgatttaattttttatttagttaaatgataaaatagagtctgtattttttaaaatgaaataaataaaatcctaattttttttttttttaaaaataaaacttaataataacccgatctaaaagtgttatgataaatctggtttcatgttagaaattattttctagttagttattgaaaaagttattaaaatttgaactcaaagtcttatttttataattttaaaaaatacatagtctattttattatttaataaaataaatagtttaattaataatttttataaaaacaaaatataaaatattatttactcttataatatggagaaaaataattattcattaatttgctatttgaacacaaaaaaattagtttgtgaagtactgtcattaaattatacaaaatgtagttactttgtttaggaaagagagtcatcatgatgcgtttatgaaatgacaaaattgtaatgtgatttatgattacttcaaaatttaaattcaaaaacagatccaaatcatcatagatcttgttaggaaacttccatcattggcagaacatgttcttatttattaataaggaaagggtagtttagaccttttccacttacaattaattaccacttctacactaaccctatgtttggttggtaccaagggagaaaaatacaagtgaaagaaaatatgagaggaaaagaaaattagaaggaaaggaatgaaaatacttttcttttctagttgcttggtatgtagaaaggaaagaaaattgttatattgtaatattactatatgactaattaagatttttgtcctctgaactttgacatgta

SEQ ID NO: 21199 - DNA, 3418 bp, Cannabis sativa
tgaacccgaaacccgccaacccgaaacccggtaaacccgcccgatgttcagccctagcaactagaggctgaagaagggttactgggacaaagcccacttgtggctactggagagtgagggagagtttcgacgattatttttccaatactattagaatttatttttaaatttttctatgatttttaattaattttgtgactcgtttaataataatttttttttttttgagaaatgagtgaattttattgtccaaaacaactatttacacacaactactagcagagaattacaatacaagtgctcaatgcctcaaaccatcatttgtcatctactcttgttttctctcttttaaaacgagaaaacctattaaaaactctctttaattctcctaactatattatttacaacatacactttttgttctcataaacaaatatttctagcttcttaaatgaaataaattatagcaatcaaaatagctaccatcacaacccgcctgaacttagagattttcctcttctcgatgctctttaagaaagcctctaaagtctcttgtcttaaactcaaacatgtccacttctttttatggcagtaagaatttcttggttgtatagcaacaccgagaaaatcggtgttggtaagattaaccaacattctcacacaaacaacacctattatcaacaataacaccaaatatcacaagtctatgcttagtttgcagcttataaacaagctaaccaagtaataaatttatgttttggagcaataaacctgttccaagtaaaatcataccaaatctttggcgtttggaactagccaaagttcgatacaaagatcagaaaaatattgtcctatttgatatatattgagtgaacccacttaacccaaaggctctctttgtcagtgactatatcccaaacatatttttcaagagcaccaaaattctaatgctttatattgtgaaagccaaacctcctacactcttaggagagcacacctggttccgagcaaccaaccttggagcaccagaatcataggttcttttccatcaaaaatccctaaaaatcttattcattttatccatgatatatttcggtaatatcatcaattgatcccaatagtaatggaatgaaattaaggtaaaatttatgagcatacatctctttgcataggatacatttctcgtacttcaaactcgaattttatttaccatcttctttaagatattattagaatcaaccttagatttttttttttttaaaaaaaaggtgggaatacccaaaatacttgaaggggagagtgcttttggtaaaatttgagcactgtaatatgaacttctcaaatctgtagcattcatcccagagcagaatattgatgttttattcttgttagcatgaagatcaaaggttttggaaaaccttttaaaaagctctcaacaacaacaacaaaattgattatacatctccactagaaaatagtaagagattatcagcaaaatataagtgattaattttcaaagagcacacctaggatgatgcttaaactccttcatttgagagacttcagtaaaaaattaggaaaggtattccattcccaaaataattaacaacggtaaaatcagatcaccttatctaagtccatttttagaatgaaagtaccaatgtaatgtaccattcaccatcaacgagaattttgtagtggtaacacactccatcactaagttgataaactatagaggaaagttcagagcagtcaacatttctttaatgaaactccattccactgtatcgtaaggttttcgcaaatccatcttggtcatacaaaatgacctattatttttccttggaactgcttcacaagattttagcaaattaaaatattgtgtcctatatacctttcatgcacaaaacctcattgatttgacacaatcaaactaggaagcacctgtctcaattgaatacaatgaactttggtgatgactttataaatcacattccaataagcaataatggactcaaaatttttactttgtgggggattacatgggtccatccctggcaataaacaatgggtctaaaatcgctaacgcacttcactttaggaatgagagtcaaagttattgcattcatctctttgagaaatttgcccgaattcataaataaatttcaacgtttgtgaagtgatcacctatagtttcctaaatttatttgaagaagccattactaaacccttgtggccaagaaccttatcatttcggattgaaaagagagcatgtttaagttcatcttcactataaagacctgttaattaataactctttaattaacaaaatgcatatatatatatttatatatatatatatgcatttttataactatatctattgaagagattgttaaataattagttatagttgttagttaagtttgttaaaagttagttacactttcttttccttctttagttaagtcggtctgttatttttgtgtatatatactctttctttagctttgtaataattcaattcagtaataacaaattcagattctcttcttttctctctataattctttctgccacaaccctcaagttgggatcagtagactcttggttcgttcatggggacttcctttggtgaaggtgctttgtcaaacaactatggagttcccaccaccatgtttcttcctcgtcttcgccttgacaggaacaaatatttgttctggcattcacaagttctttcagcaattcgtgctcatgatcttgaaggcattctcctgaatcgcaaccctcctcaaccacggatttgtcaaccccctgagtcaacaaccatggttagtaatcctgaattcactcgttggcatcgacttgatcaatttctactatcctggttcttatcttctatttctgaatacacgttgggatatgtcgtgaactgtgaatctgctcatgacatatggagagtacttgagcttctttttggcactgcctcttgagctcgtatgattcacttgatgaatcaactccagaacaccaagaaaggttctctggctattgatgagtacctcctcaagttgaagaaccttgtagaaagttttcatgcagttggaaatcaaatcactgaggaacaattgattctttatgttcttgctggtcttggcattgattatgaagtagtagttggcaatctcacatccagagataacatcacatttcaagaagttcagttcttacttcagaatcatgaaatgcatattcaagccaataatgtgacacgcatggcagacttgtcaagagcttctgccaactttgctcaatctaagaaaccatccattcctaactccaatggcactcgtggtgctttgaatggatatagaggcagaggaaggaacttgaatggtggtcgtggcaataatgatgg

SEQ ID NO: 21200 - DNA, 2199 bp, Cannabis sativa
gcatcatcatcaggcttaacaatagaaactctaaatgaaacatcattgacaatattagtcagttcaaatttgcaaatagatcccacttccaaattgttttccaccacaaatgctttccatccattgatgaattcggctgctgttgatccacttgtcaatcgaactttgtactggacaggccaagatttatcatctgaaatccaaaggctagctttgcattcttccttcttaatgtatgtttgtgcaaaccagcgtggtatatgctaccagaattttaaaaaagaacaagaaaagagatttgattagttaaaatgaagtaagcaaaaaacaactaaacaaaaaatttacaccgaggaaaatataaggctaagattacttacgaaatttctccgatcagttgtatatgatgctttcataataacagtaaagaaaggatattcagattgaaagtagttggccctttcaacagctgagatgtttctatggacagacaaggttttctggtatcttttcgaggtaggcaagccagtggttgtgttatctatagtgtcaccagattctactttgattgatgagcttcctttttccataactttaaaggggtgaacatgtaagacaagacagtgcagaaatattactaaactatgtttattataaacaaacaacttaaaaaattcacaaattaatttctagttgtagatggattctggggtaaaattcattttagatttagattaaatacctttaccaagaggactttgtttcattttcttgtggggctgagaacatggtaatggagattttacccttgatttaggatgcagtgaaattttttccaagacttcaaaagaaacatcatctccatcaatatgtacatgcttcttaacaaggattggattagatgggtaatcaatttctaccatagttattccaaatataatcacattgaactctctcatttcatatcggaaaaccaatagatttcccctgcttaaagaaaaatgttgtgcaaatttattccaacctttttctaaccatacttttccatcactactttttgtcaaccctacctctaaagtgaagagcgatacagaaacataactacatgattgttgaagcctaagaccacactatacagatcaaaggcatttaatctgaatttgatgagagcacctatgaacttaattagttataaatctacataccatcaaaagactcactaccaatagttccaaggaagtacacatattagacaaactaacttggtggcacaaatcacaacaatatatatgtatacaaatatgtcatagaaaccgctcgtatttgaggttgatacattacataaatcacagaagaaaattatgtgttgaagtagagagagtacatagcatacttactaacttggttctcccaagattttcattaagaataattttaataaaatggggagcagttggagaaaactttgtctgagctctctggctagcagaagccatggtttaacttttttgctctgaaacaaagaactttgttagaactagagatcataaaaaaaataaaaaaaaagcttgtttgacagggaaagcaactctctcaagctctgctctacttaagtatcacaaggcagtctgtgagcaacggcaaagcacagagccagagtcaattctacagtagttctactgctacaagaattgttatggacatacaaatagaaatgtaataagtgcaagaccacacacacacatatatatatatgcatacataaaactctgtttggataaaatataaaataaataaataactaataaactatatattaattaacttctaaaaaactattatttaaaagcaatataagaccaatttaaaaaacaaaaaagtaatttatgagttactacatatactattttaattttaatacatgaatgtttctctgttcaggttttttttttcatagttttattatttctttctattaattttttcttttaatcctaattaacaaagttttatacagaaaaacccaatatgtactatcaatatgtgtgattggtttaaagaattgtctataatcacattcatcagagtaatctgcttaataaaaaaaaaatgtaatgataagtaaaaacatgaatatttcgataagtgtgtaattcaatcattattatggaaaccttcatcttcttctttctatagcta

SEQ ID NO: 21201 - DNA, 2833 bp, Cannabis sativa
aggtctgatgttttttcttttcttttccccctagaaaaagggtccaattctattttatttcgactgatattgattctatttatcagacaggtccaacagtttaccgtagtaggactgtctttgaggatgcaacaccagagctggttaaagattttttctgggacgatgagtttcgacctaaatgggatacaatgcttgcgcattgtaaaatactggaggaatgccctcaaacagggacgatgattgttcactggattaaaaaggttagccgaagagagaatccttcgtgctttaatttcttttccggattattctactttctatttagaattttacagttgtgggatttattcttgtttcctcctttatgcagttcccatttttctgcagcgatcgagaatatatcattggccgaagaatatgggaggccggaaaatcttactactgtgtgactaaggtatgattttgcatctctttctgggtttgagacccctttgaggaagagagtttggggcaatataatttttatttcaaactctgaatgattcaaatgtgtctaattagaacccttgaccttgttactggattttagagattattttgtatgtttaattagatattgtacatttccaaatacacaaacaataggtcttactgtctgagactctgaactgcattattttcagggtgtctcgtacccaggcttacacaagcgtgacaagcctagacgtgtggagctttatttttcaagctggcttattagagctggtaagaattgtcgaattaacaatttaatttttggctacatatcttgatgcaatcaactatcaagaatggtttaatagtgttttaacattcacaaaatgttgaaaccaattgcagtggaatctcgtaaaggagacgggcagctgactgcttgtgaggtgaccctcatacactacgaggacatgggtatccccaaagatgtggctaagttaggtgttcgtcacggtatgtggggtgcggtaaagaaattgcactcgggtgtgagggcataccagaacatgaggaaagtggacgcttcgttgtctcgaagtgcgattatggccaacataacaacaaagataccttgtgatggaagcatggagtcattggggccagctgcaggtgaacctgggtgcggaaagagacagaaagatcacggacttgattggaaatggctaattgtaggaggaactgtggctgtggtttgtggactacactctggtttaggaaaagctttattacttggtgcaggtcagagattggctcggagatgatgtaatgattatttggaaaagtctgatcatttttagttgaaatttgaaagtgtgttataattactaaatgagttaatgtgcactgcacacgggcgtagactcactcaagtcttggtatatctagtgtaatataatattgttatagaagaacacaagtgcaatcatgataacttacgttccgacctgtttaaccatggaggaacaatagaattctatatgaatttctgccttaaaatccataaaaaaaatgtatctgcctcactttaaatacatttcagttatgtattaaagagaaatactaaaaggcaccagtggtgtctaacaccctcttatgtgttaataatatattgttattggtccaactaagtatcaagtcttatataatttaatataatagcttttagggagtatcgttaaccaatcgcaacgcggcatgtcgagaatgtgctagaatgtgctagacatagacactactagactactagtgcctaatagcaatgctctaaactaaattaccaccagtttgtaagggtgcacatgggcctggtccctggttggctgcagttgaaggtgttatattgtgtgacatccaatgattccagtgtggggacattatgagccgtacatatttattaaactgtacaatccaatcttattttccacaaaactgtaatgattgagttgaattgagtttattggggttgtggtaataaaagtttaattttttttttttttttattcatactacagctatttaatattgtatttatgaacatagtatttgatacaatttatcaaaattttaattaaatattatattttatggcacctgaattatggctttatcacatttggtgggagttgatagtagggggggtgtttataatctggaggttaaggtgaataatgaatgaataatgtaattttaaacctcaaatcatttggaaaggacagtttttgatggtcagtcatagtggtatgctttggtttgggctttctctctgctttgttttctatgtatatattctaatcctttaattctagtgataggttgagattgagtcacaccatagtccctaccaaaattagggcattgctttcatcattattattgaggcagccagcaaagactgtctctatctaccccaaataaatgaaaatgaaataccatttatgttggaacccactttatataaattcaatcttatctataaccatataacatattaaaagcctaactaaaccattaacaatcaaagtccaacatttaatatggatgatttttgtttatctcaaatcatgaatgcatttggctacatccatcattgtcttggtttctctattcctttaacgatctctaattcttcaaattaagactagaactctttattgggaatggttgtattggagcttggtttcatcttgtgcaaatgactcattttatttaggaaaattatgatgccaaataatagtattatataagtaaatatttttattttaaaatttgtagagaaatgacttttttatttttttga

SEQ ID NO: 21202 - DNA, 5189 bp, Cannabis sativa
cctactccttcccatcgaaaccattcatcatcactttcgtcgtcttcttcctctactactctcggtggtgacagcttttgatccgaacacagaacatgaatttgcattccacacaatccgctgttgttggcataagaggcggcatcagccatagtatccatttgaccaccgagaggaatcttcccacttaacaagttattactcaaaaccaaagttgaaagctcttgaagcttagaaaatgttggtgggattgaaccagtgagtttgttatgtgacaaatccaaactctctacactctccaaattgccaaagcttgatgggatttttcctgttaatctgttgtgtgacatgttgagaagcttcaaaccctttaactcgcctaatgaggatggaatttcgccgaaaagtttgtttcttgacatgtctaagagcgagtagataccgaggctgttgtgtgagatgccttgttttgaactcttccaattcactatcaaatcgttgtactcgattgggatggtgaaaacatcgcgaatcgaagagagtgtcttcggggtgttaatcattccaagaagattttttgtgttttgattagggattgttccaactagtttgttgtttgaaacatcaagaattctaaggctgctgaggttgttgaacatgtcatgaggaatcaagccatgtatcgagttgtttcgcaagattagaatttcaagagtggagatttgtgagaagaaacttggcaattcacctgtgatgttgttgtcattcaattccaagtgttcaaggagtgtgagttttgtcaagtttttcggtatacttcctgagaagttgttatttcccattgcaagaatccttgtttcttgagaaaaagttgttggaatctcaccagaaaattcatttgaagagatgtcaacataagccagcaatgcatcatcaccaaaagcagggagatttgaacccgaaaacctgtttttcgacaagtccaatagtaaaaggcggtatatgttggtgattgatttcgggacttgtcctgagaattggtttgaagctaacataagaatcatgatagctgaggcttcaccaatgttctctggcaactcaccagagaaattgttccttgacaaggccaaaaccgataaatttctagactcaaaaaggcgaggagagagcgaaccaccgagtttgttgtctgataaaatgatccctccaacttccatttcagctagccaaagtggaaactcaccttcaagcttgttctcactcaaatccaagaaatcaagccctttttgtttcgaaatccaacttgggatttcgccttcaactctacaagaactcaatgacaatttcgaaagctgaaactttggctccaatccttttgcaccattccatgtcaaattattcttccccaaatgcaaattctttaaactctccataccaaacaaccataatggaatctctcctcccaacatgtttttttccaaatcaaaagtttccaactttacaagtttttctattgacaatgggatttcaccactcaacctattaccacccaaaaccaaggtagttaagttagttaactcaccaatcacaaaaggtatctccatagacaaaaggttatgactcaaatccaacttcttaagctctttcaagaatccaattgaggccggaatcccaccatcaaaaatgtttattccaagtgacaattcttctagctttctcaagtttccaatctccataggaatacttccaccaagagaattttgatccaacttcaaagccctcaaatttctcaaataccccacttcatgactcaaattcccactcaaaaaattgttactcaaatcaagatacttcaaagacttgagcttgaaaacttgtttaggaatagagccactaaacttgtttcccatcatgttaagataagctaatttggtaagattagccaaaccaaaacccgggatttcgccttgaatcttattcgaagaaatgtcaaggagcttcaaagttttgataccaaaaagtggcatcaaaacacttgttggaacaaccatggaatctgtggaaatcactactaaaagagtgtcaaggtacaaacctatgacagaactcgaattcggtttagaactacacaacactctttcccattgacaacaatctaatgcattgttgtgatcccatgaatcaataccatttatgaacacatctaaattagttgtgttaagtgtcaagttgattagagaagatttgaacttaagaagggcatttttttgatcaattggacaagttgaacaaagggtcatgaagaagaagaagaagaagattgtgatggtaaggctttgtttggccattgttgagtttgagtttgttgttctaaggttagttttcaatggctataatttataaagatcaaaactttttgaataatggaagagagagagagagagagaactattgttagtcaaagtagagtccacacactacattaaaaaatgttcttattgttttgagtttcaatggtactatatggaagtattagtttactttgactttgactttttgtcttcatttaattctttttttattttccaaccaatgattaagttggaatttcttttattgggaaaagttactatacatataaattattattattatttacttattttagcaaaatatttgtagtctttttttctttacttttacctaccaactaaattaacttcttgtgattaatttaaggagagtttaattcttttacattttctacaaatttaactgaaaaagatataggtaatggtgatattttttcactctgtattttatatatccaaattatataattatattattttcacccaaaaaaaagagtgaatgaatatttagttattggaataaaatatttgaatccaaactatatttgtatccaaataaatataaatataggagtgcttatatttacctacattttatatgtttatttgctttttttaattactaaagaaacttaaattttgtgagtgaacatttttcattttgaaaaaattatgaacaagcatcaaatatacatcatcatatttttgctcataatttttttttttttgaagtattttatgttttgggcatttagataattttttttttctataaaatggtatatattgtagagatagtaggtatttcattaattttcaaaaaaatttaaataattttcatgcaactagctatttgagttttaattttgccaccataaattattcaaaatttacccgaaaatattagaattcgtgctataattaaaatatacatcatcatttaaaaaaaaaaaatattttccaagttctacaataaggacaaaaatggtactcctacttaaaaagtttcttatataaatatttatagaacaattatagtaagcatcttacctgtttttaaatttttttgaatgatttagaatattaaaaataaagttcaaaatagttaatttcatatatatataaaagtatattttaaaaaacaaatcataatatttaaaatttgttttgggcacaataaattaaattattttgatttttcttagtatataattgtggtagggttattttcaatttggtgtatattataggtaagtctttgtcaagaacaaaatatctaagaatggtgtgtgagtagagtctattatatttttccatttccactatttataattagtgcttgtttgttgctcaagcataatgccttgcttactaagtagtcactttcaaatacttttgactttgatttcattactactctattctctattaatgatttttgttttttagtttaaaaaatacttttatttttcttaatttatgtggaagtttctcattttaagtactcttatatcccatcataatattcaaactttaatccaatttaaactgaaaattaaatattattattctcatttttttaacaaattgttataaaatggtatattttgtattaaaaaaatagattaatttcatttgttaaacgttataataatatgtataatagatagtgaagaaagaaaatcccaaattggtcaaacaaaaatatctcacacacaatttattatatatttgattttatttatagaataaaatcaattaatactaaattttaaaactctttttcttttctcttcttaattctctcaatttttattattttttttttgtttaatttcattattaaacttaaattgagatatttgttatatagtattaaattaataaaaaaaaaactaattaatcatttgaatttttttaaaaaaaatatgaaatatagttatatggtaaatattgtaactaatctattccaaaatatatatataaattattgagaacgactacaagtgaaatacaatgatttacttaatgtggtggagactataggtaaaatacggtgataataacgattatatatatacatagcatatacattaaatcattaaagattagaaggacaataaaaatagataaaaataacatagcatgtacatttaaactaaatccaagtctttgtattaaattaaaaacaacaacaactaaaaacaaaaaaaaacaacaactaaaataagcacaacccccccttctaatcataataatcatcacctatgtacctcaatttccttccatccaatcaaaaaaatcatctgtaatttctcctcttaccccccaatcactactttctccattattaaaccttaaatactaaaacaaaaaagaacaagaacaagtagagacacctatctacaaattcaatgtggtaacccatttgtgtcttctgctcttgttcttgtcttcacctaataaaatagttcataacaagaaaaaaaaagacaaaaacttgatacaaaaaaacaaaaacataacaaagttctaaaaacaaaaacttcccttttattcagagtataaagggaacttaacaaaaaaaaaaaacccgaaaagtttgaatcttttacgcgctacttcctcttcctcttcctcctccttcaacaccgacactactacgcttcaaaaaaacacttagtacagattttacagcattccctttgcagcacagcaaactcaacctgaaaacaaacaagaaacaccattaaagattgagtctttatcgagattgtttagctatatgatgagctactcaatttgctgatcgtagaa

SEQ ID NO: 21203 - DNA, 2191 bp, Cannabis sativa
tgtcaagttcatgaatttaattgtgtacactgcataatcaccactattagaaagaaaaaatattaatatagaaggaaaaaagggataagtttcacaataggttgtctttgcatttgacaactctaaaatactcttggagcctttgaaattatcaaagcacccaaagtttacattttaactaatgatggatttgtttttaattaaaatgtgtgtaagggaaattaagggaatgcaagctagatgaaatgtaaagctcttcaataataaaaaactacataaataaataaaacaatgatgatcatcatcactggttagattaactatgaagctaccaaaataattgaacaatatctaaactacttaaataacaattttttagactactaaggcattttatcaaacacttagaagtcatttggctcatcccaaaatgacatttcttttcatttcttttgttaggcattttatcaaacatttagcgttcattttgctcacccactaaataacatcaaaatacaactataaatacagaacagtagtcaaaatacaattataacagaaggatttataaagccatgatttttatttttgttaaaacaagaaaacttactaatcaagtggagagtagttaatgaggacaagacaacgttgtcaatggcaagtcttggaaattgatgggatagtcgaagttaagagtagtaaagtttgagtttttatttttggtttcagtgatgagtaagggtaaagaggggagggtattttagtaaatgcacaaacccccaaaccaaaacaacgttggcttctccttccttgttttcccagaagagaagagaagaatgaattgattcttggctggtcagtattatatgatgattacaatcaggtatgtaggtaaagccatttctttctttctttctttctgatctatctatttttggatcttaacttgcactgttcatgctccttacacatgtcaatggcgttttgtgaatgaaatttacgtacttgtatggcctggggagacaaaggaagacattaactcattatgccatgccagttcttgtttcatatcataaagctcatgcataacaaaaataaaagaatatttgctttgtattgtattagaactaatcaaactcaaataacagaaacaaaacacctttactgatgaagtctgctagactagttggtgtttcttgtataaaaaagaacaagaattaagtgttttcttggattggatatgaaattttgagcacataaagcttctttctaatgtgttttacttgtattttgctagaaagataatatcatatcactctgtatgagtatcagtatgacgttcccaacatttggcatattcttctgctcctaagggttagtggttttcaatcttataattaccatttacaacatactatgaaatatacgaatgaaatatacttgtttcttgttttctttggtttcttcaaggtgtactttgtgcttttgaagatgttatctttcaagatgatttgttttctattgacaatgttttcttgtggtttagataataagcttcatagaagatggaagggaggcggttgagaagggcaagaagaggacgtaatcacactcaactgttgccactttcatcttcctctacttcttcttctggttgttgttggtacttggactacaagatcttgtttctcaaccaacctcttttccgttttggaagaacacacgctgcccttctaacaccgtggttctccattggggtcggcttcaccttaaccactctccttgctgtttcactggttgcttcctatcctatgctcaagtcttcttttcctttacttttttgtcttttcaatgctttcttatactaacttctttctgttactcttaccattcagattctcctctgggatttagccagaactctgcatattttcccggaaagctggttgggcgatctttcgagtgcctctttgtttggtttttggcctttctcatcttccccttccgctgttgatgctatctacgtactactttctactatcatctctgtatcgttccatgaatttggccatgctcttgcggctgcaaggtctctcaatctttctctattccaagtgttttctcaacccaattcagctttgataacttctctattttgttttgcagtgaaggcgttgagatggagtacatt

SEQ ID NO: 21204 - DNA, 1848 bp, Cannabis sativa
ttgctctctcttgtcctctttttatacgtggcagaattatcagagcacttttggtggaagaacagaagattttgaagatccagtaagcaaaagaaaagttgacttcaaagaaataagttgtcaatgtgaagctgtgtttattttgatttgatggaaacaaattttgattttattgtgttgattagatttcacaaatcatagatatgaggtttttcttacaattatgatcaagctttacttattctcatttgtttgttttaattgatttttgaagaacaaggtttttgtcaagagggatttgttcgctgaaaccttgcaggtgaaacaatgcattcatattccattttcacttggaaacattcctccattagtgagtccaaacaatttatttatgtatttttacattaaaccgaaccaggccaattcatctgcaatttgggtggttaagcaaaagaaggtattagacaaattaccccagtaatgccttcaataccacacacaaccacttctaccagactttcacacacatgtgtatgtcttcatttgtttgaatatataggcctattctgtttgaaatacaaaaggaatcccatgatcttgtcaagaggaggtgacacctctttcaccaccggatgttcgttcactgctgtgacccatgagtagagaaacggtgtcatttctgggtccatgaatttcacaccaaatacttgttcttgaacttcgtagaaacccaatgttgcaactgtcaaaatgtccagcacccctaaattctggccatttgtgtaaggaccatctcctttgaagaaatccttgactccttcctccagtactttctgtttctctatgtattctttggattctttcacttgtgtttccccatcactcattattactcgagacttgctctcgatcatctgtaaacaaaacatttattatgcatagaaaaacacatatggcagtgtgattagctgagaaaagaagtatgtcttacctgttgttgaatataattagcccaaaaccgtactttggctctttcataaggatcttctggaaaaagtctaggagaatttttccaggtttcatcgatgtattcaaggatgatatatgactcaacaatgggcttttcattgtgaacgagtagtgggatcttcttatgaacagggttgcaggtgaggagcaattggctcttattgctcaaatcttcttcaatatattcataaggtatgcctttaactttaagggccatttctactctctttgagtaagaactagcccacataccatgaagctttacttcacatttcttccccatgtctctctcttcttaaattttatgaaatgacatatgtgagggcatataccaaatatataatgaacaattacctcattaagttgtgttttgaactttgaagataagtagagctagttcattgtgagctatatacgacttaagatttaaataatacacacactggactgaattgtgattggtagcaaatttgtatttttcaccctgaataagtaacccaatacttaaagattcctcatgtttgtataatattcttctagcgttagaaaaagtcttactagttctcctctctctgtcaggcttaatataaagataatatatttaaaagccttatgtaaccaatcttatgttgtgtatagagttaatattggaaatcaatgctaaaatctggttgactatgatgcttaatatatataacacttgctggtggaaaagctatgatagctatctcttcattgccaatgtcaaacctgttgtaaaggttgtgcgcttaatttctatagctctcataaaaatatccaagtcaactgttaattagt

SEQ ID NO: 21205 - DNA, 12063 bp, Cannabis sativa
  modified_base (10916)..(10918): a, c, t, g, unknown or other
  modified_base (11017)..(11024): a, c, t, g, unknown or other
  modified_base (11085)..(11089): a, c, t, g, unknown or other
tctttatataaaatatttatataatttttatttttaaatatatataatcatattataaaatttataaaattaataaataatattctgtttaataattagtatattctgttaaagttaacctataaaaccaaaatagccagttaaatctaactccattacatatccataatatatttcagagaagtcattacaatatttgataaagggggtgtttgccaatatgtcttttgaaagtaaaggtatcatgcaaatgttttaatagttaattggtccatatataaaatacaattttatgatgttaaaggtcaactacaggttgtcgacatgggcatggcttgtatgtaatttacgaggtttacgtagagtagagactcccctgtaaccaggtctattataaaccaagcaaagcctcgcatgatcaaccatcaaatgtttgaagaagaatatccaacggtgaccaagtgggtccgggtgctgacatggcaaatcctaattggtggaacatcagagttgagagaagtatacgtacgtagatgatctgtaagacctccaaaaatgactaatgacagtgaggttcacttccttcccttctgacccgcaactgtgtctgcttcaaatctaccttcccacccttctaaaactctgtttttaaaagcttatatatttggaaccatttcgcttccaaattctcgtatcaaatcatatcatatcatatacccagaaaccagttttcaaggccctttaattaattcatttggagtactactttatgtaaattacaataaccacatcacaagcgccacaacctcgttagactttttctcttttagtttttcattgatcagagtatgtaaccgtattatttctcagttgaatcctcaatcaactcagcaaccacatcattcaaagtatatatatatttttgttagatcgatcatgtaattgtgtagcttaatattagttgtttgttttggtcaatatcatcatcatcttctatttgatgatcaaataatggcaactctggtacccattactccaacaactccgtagaaaattgtaacatagtagagaagctctgttcttgcatatacatataatattacaatagttaattagttagataggtcactgctgagagagaaagaaattaaggccatggaagagacctttgtaccattccgggggatcaagaatgaccttagaggaagattgatgtgctacaagcaagattggactagtggcattaaagctggcttcaggtataatatgtacagtaattagttgatcaaatttaaaactactaaattatatcctataatgaccttgatttctgatgatgcaggattttggctcccaccacttacatatttttcgcttctgcaatcccagtcatttcattcggtgaacaactggagaggaacactggtatgtataattgggcaccaacttctaaaaataaaaagaaaaaacttttagatctgacttagaacattctacttttgcctaaaaagcagtacttttataaacatataatccttcttttaaacaaattctattggctttggtaattacagatggagttttgacggcagttcaaaccttggcatccacagcgttatgtgggattatacattcaatcatcggtggtcaacctttgctgattttaggagtggcagagcctactgtcatcatgtacacattcttgttcaatttcgctaaagaaaggcctgaccttggtcgtgaactctttttagcctggacaggatggtgagttgccttttctctgttttcttctgattaattatacttgttgtacaaatttatatatgtaatatatgttctgacttttctaaacattaaaggatatgtgtttggactgcatttctgctgttcatgctggctatattgggagcttgttcaatcatcaataggttcacccgtgttgctggagagttgtttggtctccttatagccatgctctttatgcagcaggctattaaagtaagaactcttaatagcacaaattttagctttagggtactgtttaatgcagcacttgaattaattaactctttgtactttttggtgtactagggaattgtggacgagtttcgcataccaaagagagaaaatcctaactcaccacagtttataccttcatggagattttcaaatggaatgtttgctttagttctctcctttggccttttgatcactgcattaagaagtcgaaaagcaaggtcatggagatacggctctggtatgatgaactccaaaatgaagtgcttatgaaacattttctcatattttttgtttctaagctaagctggttgagtttttgaacaggttggcttagaagcctagtggcagactatggtgtgccactaatggttctagtgtggacagcagtgtcatacataccatctagcaatgtcccaaaagggatccctaggcgactctttagtcctaatccatggtctcccggtgcatatgataattggactgtggttaaggcatgttgacatttatccaccttttgtgtttgttttaagccattttcctctgtttttttgtgtatttattctcaacgtttgattgcactaatgatgagtttcatttcaaaatgacaggacatgctcaatgtcccagttatctatatcataggagcattcgttccagcaacaatgattgcggtgctttactactttgaccatagcgtagcatcacagcttgctcagcaaaatgagttcaacttgagaaagccttcttcttaccattatgacctacttctcctaggatttctggtacaaacacattaaaaattaaagaccaaccctttaatatatatgttgtttgttacattttcaagtgctgaattctacttcgtttggatgatgacagactttactgtgtggtctgattggagtgccaccatcaaatggagtcatcccacagtccccaatgcataccaagagtttagctactctcaaacaccaggtactacttctctgctatttaacatcagaacaactacatctcttttattttgagttgatcattacttatttctcttttgcagttgcttcgtaacagacttgttgactcagcacgtagaagtattaggaaaaatgctagtttaggacaactttacggtaatatgcaagaagtttatcaacaaatgcagacccctctaatttatcaacagtcctcagctcgggtaattaagcttgttgtttaacatttatacatttaacatctttatcaagatcaaggttgagtgtagtgtttatcaaatgttgggcagggattgaatgagttaaaagaaacgacaattagtgcagcttcaagcatgggaaacatcgatgcaccagtagacgagacaatttttgatgtggaaaaagagatagatgatcttttgccagttgaagtgaaagaacagcgtgtgagtaacttgctccaggctacaatggtgggaggatgtgttgcagccatgcctgtcctcaaaatgattcccacctcagtcctctggggatactttgctttcatggcaatcgaaagcttgcccggtaaccagttttgggaaaggatcttattactcttcaccgcacctagcagaagattcaagtaaaacacacatcataataattattttaattccaacttttattcattcgcttttgtctttaaatatttggtgtttggcaaacagggtgctcgaggactaccacgcaacattcgtggaaacggtgccgtttaagaccatagcaacattcacaattttccaaacagtgtatttgctcatatgtttcggcctcacatgggtcccaatagcgggtctcatgtttccactaatgattatgcttttggttccggtaagacaatactgcctccctaaatttttcaaagggattcatctccaagacctcgacgccgccgagtacgaagaggcaccagctctgccttataatctcgccacggtactcatttttcatttttttttctaaacatttgctattaggcaccagcatcatcacaattgacactttaggaatatttaaccattttccataattaaattaaaagaaatgaaatatatatatctacaaactaacataaacttatcatggcaacagggatcagagattggagcgggggcttcatatgcaggagatggtgaaattttagatgaagttatgacccgaagcagaggtgagttcaggcgcacgagcagttctaaactcacgagctctacgtcgacaccagcccacaatgccccgagagctttcgagagcccgagtcaggtggcgcatgggtacagtcctcgcgcagcaagggagataagaggagagccaagtccacgtgcaggcggacgagggggagggtcgacttcgagtccaaggccacctaacctgggaaagagccctctaagcagtaatactaccacgccacttaattaaaataaggataatcatattgcacacataaattatacacaaatttaatccacacttacgtaaagtaattttaaccaattatctatctttatttaaagatggatctatttgttaaaaataacttatcacatgagtatgtgttaaatttgtatataatttatgtgtgcactaataattactctttgaataattaataggttttacctatttttaagctctaagggctaagcaagcttggattatgttgtgagttgtcgtttttcttttatatgttttgtggtttattatatgatgatcacttcttcgttgtataaagtcctttggttgtaactaatagttattgatctttatattggtatttcttaattagtccaaaatcggaagaaaaagaacaaatcatattgcatccatgtgttaaaaataagttgttgataagaactttttataaggtttcaaatcttatattatattctctttcatatgtaagaccataaaatggagacctaaggttgagaatataaattacacaacaataaacctttccaaatccatcaaaattgttttgaattattttatgtattgaacaagtacgtgcaaagggctggaataagggtatgaataattaaagtttaaaaatagtctgaataaaattttatgttatatagtgtaagagataaaaataagcctaaaagtaaaaaaataatttcaagaaatagaaataagaaaaaagagttgatgttataatatcatagacgataaatgcactgtttcactaaagaaagaagcaaagcaagaaactcgaagacaaaagagcagagttcttaataagaagagatgcagagaacaactcaataaggaaaagaaagacgcaattaatagattcaaaggacgaaaagaggaggtgcaatgagcagcagatgagaattagcgcacatgaatgaatcagaacagaaaagaagaatgaagcagacattcattcccgcctataaatagaagatcctttcactcgaaaaatagacagatttcggatcacaccaaactagttgatattttgtcaaaatacaccctcaaattcatatctaaactccgaaagcaagtgacccagacccgattaagagagttaagagaaaaattgtgtaaaccgattgagaatgtaatttgaatagatcaaacctggtgtaaacgattcaaagtctcaataaaaaattgtgcttgagccaattttcagcatcaacagttggcattgtttgtgggaacttcatgacacttctagaaaaatgggtttcagtgacccattttaagggactctaaatatttttagtaacccttcattgcgggtcactaatgcgagagactggaaatgtgatatttagtgacgcttcaacgaggtcactaaaactttttacagtctctcgatgcgcgtcactgcaaacttttagagtccaacttgattataataaaaagataataaccaccctcatagtgtgtcactatatttatttttatttttattttttaaaaaattatattttcattttcaactaaaattataaaactaaaaaacaaaatgacaaaatagaaaatattattattaattaaaatatttatttttattaagattattaatgaaaatggaatacaatcttcacactcaactttaattaaattacacattatatgaggtttaatacaaactcatatcagtttctattattaaaacattgaaagacacaaataaaagaaaaccgagattacgttatttatccattattcatttagaatgaaataaactcaattcagtttcaaagtattacacagtgtactcttgtaacaaaataaacctaagaaaaaatttagattcaaagtctgtccaagttcgaactcaaagttccccacactgccaaccacgaaaatcaaacaccaagctcgtaccccaagcccttcgaacatgaacgccgatcatgtacccagaatcacaaacaacattaaaggtgaaacccacgaccacctatatatataaacgtcgtccaactgcatagatcaaagacacatagctagagagagggagacacaaatattcagattgtaaaaaaaaatgtactgagtaagccaaaaatttgggtgaacttagttggggttttggtggcagagacatcaaccgtggttctacggtggtagagaagaaggagacagcgtagggataagactctattttgaagtcttattaggtaaacaatgggctcaaagtttagaagtgtttatcatcagtcagtggagctcaccttggcctttggaggttgccgtcttcaatggaggatggttggtatactatagatctcaaagggaggagggcaggttttggagaccaatgcgagaagagagaagagatgagagaaaaaaatatctgaaagagacgatattgagaaaggagagagggaaactattattagggttttgaacctgttatccaaaataatttttttaataaaaaatatataaaaaaaattgataagatccattgagaaagagagagaaactattaccgtgtctttttaatttttaattttttatatttttttattaaaaatacctatagtagcgcgtgaggcatcccgggacaagcttccccagttactcctaatgtgactctattagtcagttttttaataaataaaagaattagaaaattatgggtaacactttttggtgacccttcatatttttagtgatccacaatatgagagactaacaccataagtttaaagtctaattatgtgggtaactaaaaatcattcttaattatttagtgactcgcacaaaagtgagggtcactttatagtttcactaaaaggataaattgtaatactgtgaacaaaaagttgatgctgaagatacgaactaagatgagaacgaaaaaatgtatgggagaaactaacaggtccaagtgtccaagtgcaggagatacattgaatccagacatggatctgaatattgtgttggcattggaaatgagagaaatgaattagagaatgactgcaagagagatcacaacgaaaatatgcaacaactcgcaaaggaaaaattccagctggaacaatgtgaaaccaaagaaaaatttcaaaacaagatcaagatgaaaacatacattatcaagaagttgttcatcgcacaatacaaaaattcatggctaaaatagccgacatgcgaaacaaaatggatagaactcaaattcattatgagcttgggcaaataaatgggtaagatcctcagcagacaactacaactgattaagtgcagcctattatgatacctcagaactctgaaacggagatgagaaatcaacaagcaaaagtattaaaaggaaataaaaccattaacgaagtaaaacgaataaataaagtaaataaaaatcataattttgtgccaaaattagtaggcattccaaaaatactttaatcgagaaggtagaattcaacaaataaggatagagtgtaatatagctccatcaataatacaacaaagagtgtcgataataaatactcaaatgcagcctttgcactttgataaacttagagaagatctgtcaatagtgaaagaacaaacggaaaaattagaaattgtggcaagaaagtgaggtggatggatcaaataattagatgaccctaacagagcagccatgaggaatgtagctaaatctcgttttgctaaatgaatcatcgatgagccaaagccaaaatgatttactatgccgacttttgcattattcaatggcgaacaagattcatttgaacatgtgctccaatttgaacaaaagacggtgttggagacaagcaatccaacaatccggtgcaaggcattctctaaaaccataatagaatcagctctgttatggttcaaacaattaaaataaggatccatttggcctgcttgtttaggcgcgttacagtaatttcttaattatttttccaacctttgttaatcaaagagttagtgaaaacgtgaataattaaaacttttatatataaaataaaatttacttaaataaaaatatctcttacaatttttgggatcttgtatttaaaattttaaacatttcaagatacattataagcaaaaagtgtcgcccagtgactacaaaatttgagcctaccatcttgaagcaccaaatagttgggctttgctagaaattagggatttttttcatttcaatttttttaatggactttctaatttctctctcttttttttaattgaaaatagttggttgacgtaagaaaattccaatcacgcctgctgcagcaataattttgcaaagtttttgcaaaatcatatgtgactgtccactaagcctcttaaattgtaagttcactttttgctgcagcaaaattgtaatgaaattccagcaaaaccactagacttcaaaacttgcccaagccactaaattttgtttcttggagcacctaaaatacaacccaaagtgtaaaatccaattaaaaataaaaataaaaactagaaattgacaacagaaattaaacataattattttttttttcaaagaaaatcaactagagttataagattaaaaacaaagttgagaaacttaggttgcctcccaagaagtgcttgatttaaagtcactagctagcttgacttttggagaagtgattatcaaagaacggcttccgcccatagagagtgacatattccctcacatatggggtaattattttggacgccctcaagcttggcgagatgtgaaatttgcgagctccaatgttcaacttgactcttcttaaatgattaatggaagccaaggaatgacgctgatagaggtggattgtgtggtagaaaatacgaatcttgatatgtgtacttatccatgactattttctcactatattgatacccaaatacttgtgtatgagcgatggtggtagaattagcatttctttttgctcaaataatttctcaacaccttgggtagagatagaattcaacaaatttgaatttattattttctctcctttttcttcatcattttagattgaagtaggctccatttgatgctcaaaggtttcctcacacttctcaaaatcttcgttgtttttccaagtaatttcttcgccgtctagccacacatttcgcatatcacttggaaatataccttgagaattattatgcaactcccaagataacttctcacttgagcttagggttcaggatttggggttttcagcgatgagggagagtagttggggtgggttagggtttctgttgtgtgaaatgatgaagaagtaactgttggggggttttattatgctcggggtatatgcgatggtttaaaactgtcacctataatataggcaacatttttaaatcgttgtgtataccccctattaaaagtcgtgttatactcttaaaatcgttgcgaatttccctcacgagtgctaaaccttcgagaataccccaattttgatgatttaaactagtcatttaaatttattagcggcggtctacgaaaaaatatttttagaatcgtcgttaatgctactttttgtactagtgacttattgcttagtaaatagatttaattattgatcattaagccttatttgtggcgttaataatttaattgggaatcaatataatattcatcagtatttatctcgaatgattgtaaggtttgcaagttattcttaattattctttaaattgtaatataagttctattgtgtttcttcgtttatgattttttagttatctctttaaaaacaattccctcttttaattatgcgacattgaataataaattaaacatggttgtcgtgggatcgatttatacttgctcttatattgaagtaattgaaactattgaaagaaacttaatccgtaaatttggtacgacatacaacacacatctctacatttcagctatagtttttgtgaaattggtcgcactattcgctaatttagctggcattgcttttctgtttgaatccaagaaatttgtcaatctctagtcttagtgaccggacgactcgacaagacttatctctagatatgatcgaagaaatttttcacagacagcgccaattgttaagaatgaaaatttaactagagaacacatgctatttttattaagcgaatattgtccaacttaactattattttaaattgggtcttgaattttatccatgccctaacagattgatcgcacaaactaatgacacagtttcacatgtttcccgttttggaacatcgatgacgtcaaagaggctacctcattattccgccatgattggagaaacctcgtgtaggttgagatattcgttctttgacgggataattacataaggcacgatttttttataaaaaaaattacatttttacatttaaagattttattttacatttttacggttttccatagaaacaatacgaaaactacataaaagtaacatnnnaataacatctaaataatataaaaacaacaacaaaaaataacatgcagataacaaaaaatcgacaataaattaacaagagtacaacataaaaagaccgtnnnnnnnntaaataaaataaaaaaaaaatcgtaaaaatatttaatattccgtgaaaccgtatttttgtnnnnntttttgttgtttttatgtatttgttaaataatcccttcttttgaatgcagttaggctagacaactccttgggaaatttatatactaattttcgctatttttttacaaaaatactgtcagtcggtatgttttactttttactgtgtatttttataagttttatactgcagtatactgtgtttatttttttttagtttgtttttatttgttttagtattattttacgattttttttccataatttattttttaacgtcgatttcactgttctcgctccatcttgctggaattgatgattgttttctgggtgttctcgtggtgctgtggtggttctatccgtgggagtggaagatagaggccataaaatatatttttttcttccttttctatggtttctgtggttattttttttttttatttttgttctcctttgacgagctcactagaaaaaaaaaattgaggtgtgtgattcttttatgttttcctaagtagttatatctgcttattgttttacatttgtttttgtgttattttagtaattttttaatttgttctgattttttaagattggacttgcaaatataactgttattgcattgggcatcgaggctgtgcagaatattttttagttttttttaatcatgttttactttcttttgtttgatttgttttattgttgtttaatagttgttttgccatgattatttatttgacgtcgatgtcacttttttttctctcaatctcaccgaaattaatggttattttttgattgttctggtgttcctgtagtggttctgtccgtggatgtgaaagatggaggccgcatttttttttttttttttgtgtttaaaaaaagaaaattagccaagacaatataaaagaaaaaaaaaattggtcaaggcagtataaaagtaatttctaccgtgtgacagtatttttgtaaagattaatgacccgtttggcacaacttttgga

SEQ ID NO: 21206 - DNA, 7396 bp, Cannabis sativa
  modified_base (4669)..(4670): a, c, t, g, unknown or other
taactccatgagttaattaaggatactcgtaaatgtattcataataagttcttgcaattgaataaatcatgtcaccttgtagttcacgggaatcccatttgagacacgacattgagtaattcctgtttccttgttgtgaatttttgagacattagtttcaggacttaaggaaataaaggatgggctgcgctccagccataattcttgtagttgtgatgaagatagtagctcctttggcacctcaagctacaaaaaacaaatcaaatttatatcaaaccaaaaatctgccactgaaaattgttgaaaagcaatgcaatcaaacggttaaagttaatagcatggaatgaaacaacacctcaggttcagcctcaagaggctccttcaatcctgcttttatagcagctgtaatctcattaggggatattgtgaattcgggttcaccctttccttcaatatgcacttttcttggaacacatgcaactattgcagcaggaagaggtgcagtaggttttccataatcagaaacgaattcaaacaccttagccccaatagaatttacctacagaagaaaacaatttcagttcacacaactgcttaatattttgctcacaggcacaacacacccaaagataaataaaacttcaccataaagctatataatataaccacattaccatcaagctgaacacagtacagattccaatgacagaactagcattttataaaaatgttattacctcctcaagtttaattgttccagcaacagttgccaaactctcatgtccctgcctctggtccatcactgtatggcccaatgcatcactctccataataaaatccaaattatctacagatgacacattatcaatcatagctgccagatgttcactatctttcaaaagtgcatccatatggaaggtcagttcacccttggtaaccccaaactctttaagccgacgaacctgaaacaactcaaacacaattagcacattgtcgtcaattaaacaaaaagcttctttgctcatcaagcagggggtgaaaatgcatcaatctgagaacaggaagaccaaactcgtgtgaatattaaaaaattacaaacctcttgaacagcaacttttattgcactttgccaatgcttcggttcagcagttacagtaagggtagtaacagtgcatccttctcttccagagtcactatggtccaatccaattgagataaatggtggatttgaactctaaaaattataatgggttagcagctaacttaagtttgcttagtttattcaacagccaaaaagaaaaagacttaagcatatgcaaaacagttgaattaaaacttctgaaagcctaaatactgatgactcaagaatcaaatgactccatattaaagattaacacatgttcataaaaggggaagccaatactatggaatattatgtactacagtactagtgataatcaaccagtcaagcaagaattttgaatagtatactgtagaaaatttaatatgacattataaacacaccttgtatcttgtattaatccgaaaatgcaaagcagatagatatattctcttcatcataacattccgtaagtcaccatatgtttgaaccttattcactggaatctgcaagatttttcacaacatataattaaaagaaaggagaaaggcaatttaaattgtgtccataaacaaacattctagttgcatagagtcaaaatgttttcaagaaaatggtatcattcatgtaagcatctcaaaacataagtaactttttcaggagtagaaaaccagtattaacttagaactctattcgagtaagctgttctgcttaaacctctaccttgtaaaacatattgaaggaaaaattttgaatcagctcatgctgaaaaatttgtggaagcttctcatctgagctgcttccggggagtgaccaattatggttcacaggaggacgaactgcatgcctttcgtttttgaagattttagattgttctacagaatgaaatgatcttccattagataaacttccacccagcccaaccaagagcttaggagcaaggaaattagccattgcaccataagcactgggacttgatggaaagacagcttcagattctgcgccagtttgtccaaagactgtctgcaaataagcaataaatctattaaactggaaatacataaaaagaattcataaatatatatatactcgggtgtgtgtaacctacttctatctggaaaactgtttttgagatgtcatcaatatccccaacaatgtacaaggttgcatttccagggaagtaccaacgctcatggaattttcttattttgtcaacatcccacttcttaatctggtcttctaatccaattggaaaccttttgctcaacttgttttcagaatgaagatgttgtagcaactgcacttgaaaggaagagaagaaaaaaaaacacattgattgagacagtgatgagcaatatgatataagccaaaaacaaagatatatatcctcagttcatacctggcagtcaagacgataatcaattgtattcatcatttgtaattctgaaagtatcgcacgcctttctttttcaactcgagaagaaaggaactttggatggaaagctatctattatgacacaaaataaataataatgtcaccttagaagtacaagctttctttcaaattaaacttgtatcaaacacatacatgaaagagaagtttgaagaaaaagtgtgaatgaaagacagagaacaagccaatgcaattaatgtagcaaatccagagaggtcatacctcttttaacgcatccaatacatatggaagtagatctccatcatagtcctgaaagcaccaactaaatgttcaactataaattcttatgtaaaataactcccagtagaaacagtgaaaataaatagaataattcaaaaaagattaccaacaaaagattaagacacagtactggagcaaaagagagagagtaatgaaccttagaactagttggtgaatgaatatgaaacactgtatgatgaaaatcggtgtaagcattagattgtgctcctgtcccaagaagtttctcacgtttctgacttccaaggaaagctacatgttcgatcatatgtgcaattccttgctcatcatcttcctcatctattgatcctacgtgaacttccatgtgggcttcaaacctagaatcccaacaattttgaagttggaaaatgcatataaaatgatttttaattagtattcaacaacataataacaaatacataaagcatttgtaatggagattatgtaaaagaatatttttgcataatatactaagaatatgaattgggactagacatttttgtaatcttctaacatgagacaaatagtcaattttaaaagaacttattctcaacctttttcacatattaatttgtccaaagagaagagtttgactggaaggtttggttaacaatgtgaaatactaaaatttgtaaaataatttcacttatttctgtgtgaccatgatggtcccacagtataattctatggtcgtcttccagtcataataattatttatggtcgcacaattaatgtaatataagttcactaataaatttttttgtaaaattattttgctaatagaaaagtttcataaggctgtttttacaaaactcgaaggtttggcacttcaatgtctgctcttcgtttcaagtgttgggttgttcgtccattaaagtggtacgtgagatgtaaagttaaaatgagaaatgaattgaacagtacctgttaggaggaactttattgggtaatataagataaatcaggccattgttcaattcccctcgatagagttttggatgagagggaagttgacaaggtaagaactcatccaagtctctgtcatttatttctggcaaggcagtgctggctgcgtgtggctcatgcgaaccaacagttgcacataaaacctttacaaaggaaagaagaaacattacattaacccatatttacaaagtaagaagactactactacttgccagctgggtatcgcattgtttggtattgaataagcaaaaagaagatggtattgaatagcctcgacgtcgtctcagaggattagctttgggaaacaaggccggatcgccatagatagctcgaattggatgcctgtgggattgtgaaaaaggaaaacaaaatgatcaatcagttatgagaaaccctaatgtaacgataacaacatcaatgataatatagatataccttgagatggaggaagagagtaagaaggataaaggtgaatgaagattcaatggcggaagaagacggggacggaggcatttgagcttgaggcgatcatcgatgcttaatctgtgggaaaagtagggagtgattacagtggcggccatggatcaaccaacgtatatggcgtacacgacaagcaaaagaaagcacaactttttttttttcttcacgatacaaaaataacttttttgttttaaaattttttaaacaacaaaaataaaaacacaatttttgtttcttatttatttacacgacttttggtaacatttttatttttaaattttttaatcacaaaaataaaaataaaacttttgtttttaaaacaaaaatgtattctataaccacttttgtttttcaattttaaaaataaaaannaaaagtgtgttctataaattttatttttatttttatttgttaattttatttaagtcgggtttagggccgagtccgaagtcggaattgggggcgggtccaagtgtggggtcgggtcctggttcgatctccaaggtctaagttggggttagatcagtctaaaataatgaaaaattgtttaaattttttttaaagtaattgtttttgtttttaaaatttagatttttaattaagaaattgaaaaataaaaataattttatagaatatgattttaaaaaatattttaaagacccacattagcatattcaaatatcttaatataactaatatataaaattaatctaattgaaacaaaaattagtgataaagacaaattgaatttgtataagattgaagaattgccagtacattacactattgcgttgataagagttatttttacccacgtaaaagtgcgttaggaaaaaatatcaaggaataggcatttgcacgaattgctatgacagcgcaaatgtgaggttggtaaaaataggttttgctagtgcaaatgtacgctgctaaaaaattaagctttttacaagtgtagtttacgagatgtgttggtaaaaataatttttactagttgaataataaaatgcgcggagaaaagtaacatttttttagagataataacgataagaaaaacatctttctctaagtgactgaacaagtcttactacagttgttttaacatgcaagtctttcttctgcttatcatcatcttaattacttgtgataccttcatgttcatggtcaatgttcatttttctcacccaaaaaaaaaaacaaaaagagaaagaccagaaatataaatgtaatattttgttatatatatatatttattaagtttcttaatgttaaaaaaaatagtctctttagctattaaatttgtcactttgtaatgttttttatgttatgtttatctgtttaattattttagcgataaattatatatttatctgtcttatttgtttttaaaaaatagtaaaattaatattttaatatatgttatcgaaagaaaataaataaagttgaaagtgtaaatattagagctacgtaagaacttacaagcaaaactgcgaatatttacctaaattagcgattactcaaaataaaaatagcaattaacaagaatgtaaatatcgagtatgtaaatgacacaaaaaaattatagtagttccagccaacttaatttacttagttcacttttgaaagctagattgtgattaatatcttattcgtatctattaatcactcacttgtatagaaagtaaatgatcattcaattacataacaggtcagataagaccgttacaatattaattacatttaattggaatgaaacatgcttgtaaaataaataaaagaacaattttgaccattttcttatttaatattcgaacaggcgcgactataccttgatcgcacatcgaccgtttgtattcttggcaacatgtgaactgatcacgagttcactcaagttgccctgtatattgggtcttggacaatatgtgttaatgcatcaacctctcggggtttttatgcttgagattataccaatcgtgtattgagcattcatgtataattgataatataagacttgtgggtccatcattgtcgcgtaaaatatatggactaatcgttgtaaagatgcgatctttacataaggtgcgggggagagacaccggttcatcgtatataatcgatatatattgcggctgtgctaactactctctatgccacacttttatccattttactatgggacacatattgtgcaactagaccctgtctcggtcgcacattcttgtatatttttatcatgcaaagaaaaattctattagagtttatactcttgagatgtcatttttttcttattgggaattaagtctacatgttagataaatatgagactgtagaaaaattcatcgtgatattcataaaattaattaaaaacaaaattaagtttaatatattaattaataaaaagaagaaacaaaactacttttttattaacagttagggatatcacgtttgccttctacgctaaggatttttttagcatttatcgaaattatattttaacaatcttacctattttttttaaaaaaaacattattatataatttatgatgtggaaaataaagatttataataactaagactaccaacagaaattaagaagtttgaagtgattctcttctgtcaaaagtgttattggtgggctattaggcagtttggtcttaatagtgtattatgtcactcttggcttccaactaataacataagactatatatcatgctctatgaggcttttaaggtaaccaagaggtgtggaagaaatgtgggttttggaatacataagactttgagctatttgttaaattagatctcactgtaatatttattattacagtgttagaagatgaagtgaaaaatacaaataaaatacaacagaaatcagatcctatgtggctttgcctctagtggatcaagaactagctgttagttacaaccgaagttgtaactaactcctagttctgtgatcaaccctaaactacaactataaaagagcactagagcaatacaagaaaggtagagtgaagatataccagaaaccagagccctaggttactagatctgagaagttgttcagctccaaaagatgtttcaagttcatgcaaaagaaa

SEQ ID NO: 21207 - DNA, 2263 bp, Cannabis sativa
ccttattgagaaaccaaatgttacatctttaccaaccaaatatctatttgaattttttcttctttttttttaaataaaaatccatacttgagaaaaatacgtacatgaatgggagcatcggccttcaattcacatcgagttctctgaaattcgagatgaggtgaaagttttcccattggaacatctggaaggtcctgtaaaaatttcaggatctgattttgggacgattcatcaagcgattctgactcggtctctgtttctgactcagtttcagctctcggtattctactcgccatggttgtctactactacaactttgtcttctccactagaggtagtgtagtagctacactgcaaccatttgaatactgtgaggttttgttagggtttaaggtttaggaacgatgacagggaaggtccataatgggctgggccggattgggctgggctgggctgtactatgataaagatagtcttttttcaaaaaaaataaataggaaacttacaaaaatactggaattttggttaacttttacaaaaatactgtcacacggaaattttttcaaaaatactgtttttataaaccaccagtaaaacacaaagcagtataactcaaaacaacagtagaacattagtaaaacaccagtagaacactagtgaaacttaacaaagtatactgcagttttgaaacttataaaaaaacacagtaaaaaagtaaaaattactgcctggcagtatttttataaaaaaatggcaaaagttagtatactatgtaaatttcccaaaaaaataccatttttaagttgggatattttcgtaaatacccaaaaatagtaagaaattacaaaaatataattttaaacatttttaggtttataagtttttatttacaaaaaataccaaattgatgttttcatattttgtttttgtgttataatcttgcttttttttttttaattattgtacgttgtttttatgttatttttttaatgtaatttttatagaggaaattatattgtatacccattttactttatatgttttaatttttacctttatttatatattctttaagatatacttacttttatagatgatatcatcattatacctcttaagttaatgtaaattatgtactagacttaaatagaggttaatggtatattgggcaacctacttacaaaagtgggtacattttaatgaaatataatatgagaatgtttttgattaatggatacaaaaaagaggtatttctcaacttattccatttttatttgacatcataaaattgtaaataaaaaataaaaaaaattatttgactgttgttaaattttttgggataagttgaagattacctcttttttgtatctattaatcaaaaataccttcatattagtttcattaaaatgtacccacttttatgagtgagttgcctaataaactctcaccctccacttaagtctagcacataatttacattaacctaagggatataatatagacgtcatttataaaagtggttataccttaaagaatataaaaataaaggtaaaaattaaaacaagtaaaataaagtgaatatacaatataattttctcgaaaattttgccaaagtattttgtttaaagtttcctaaatttttcatttgctaaagtaccaacttcttttgtactatgacaaagttagtctttgttttcaaaaataccacttttaagcttctaattttttaaaatacatgtttttatctattgagttgacaaataattaccttgggtttcggtttcggatccttatgttttaacttaatattatgatatattcttaaatttttttaggagaagaattccaatttgaaaggtggcaggccttccggtcaagggagagacaggtggatctggaccaaagaaggaaacgggaaattcaccacgaagtctgcttatttgattcaagctctagaaagagcccccgcctgtgtggtggctccttctcactggaatagactatggaactccaaaattttggaaagacataaaatcctttggtggggtatcctttcgaatgctttgccggtccgtggtatcttggccaagagaatccaaattgaagatgtaacctgccctttgtgtggggaggctgaggaatcaatgaaacacctgtttctatactacaactttgcttaccatctctggaggtcttctccctggggggtgtacccaatacttaactctgggggtcgggattgggactgggtcaagttcctttg

SEQ ID NO: 21208 - DNA, 2653 bp, Cannabis sativa
tatttatatttgtaatatatatatgcttatcaaattaaaaataccaaaaagtataattattttaaacaaattttaagttcctattcaaaataaaaaataatgtttctattttctacttttgttttctttaattactctagtctatatacaaatataaccgagttgctcaatatttatgtatttatggaatttaatttttcgaacattatttcatagacaaagtaaacatggaattatttttttctcttcaaatggttgcaacggtcaaattcttagatgtcaaaaatattaacaaaaaaaaaaaaattgtaactccgaacagcacaaattttacgagtctttacaatccaaatagaatatgagttttgtttatcgtattattttgttttgtgtatttggagtataacataaaggcacttatattatatttttttgctttattttattgtaaagaagaggatggtgcatatttagtggagacatggtcactcccattcccattacgtacattatcccaaaacagagaaagagagaacttccaaggcttcacgtttctgtacagtacaacactcaagtcttccttatcaattttatgaaatatggatcattattaagtttatatatttttatttgtcaactatataagatttttttttttaatttcacatttgtggaatctttaggttaaggaattagattcttccctttctatcttcatgcgtataatttgtttatcgctaagaatattcttactaacctatttcatatttttgttttaaaaaaaatctatttcatattttaaacacgaatttatatattttttttaaaaaataaataaatagtaattggaatatgcattttcattgtaaaaatataattacaatgagccaaactaaagaagcatatactacttacttttgtatgtttttttattaattttttttgaaaggacatatactacttacttaaatgaagagctttcaacatcaaattgttgtaatgtgtttttcccttataatatacatatttactttgagattaggcaattgactaataagtgatggagaaggctttgggcccactcgccggcccatgagatcattcatcgatatttcttatttgtgacggcacgataacgatgaattaataaaaagtaaaaaacaaatgatacagtttgaaatcatgttctttattaaataataaaaatagtgaaatacaaaataataataatctatttaaaaaaatgattatcaacaaaacatattaaatttggaatttggaaatatctaaggtagtggtggtgggggtgattaattaaacaatcctatcttttataaccaaacccaaatttgaggtttcattatggtgtaattaaatattatattatggtcagttttgttctgtctttttttattattatattatttaaaagaaaaaaaaaatgtaaatgctaaggaacaaaatttggatttggtaagagttagtaatagaaaagaacatgaaatgaatatgattattgattactaacaaagtatgattaaagtttattatcactatggaattcagctgttttagtgaatcattttataagataagggaggtggagaattgatagctattaatattctggtcttattcattaaaataaaatatttcacaatgataagaacattaatcatcacgtttcatcaatcattttacaattaaaatactatatattatacgagtcaattagatgaggatagttcattcaaagagagtgaaagctattagggtatgttcttcaatcttgatttcatttttaatatcagattctaaaatgaaaaatattgaagcaacatagtttggatattaaaataataatcttggttcaattattattattattatttgaaatggattattattttcgttgagtctatggctatcttatgattaggcaatggaaattacaaatacttaaagaaagaagtaaaagaactttgataaatataatataattttcttcttaagcttttccatggcatattatacttatttacatttttatggcttcttttcacatatttgcaaatttattaacaatatgtcatagattaatattttattacttctattattgttatttgagttaatatcattttgaattatttattttacaaaagttattgattggatttttaattttgtaaaatgataaattagactctatattttttaaaatagtacaaataatagtaacataagcacaatttttgataattttcttttaatataactaatttaaagacaattttgacacgaacagatgcaaaaaatatactgaattttgttataataactctaaattagattattattaacttttattttgataaaaaatcagttcaaggtactattttgtaataccctactagattaggcgtgttatcgtgttttcatgattactatgcatgcctttactaatcaaagagtttattaaaaaacgtggataattaaaattttcttaaataatataactttttaaaataaacataattttttttataagtctgggatcttgttaaagtatgcatcaatcaacaaaatacttgcgttacaaaaaagttgtctttatatgactattaaaaaggtgatcagcctaaactgtccc

SEQ ID NO: 21209 - DNA, 3005 bp, Cannabis sativa
  modified_base (31)..(41): a, c, t, g, unknown or other
  modified_base (2681)..(2688): a, c, t, g, unknown or other
tgatctacattaataagtaaatctgattatnnnnnnnnnnnttttatttagggtataaaacctaacacttacaacctagtttgcaacacttgatattatccatcaaatgtatgtttcgcacacctcaggcaaagggctccatagagaggtttgagcatacgtagcaagccgtgaaggcacaagggcacaaagacacaaatacataaggtatgaagtacaaggtacaaggtacgaccaaagacctgcaacatgagcctccatgcctctgtaagacttgatctaatagtggagacaaaatctgcaggtgttagtacgacctaacatccgactaccagtacctccactaccctatcaataatgttgatttggtagatacaagtgaggtattttatgctttttggaccacttgtaacttagggttaatatagttcaactataaatagaacttctttccattggaaaataagggttggaaaatcataccttttaactcatactcttaaattcaccattgtaacttatattttctcaagaacttccatagttaatcatcctcaacattcatttttacattgatttttcgacctaatttgattgaggagttcttattgtcaacaatatatttatacatgatgcaaaagtcaacaaaaagaggtatatacctattaaaatatagttagatcatctctaaagcttcgactaatatggagaaccactgcttagaaggtaaatgttgaacatattttagatcatttgatatatgtgtgtgtttttatactttttttgattctttagctatatttcaacttattctatattttagttcgtctattgtgagtgctcttagattcgagattacagtgaaagtaaattttactagtagagccaatccagctacatacatacataataagaaaatttgtgacataaatatctattttatttgttttgttgataataaatactcaaatcctagtagaaaacatgctcaaattagtgattatcgttattcttgttggtacccacttaacaactccattagttgctaaaagagtgccacgtgttgatctctaatttgtctaaatcataattattattaaaacttatttaaattaaatttaaaataaaaaacccagttatattaattttttttttaaaaaaaatctttttttctttctttctttcttcttcttcttcttcccttctgatggagtctctcgctactccctctacacctcccatttttggcctacctaaccctactgtcagactttgcacctccgaacctaaggcttgaccaaacccacgcccaacctcctctcctctaaccaagcattgtcgatctcatgggatcttgtagaacacacattactacaaaaatcccattccatggccaccaaacctagacataatttcttttcatgtccctatgctactggacatgatatccaactctgtgttggatataaaatatatataatgtataacattgttgaatgtaaaaagggatcccgcaattgaaactttgtcatatccaaaattgttggttgtacatgaaatgtattaatataaaattagtacattttatgtccaaaaagttggacatgaattttatgtttgcatttaaatagcaaatgaatatcttgttaacactctccaatgccaagaagagaaagaacaccctccaatgcaatccaaaagaagctacaaccagcaagctaaaaataaaactgaaaaaaaatatatgctcatcaatctactatacaatctttgctcctgtacattgtaatttctaacttgtgaattgaataatatgttagaaaatttctcattacaagagagaataggaagattacaatcgaaatactcaaaatacaaataaaattatttcatcaagattacaagaaagctaaagaagaagaagaagaataacacacaaaaagcttgaccaaggctcaagaacctttgtcctaaaagtcatttcctccctcatatggacaattagggaaactctagaaatactcctaaggatttatcaagcctcatatactcagcctagtgtttaaggatgagcatatcctcacaaagttctaaccacaaaaactgattttaactacttctcttacaagtgaacaatatgacctctatttatagagttttcactctcatatgaacatgaatgaccaccataaagtccttggatgttaccaatcataaattaggcgtttatggtattaattgggtgatttggaggagttttgggctgttagaaagactctcaaactttcaaaaatgtatgcaattgtatgctgaaaaaaaacagtaactagttaccattttttcagctttggccaattcttctccaaaatgttccaaatcattcccacttgattttgaaccatttatacaccttataaatgaataaatcaagtctccaacaactatatttttaatagctatcattcattcacaataataaaaaactagtaacatcttctactaatttaattgtgaaaagaggtgagagttagagattcaagtgatcatcaatttaaaagatttgcaactcctattttgtgatcattctacacacattatgtaactccataatgtatgtgacaatttgacaaaattaatactttgtcacacttaattatttataacttaattatttaatctannnnnnnnattatataaaataatataacaatctaacactagattaaataatatctcaattgtagcaaataattttgtaacacaacattttatttaatcaatcattatattatggagtaataaaatattcccccacttgattaaataacttcactctcatagaaaccattgcatttgtgcagtgtaaaatatctttcgactgaattttattttagtgtaattaccacaaaatttatcgaaattttgattaccgtagcattaaaccactatttcttgataataaaccggtgataacacacacatttgctatgttcactcaagaacct

SEQ ID NO: 21210 - DNA, 2183 bp, Cannabis sativa
aaaaaaaaagttgtaaaacattaaacctagggtcctatttttaccattttagaaaattcaaggtctattttgtcatttaacaaaacagagggtccaattagtaacttttgcaaaacacaaggtccgaaatggtatttacctttaaaacaatacaatttgcattttgattaattttgaattttgtgtttattaataaatttgataaattatttataaatatattaacgcttaaaacaataaaaaaaacatcaatatttttattttagctttaatttttggaaaataaaaataaaaataccattttacatattttatttacaattttaagacctaaaattattatttacaaaaatacatttttaaaattttaaaactttaaacaatattatatttttcgaaaaaaaaaaaataataagaaaataactaaaaacaacgagaaatcaaactcacaacaactagaaatttaaagaacaaacaaaaaaataaaatcacaaccaacaatatacgtgttattgtaaataaaaaaatttatagaaatgaaaaaaaaaattctatgttaaattattttttttaattttttcgattttgtttatccgttttataagttatattaataaaaagaaatataaatattgaaacattttaaataaatgatttttttcaattatttttgcctttataagaagaataaaaatgaaattagctcaaaataggtaaagaaatacatattttttttctatttaaaataaaaataaaggttattctttttgcaatttttagaatttacaattaagcttaacttagtagtgagctaaatcctaggacaataaaatgacagcttccctccaaacattgaatctgtgtgccatgtttaatttagaacccatattttgtatttattttacatttttactctaaagatgaacagtacaaggcaagaatattgcttcccatattgaaaaaaaaatgaaaagaaataataagaatatctaagaacaaactatagcttacaaaattataagtaaatcaaacacttataagaaccaaataatcaaaaggacaaatcagatatctacaaagggctcaatcaaagccaattggccacttcaaaatcaaaaacactttcctcacccggcggcgccacgtattgccacagggaacggtaagccgacatttcctttggaacaacacccaattcagcaagcttcttgccatactcctgttaagaaaacattgaaactcagtgtccatttcaacaagtaaatacactcaatgaatgtgcaaatgaacaaaacctacattgatgtcaagaaacaactgcctgcagatcttgtcagtgtcggacacgttgtgttccgagatgtctgagcttgcaccagcacgtcgttgtgcaccttgtcgtattctctgaagagaagactctgttttcctagcctggtcatgacaatattccaatataatcaaggcatagaagtggatctagaaaacttctatcaattgttggtaaagtttatgtgggttatgagaatactaaccacactaacaagatcagcagctaaatcataatagcgactggtaatctctgctgcagccctgtcacgcagttccttctttatttcactggttaaatacttagtagctcgctccccacgcagaaaagtctggatgttcaatatgaaacatatttggtcaaaagagattttacatacaaccttgcaataaaataaaagctcacacaagttgctcaattgagtgttaaccaccatctcatgtattacttaaatcttatgacaacaattggaaagaggtttagacaacttaatgctctaaaatataaggactgaaaagattttagaaaagtggaacagtcctatatagaaatataatataaccacatagcctgtggaatataccatttacttttaaatgattagtgagataaaattgttgttattaaagaaactatagttcatgtacctccaacggacgcagtactcctgaaacataaggtgaatgcctggttggaataggtttattcgtcatcctgaaagttgcagttatcccttttaactgtttcaaatcctacatttttgaacatggaaataaaaaggttaacatacttgacatcaaccagtatagcataaaatgaaataaatcacatactcattcatattacatcatgt

SEQ ID NO: 21211 - DNA, 5424 bp, Cannabis sativa
  modified_base (46)..(60): a, c, t, g, unknown or other
  modified_base (4415)..(4416): a, c, t, g, unknown or other
ttttagaagttcatatttaggctgttaatcaacatacttgtgagtnnnnnnnnnnnnnnngtaaaataatttccaacactcccatctctttcctgtgcatcaatctcaaaaagcatggtgtttgctctcttcttcatgtcaatcaaggtgcagaagtattcctggtattaaaggccacaattactttcggtaatgttctctatgtatgggttaaaatgatggaagtgatagaatccttcctcctttcgagttggacttctattaaagtcacaaaggaagtttatttcatgaggggttgggataggccaatttctcaagtggtaaaagaagaagaaggtggcaaggatcctatagccatttggatttatttggtagggacaaactctaaggaaatctgcaattgaaataaaccacgggtgcgaaggaaaataagcacccgcattcatatgcaacctcaactaggcactacaacaataattttgggagccagtaggaccctcagatcgtggattctagacaatagtttctcgaaggagatcatcatctctaatcaattgtgttttgtgttcagttttgttactaaataccaaaggtctctacttgaaactccgatctctagggtcttcactctcagtggcagctttgaggagttcagtttccatcaccttcccaccacatggcttgtataaggtcttagacttaggcacagtcaggttatctctaattaattgagccacatggggcaacgatagtgaaatacatagctcgtgtttacagagtggtaagggtactttatgaagtaccgagattttgtgattacaatgttgagaaattgattaagcatgtattatgtgataggttgtaatcaaatacgttttgttatagtgttactagacaaaccttatactgcttatgaagttagtcacttttcttgtagaatctcaaagactcacgaagggtaagtatacgtgttcatagagatgtaaggttagagtgctttatgaagcattgagattatgtggttatggtaatgtctgaattaaagtgctttatgaagcactgaaggtgggtatttataatgttgtttgtttagcgtgttgtatgaaactctgagattgttgattatgaatagttataaatattcttgtttatgtaataagtgcgctcgcatagacgttaagttatttatgcaccttgaatgtgtatggcctattggtacgtatgttatattgtaataaaatttgctagcacattctatgattttatctactagcccttttcttgctgagtcattgtgactcacgggtgcttcgtgatgcaggtaaggaagttagaagttgtgttcggccatgagtcagaggtcttctagcaatatagatatcagtcgtagtgtcttagctttagggaagcaggatcgacttcttttctacgttcggatatataactttattttcgtaacagtgatttgtaaccaattgtaaaagaaatttataaacaggggatcaccatattatggtgtatttagtatgaaatttttatttcaactttgtttttttttttaaaaaaaagagttttaattaaaccacacttttctaaactaaaagattagtaagaaataagtttgtaacagcacacacgtggcatctctgagggttagggcattacaacatggtatcagagtgacaaggtttcaacatcctgaagacgggctcgatatgtacattggctataaagactcgtttgactcatggcttagtatgtgctaaatattagttgattaacatactatttgttgattatttgaattgcttacttatcttaaatgtgtgagttaatagagaagcatgatgtattttgatataaaactgttaaatacgtttatgcatgggcggtaatgcttattagcattaattctagtgggaaagtttctaaccacgaaaaggaacggttgcaagtgtactagaaggtgtacctaaggcgatctagtaagaataattgcgagcctattaggctaggggtaggtggtgtgggtatgaatcttccactaccataagactgagagcaaatgcatgctatgaagtaagagattacttgagtgacaaggttgtagaacctgtatggttgatctcgagcatcgcattgatgaaaaatgacactaagttttgttttaattaagcggctgctaaggctgctaggaaggctttaaggtcgaacgagtatatcactcggaatgtaaataatatggctaaataactaggagatgtcggtcttatgcttagatggttgagctaatccttattgctgagggtgaaggactaagtcacaaaagaaatattatgaagagagattcatgaaaataaatgtccagtgttggatcgggtaaagggtgttgactctaatgatcgtaaggaaaagactaacaacccattggttacgggtcctagtaagagaatggttggttgtttagttgagctaaatttagatgatttgaggtaatgttgaggattggattgacttgtaaagtatagtgcaaatattgattgggaaggaaagatggtaacttttaaatcagaaggtgaggaccttcatgtttttgggcaaggttcaaaggtcccaaaatctattgatcatggagtttaaggcagaaggattattataagatggatgtaccaaccttttacttagtgtggcaaatattgcaaagggaacatcagtgggactgggacacaaacttgtggctcaagggtttctagatgccttttcagaagagctaccaagattattggtgaaacgggaaattgattttcaattgaattgatactgggagtaaaacatgtatttaaagttctgaattggatggtaactatagaattgaaaggggtgaagattccgttgtaggaaatattaggcttgaaattgctagcttgagtatttcgtcctggagtacgccgattttacttatgagaaagaaggacaaaaccttatgagtgtgtattgactgctgggagattgaatcaattaacggtgaataatgagtatcctttgtcaacgatagatgttatgttgattaattttaggaaaggaccatcttctctaagatcgctcttcaatctggttattaccagttgaaggcttgaaagaaggatattcccaaaatagctttttgtactcgatgacttcgtagctgttttcattaaacgtattgtgatttctttcaactcaaaggaggcatatgagaggcatcttttgatggtgttgcaacgtccttggaagtataagctttatgctaaatataagaaacacgagttttactaaccccaaatttactgagaaggtttagaggttctctagaattaacatggtgctacgagatagttgttgagggatgtctatgtccttaatggaattaagttgaaagaattgaaatagaagttacctatagcaacagtgctaacgttgccagtcagtaaggagaaatttgtgaattaatgcgacacttctaaacaaggattatattatgttttgatacagtccaggagggttactgcctgtgcacctggacaattgagggagtgtgaataatggtgttctaatcatgatattaaattgacagcaattgttcatgcactgaaagtttggcgttattacttatctggtgaaaagtgcaaagtttatacggatcataagggcctcaaacctctcttcacttagaaggatttaagtgtgaggccgcaataatggttaaagttagttgaagatgataactgtaagattttctagcacccttggaaagcaattgatagtggatgctttaggtcgaagaggtgtagatgtaactagaaagagatatcaccaaagtttgctggaaatataaccagagcacagattgagttcgtgacaggagcacttgttggtatcatgttgtagtttgatctattggaaagaatcaaaaatggttcagtagggtgactctgaattacaggggtacaaagaaagatttggagcaggttcggtaaaggactttttgattttgtctgaaggaattttatgatataaagaaagggtacgtgtaccagtcaataaagttaacgaacagaaagttctaaatgggtcttatactactctatacattttatactcgggaacaactaagatatatcatgatgtgaaagtcctttgttaggtatcaagataatattgcaaagtatgaattagatgcccaacttgtcagcaagtcaaggtatggtagggctttatgaatttatctgagtaagtaggaacaggtgtacaaagtcagtagagttttctatatcaaagcagaatatgattaaatttaattagtgtgctaatctatttgtcaaggaaatagttcaaacttgtgatgctttaaaagtaattatctcagattgagattnnagtttacatctaaatgctgagagagtctgtgacaagtatgtgtgattgattttgagagttcctgaaataagtataatctactgaatgagtttcatataataacgattattagagtattgttaaatatggtactgatgtagtttaaagattcaagttcgtatgttgcttatataagggatggaagagctatgctgatccaaagtgtagagatattaaattccaagttgggaatttcatctttcttcaggtggttccaatgaaagggaaattcaaaaattggaaagaaagggaagttaagtccttggttaatcggttcgtttgagtttctagaaagggtaggtcgggtagcttatcagctagtcatactccctgttttatctggagtttacaacatattctttaatgttttataagtatgaggtagaagcaatctatatacagagttatgggaatattgagtttcaaacagacttgttatatgaggaacaatcgaaatggattttgaacagaaaagagaaagtggtgtggaaccaagaccacattgctaattatagtgctgtgaaacaacaacaagattgaaaggcaatttgaaagttaaagtcccagttgcgggagctgtatcccaagttatttgaataaatttcgaggatgaaatttttgtaaggaggggatagttgtaatatcctggaaaatatactaatattttaattggatatattttattaaatatgtgattaagtgagtattagagtaagattataatcatacttaaactaaatacgagttgattagggaaataagaataaataaagtgtaatttattaattagggagattatatcagaatatgtgggtatcatagatactataatttgaataaaatatttttgggctaggcaacagtggaactcgacggggtggtcaaagatgtcatgacggtataagatgaattatttggaattggaattataccaggctagtttggaattttaaattttcagtttggtag

SEQ ID NO: 21212 - DNA, 2299 bp, Cannabis sativa
tacaacaaatgtaactacaaatattaattcctaactaacatcatcgtcacatagctacacatacatttacatacttaccaaatttattaaatcaaaaaccaaccaaataataattcataaataaaactacacccaactaattttatcataaataaataaataaactactcatcaaaatcaacaactatacttattattatcattactttatacatattatataaacttaacttgttatttatcattttcttcctcatgccaccatggaattctacaaccaaaattcagatgatatccttagcactatatacgaagagagaagttacacaaattcaattgaaaccccaagaagtatcaatctcacaacaacatcatcatcatcataatcataatcaatactatgatgaaatatatgatgacgaattataccacaatgataatgatcatgatgataatgatgatgatgatccttattattttagcccattagcttcttcaagcccaaaccaggcccataatcaggcccggcccagtttaatcccaccaccgagtccagaatcgccatggacttgctcaccactccaaacaccttctccttctctcctttaccactgcattgcctcacttcaccgccacgacgggactatatactcagtcgcggtatcaaacggcgtcgttttcaccggctcagacagtacgagaatccgcgcgtggagaccaccggactgtgtagagcgtgggcttttaaaatccacctcgggtgaagtgagagctattttagcctacggtgatatgctttttacttctcataaggatctcaaaataagaacgtggaatttcgctgtcgtttcgagtaattttcttttcaagaaattgtcgtctataccgcggaaacgacggagttcgctgtcgtttcagttattttcatcgaaaccgaaattattaaccgaacgacataaagattgcgtttcgtgtttggcttattatcacgcggagggaatcctctacacaggatcacacgataggacagtgaaggcttggcgagtttcaactcggaaatgtgttgactcgttcgtagctcacgaagataacgttaatggaattttggttaatcaagaagacggttgtgtattcacttgttcatccgatggatctgtaaagatctggagaagaatctacagagaaaactctcatactctcactatgattctccgattccaaccttctccggtcaacgccatagctctgagctcatcgtcttcttcgggatcggacggtggtggtggaacggggtttctgtattccggatctagcgacgggaccataaatttctgggagaaagaaagaatgtcgtatagattcaaccacggagggtttttgcagggtcatcggttcgcggttctgtgcgttgtggcggtggagaagatggtgttcagcggatcggaggatacgacgattcggatctggcgaagagaggaagggaactgtttgcatgagtgtttggcggtgttggacggtcatcgtggaccggtgaggtgtttggcggcgtgtttggagagagaaaatcttgttatgggtttgttcttgatttacagtgcgagtttggatcggacttttaaggtttggagagttaagattttgccggaggaggaaccggagccggagacggaaccggagaataggagtgtttactgtggtggtggtggtggtggtgggtccgagtttagtagtgagttggatcggaacgattcgaggagtagtaataatcagtattattacgagactaataatacgactagtcctgttttgtcaccttcttgggttcatgttaagaagagtgcgcaggttaagcatttttttcagtagtagaaaaaaaaaaatacttcttaattatgattataaatttataatttatacatacatattatatttgtgtttgttatttgtattattaactttacttaagattaattaagctacattactatttttttttttccacgaaaataaagaataattgacaagtcactatttttaacttatgaatttaatttatgttggttaggctactttaaatatcgggttatatccgtatggcctaaccaaatatatagagtcacatgtttttagtttagttagttgtatgcactaataaatatactattttttatgttttgttagtttagttagttgtatgcactaataaatatactatttttattaagtttaattaagatttttatctttaaatttttaaatctaataaatcatgtttttttttttaatttttaaggttgtt

SEQ ID NO: 21213 - DNA, 3381 bp, Cannabis sativa
ccatggcttggctcttaagacaaccgtagcagcggtatgtttgtttaacaaacctttcctgttttcatttttttacttgtttgtcttgttataatcatcactagtgattgcgtcgtagacatctgtttcaccaaaatggcatgttacatgttattgaagaattggttttttttattgagatttagtggaaacttatctagtgctattcatgcagatgatggtaataattttttgttttatttagtaatactactctaggtgtcacatatattaggtaactagagttttaaagtataaaattcttctagtttttcagatgtatctaatttcatgactgtgtttagtttcctatttttatatgcttacatagttaggcttagttatcttttattattcgcttgatttgtcaagaataattagttaatgatgaatgttctctttctaaattccttcaaatcttttcaatctctataaactatatttaattctgtgctatctttctattctttcttctttcacccttggttacattttgctatgttttttaagcttattaatgatggtaaagtatcactcctgagttttcttggtttaaaatgttgtatctgattggctgtagtggcaattgtttttttctcttacgtatgcacacaaatttacaactataatgtgtagcttattatgcaagactggtatgggctgcacagctagatgagcttattgcacaaaatttagtgactcactcaaaattttcttgaagaactatagaggattttcttgcataattccattggtggtttcacctgatgtaagattttaattggagctaccttctgctgccaggtcagagttaatgctttgctgtgcttgggggatttggttactacgcttgataaacatgctgttctggaggtcttgcaaactattcatcgttgtacagctgttgatcgttctgctcctacccttatgtgcacacttggggttgcaagctcaattcttaagcaggtaggtttctaatggtaacagaaccttttaattagatcttgtctagtggttattatagttggaaatctcatacagtacggagtggaatttactgcggagcatgttctaccactactcacacctcttctcactgcccaacaactaaatgttcagcagtttgccaaatatatgctctttgttaaagatatcctcaggtatcaatataaagtgttcaacctgtgaatggttatgatcatttgtgtctcccattcatgcacttgcagttttcaactcatagatttatgggactgttagtttccataattatattatatgtctggcgtgatgacaggaaaattgaagaaaagagaggagttactgtgacagactctggaatcccagaggcaaagccagctggtcatgccaatggactccagcctaaagcatcaagcagaacaactgaaactgttaattctacagctaagaaaagtcctgcgtgggatgaagattggggtccaactacaaacaaatctgcctcttctgtccaaagtactgcaaacagcattaacagctcctccacaaagcctgttggacatgaaccaatccttgcaacttcgtcacaatcgcaatccttgccgtttcccacagtttccaatcatcaaacagccacatcttgccctcctgttgatatagagtggcctccacgctcatcttctaaagttaatccccaatttggcaatactgagaagcagttgaacataggcacatcatccgattcaagtattgatgatatggatccttttgctaactggcccccacggcctagtggctcagtgactggtgttggaacttctaacagcattttagcaccatcatcgaccacttatggttctagtactatctcaaatctatcgaacaccatgaatttccagaacaacaacagtgactggccctttaatgctcaaagtcagggcaattctgtgactagcagtttaggaagtcttaactctcagagttcccttggttttattaaacagaatcagggcattgctgcatcaaatacttatactgagaagaaagcaacagatcttggatcgatatttacttccagcaaaaatgagcatactgctctaaggcttgctcctcccccgtcaactgctgtgggtagaggaagaggaagaggaagaggaagggggatcacttcagcctttcggcctactcaagtcaaatcacaaccagagcagccctccctcttggatctactataataggttggtagtaccattttttcaatttgtaaagagataaagaaagcatgagtaacagaattgtgggtctagtggtctacccttgctagccaactgtttcataccacctagaaacttatttgtaaagtatattttggggacattctagcctgggatactgcagcagctctcggggttggaaatgtgaatggtttgttgtgctctctcttgtaccttattgtgattggtcacatacaattttgcatttaattttctacctgttatgtttaacttagaaccgttttgttgcttgagacattcttgccgaatagtgtattctttgaaaaagttccaggtgctacggcaaatggttacaccagatataataaaaaagttggaagctggggtttgctaagcgctcttcagtccccatccttggatttgcttttgcagtggaaagttttgcgtctgggaagaacagcgttttattctataatttttattttttatatatatttatatttcacattcttttctcatgtactcttaaggattgcaaatttgcagtgtaagacgatttggctagcatttcaccacgattcaattcttccttcatcagggtggattttaatgaaaaagtctactatctgtgtctgacaaattacattacttatttaaatgtagaataattactcatccatcatcatgggaacaaaaccttactagaaagatgttatcccttcctttctgttttaacaaaatacgatgcaaattacatcatcaaccatgatttatcaaaaaccatcaaagaccaaatgcagttaaccttgctcctccaagactagtcagcaaatctttaaattctctcttcttttttctataattctactgtattcgcgccgtcgttataataattgatttaaaattaaatagtttaattatagacaattgttattaataatatgaaggaatgttatgataaaatataatttaaataatattttgaaatacttttttgtaaacaatatcatttttatgaaatttctatcttccatcttatcatcatcgtttagtatgatcaatccttctcttgtagtgactcgagagacagcaacatataattgaagggtaaatacttgcttagggaaat

SEQ ID NO: 21214 - DNA, 2825 bp, Cannabis sativa
  modified_base (99)..(116): a, c, t, g, unknown or other
cataattaatcataaacaactgttaatttccaaattaactaagcgggctttacaaaacgtaaggtcaaatagtataaaccctaataataataataatannnnnnnnnnnnnnnnnnataataataataataaaggatattcacaacaaaatccccaaaattttaagaaaattgcagttgtgtcctccaatcagaagatttgggggcaaaaaactattctgttaatttgatgagtcataattgggggtaacttaaaaattacaaatggttaaaaagatatatacagtttaatatagttttagttaacatttacataattaaggcaagtctagattttgtactttctcttttaaaatacatttgaatgaaattttatagttttatttctggtaatttattgtctagatagataatatttgtaatggaaaaaaaaatttaaatgaatatacagttattttaaggaagaaaacgaatcccaatttttgtgtatgcataagagatttaaaaatattttcatctcattatttattatgtacttacgacagtcttctattaaaattatactacacggcacgacaattttatccaaaattatcgtgccaacactacatgtaataacaatttttaaattattgttatgcaaagactaaataaaatgacacttcaaaataaattgtatgtcataccacaagtatgcatgataacgcgatcataaaatagaaattgttatgacgcaaaaacataacataatatcgcccgagacaataatgtaagaatttgtatggatgtctatatgaacaacagtttaaaacttgtcgtctcatacgcattttctagtagtgacggttgatagacaattgttcaactcatcacgacataatttgataatgtgtagatacccaatttaaaatctatttttcataatatttaatttcaaaaaaattaaatatttttataattaaaatatagaagaaaaaaacgaatttataaacaaaaccccattaataaaactataattatttttaatattcataacaagaatattgttattggcatgcatgcatgcaactaaatgcatagtacttatatacatacatttaatctctcaaaaaatatatacatacatttaagctttcaaagttggaagcaagtggaaatattatttgggtaattaacctaatagtactaattaatagactatataaatatttatattaaagtaggaaataaagtagtatagtaggccgttgggacaagtatagatatatgatacattattaggcataggttgccctaacaacatgatagatttggtttcggtcggctagcctaaaatgaaataaagatatttatatatataataaatccacaataatatatgtggacacattatctaataatctttgagagaaaacatgttgttgtttatagaaaaagaaagcatcaattattcaaatatcttctctagtacttttatgtggctaagaaaagaggattaatttaggattgaatgctacattgatattattcgtttgaaagaaatataacatatacgtgtacattgaagctgaataataataataatcaccaaaatccatgaggaataaaaagttttgtacttgagtttttctttattctttttagggtttctgttagaagttcttagcagcttgattttttttgcttgattagggtttgcagccgtttctcgaccttatagtgtcactttggttgggtcttgttggttccgacactatttttaattttactggcattattgctatccttctgtgtgagtattcttttcttctccatcttctttctttagaagtgtgtcttagggatttgagttgcttattggctctaaattgaatcttcactggtgttattcctctcagtgtgttatttttatttgctatattttatttttatgtttacttttattttcaataatagtgttgctacacaccatcttgctattgttatggtagttggactatattcatgacaggaaattttagtcttgtttctttttgggatattgggagaatctcaatcggctcaaagcatgtttgtgttagtatcatgactattcttgtccatgttcagatctgaggaattcttagaattttattgaccccatggtttatggtgcgattgtttattacgattgttgtcgctatatatagttgtttggttattttttttctaaattgaatgttattacttaatttttattggaagatttttgacaaatagtcattaataggtgtgatttgtcacgtgttcatttggatggagatttagcattgttcgtgcttctttgatgtttcaacgctagcagcttattggtattttaggtgaaagtgttattaggattttcattcctatttttgtaaacggcatggtttgcttatcttattgattttattctttgagtaataattgtttaatttctcgattttctattttcctataataataataatatatttacatactttataaaaattattgaaaagcccctcttctgtatattgtcttcaagaaaagtccttccatattaacctcatatgtgtttttaaggtcgcattcttaaagcttcatgtgggagacgcctaaattagagaactttttacttctccagaatttgtgtctcccagtagaagagacgcaaataagtttcgatgtctccctttattaagaagtatttccaattggtccacatacataatgaaagcggacaaattttgttgatatttcaagaatgattctagaatccaaatgaatctaacaaatgaataaacgataaaggtatttgggttc

SEQ ID NO: 21215 - DNA, 1711 bp, Cannabis sativa
aatttggtatgtaacatgtaagaattctttaccaagccagaattggagaagttttcttatattatggtcacctatgtagtggtatgataaatcacacagaaaaagaatacataagcaaaggcatacataagaatgccttgaaaaaatgcacataaacgtagagacaacttgagaaaagtttctacacttaaaagaacatgagctttatgctgaaataacttcaatttttcttaccagtctcttgttcacagagcctgattgaggtgcttctttaatatattcctccattgttgacagaaatgagggaggaggctgattagatcatagaagaaatttagttgaagaccatttactgaatgtagattcattaatttgacaggtaagatatagaatgcaatttcaaatgtattggataataaataaataaatgtaaggttttagcacaagaatatattgtgccatgtactatatactttacaaaaaatagaaaagtaagaatattaggcagtaagagtttctttccttgtttttttttttcattaaagtgacatttgttttttgaggtcttattcctaatccaattctgttgtgtaagttcttagtaaacacaataataaaacctcaacataaacatattaatctgaaaaaaagtagaacctgtcttagtgtaggaaattggaaatttctagcaagatccagtcccttgcaatattcataaaaatcagcaagattttcagcctgcacaaggcaaaaagttgcataatatagacagtttatacaatgaccaatttagaggatagcttatgtataatttgtttccatcatatgctgatttttttcctaataaaaacttcatacattacctgttgaccagctcttttgtaaatatcaagagctttaactgcatcatgtcttgacatatcaaagaactgcatgaaaaatattcaagtacatttgatcattggaaataattgctttaacaagaaaaattaaagtatcgaaatagattgacaagataactggtgtataagcttttaccatatctacaagatttataattccgtcattgattgcacaatatattttgaagctttcttttagtacctacaagaataacattgttgaaacttcgaaaattagagaccccaatatcgtcacagagcgagttttggcagaaattgagaaaactctaatggaatatttcactatatatggatgcttggatcgattgcattcaaggaaaatgtgtaaacatgttctatattagtgaaaattctttccatattcttattaattttttcgatgagtgtacttatgtattcaccaaactagtgaaaaagtaacaaaagcaagaaatgacacagagatgtgtgcatatatagaaattgataattatgtactagaatagaaaagagaatgaagacaaatttgatgcataccagggccaaagcatattgtacgaggtaattgctgtaagctgctccttcaggctgcaaaactacagcaaattagagagcctactacaacactatgcatactaatgagaataagatttctaaacaaaattttacaagtaattcacagtggaaaagtcatggaacaaactcatatcaaccattacctgacacccaataaggcgataaagaagttgctgcaatgctggaagctgatccaacagctcgttacgattcaacatccttgttctactatg

SEQ ID NO: 21216 - DNA, 1852 bp, Cannabis sativa
  modified_base (1303)..(1306): a, c, t, g, unknown or other
atttggtataaatttaagtccttgactttaaatttcaaattccaaatagaaatttcttatatttctatttccagaatacaatgcagttacacttgtcactactacaaaaaccctcttttaaatccatcaaaattggactagataaagtttttgagtctattttatgttggacatgaaagcctgggacataaaaagggtatttttctagtctaacattattggactagaaaaatatttttagtctaatattgttggacttaaaaagcggtcccacaacataaaacttaattgttggacgagaaaaatatttctagtccaacaatactagacttgaaaagcggtcccaacgagaatctttttctagtctagctgtaaaattaattttatttatttagttatatattaaattataaataatcataaaatattaaatatttttgaattatatattaagaaatattaattagaaattaaaattatttagagcataataatttgttaattatatgtgaaaataaaagataaaatacacttatccattaaaaaagattacattacagtagcaaaataagtttataaacactaagaacaacaaaaattcacaatattttttttttctaaagatctaaaagtattacaaaggatatccaagattatatttttagaagagtatttacataaaaagattacttttgatagaaaaaaaaaagaagaaataatgctggtgaggaagggagaaatctccaatagtgactaagaacaaaaacaaaatggacttaaaagagagaagagatagatcgtcgagaggggctgtaaatcggagagaagggaacgacgatttagacctggcggccatttgagcgcagagagaaaatgagcccaaagaaagccaattttcactgtcgggttctagttatggagtccatcgacgtttgtttggtttatcgacgagatcgaatgatgccagagaaaagaagagagagaagagagaggatcggacaggaagacagacaagtcggctccgggttctttgggttttttgggtagcgtaagattcatcgattggcggttgtggtggatggtttgaggtctggcagtccaaccgcataaggaagttggaggaagaaagttacaaagtttttaaggtttcaaaaggtttttttttttttttttatttttttttttctgtagctagaagagagaagcttttgaggagagagagataaatgctaagtaaatgtataacttgaattatgcacacaattattgtactcgttttagaaatataataataataataatnnnnataataaaaataataataatagggaaagtatattacatttaagcatggattatggtaagagagagaatgaatgaatgggcactaattttattaaacatgtttccttttaaaataataataataaaaaaaaataaaacattatattcaatgcactaggccaattatggtgaggattaaaaaaataactaaataaagggtcatgtccaacaaagttggatgtgctttggttggtgtgtccaactttaatagacgtgaaagtggcacaaattttaaaagaaattaacaatttttttgtaataactatatataatgtcattcttaccatttcatgtccaaaattattagacataatagaattttttttaatgcctatcaatgttggacatgaaaaactccccacaactcttttatgtccaacactatttttgtaggacatgaaaaaaagacattaaaaggataaattgtagtagtgtttacaagtgattaatatccactttctatcaatggattcaaactgtatgctaagtatggaatatgagtttagta

SEQ ID NO: 21217 - DNA, 4948 bp, Cannabis sativa
cccatagcagagtcacttgtaattcttgaatacatcgatgagacatggaagactcaccccatcttgcctcaacacccttacgaaagagctcaagcccgtttctggtgtcggttcatggatgacaaggtaacaattcttcttctaaaataaatattttattttattttttcatttttttaagcttgaactttcgtcgaacaccttatgtgcgtattgtaaagcaacaatttgattttggccaggttatggctgctgcatggaaagcattctttgttaaggaggagcaaaaacaaggattggaagaagtaaatgagtatctagagattctagagaaagagttgaaaggtaagtactttggaggtgataacattggaatggtagacattacaggaaacttcatagtccgttggatcccagctatacaagagcttatgggagtagagatatttacagaggcaaagtttcccaagcttggtaaatggagccatgattttgctactcatcctgtggttaaggaagtattgccttctaaagaagaactcattgttgccttcaagcgttttttgaacatcaccaactaagaaaaatgatcattatatatatcatatcataataaataatgaatacactggatgttgttggtgttccttttataattaagctgcattgtttctttaaatctgtacttttgtttgtaataagggatatattttctattatgtattccaaagtttattaagagtgtcatgtgaaaaatatgactaaaatgatcagacatttttttttaagtccattagaattaggcaatcagtactcagtagcatatatttaagagtaacaatagggaataaagatagagagtttgaatttccaatacatttcacaatatcagaaagggtagagcattcattatataaatgatctaacattgttaaagtacactccaacacaatttcatgcatcattatgtagatttagtgtgaaaatatgcttttgtgattggttcacaatctaaaaacataacagaacatgtgactggaagatataaatccgaaaattatattattttcaagggttccaataaacgatcatagcttgataaatataagtagtttataagagactaagttttgatcaactgtaaactcttctaaattgatttataaaatctaaatttcagcatattataaaattgatatgtatgggttgaccaaaccattacttaaaacttttgaattggtttttatttatcattcttacagaaattaagttgaaactaactaattaacaaaaattcagcattgcaaactgagatgtacacacatgcttgaaacttatcaaaacaaacagatgatttgatttgatttttttttttttttaacaaaagaaaactttattcaaaaccgagcacttacaaccaagttggagcaacaagtaatagcacaaaagaacaacctgctaccgaaccagcagcccccaacccagctaccaatcttgaactacattaattaaatacaagtcttttttacacattataaggacacatattcaaaattctagtttaaacaactttcctaatttcaaaacttaaatttctagcaaaggcacaaaccaattcaaagatacacctgtttctattcttctaaatcatatagatagcagcagcatacacaacatttatgatacgattttgaaagttacgagagcctctcaaacaccactgctgaaggccactgatagaatccggccaaataacttggccaagccacctgttgatttcttaaaaaaaaaaattctcgaaaagacatagtcaatagaaagatagttatgagactcttttttcagagtcacaaacaggccaaagcacagagggaagaagcataaattttcttaataaatcctgagtaaggagttgaacgttaagcatctgcccaaaaaagaatctatgtttcagagtaataagcttattccatataattccagcatatttcacttcttgagcctcaataagggagttatagaattttttaacatgaaacttaccacccttttcggcttggttcaaagttacctcattggtactcaattaaagtttcagcagttttttgaaataccaactcatgtcttgcttgatgggaaggctccatatactatgctccttaagatagattgagtttatctatttcacccaaagattgtcttgcttactagctatggcccaaagaaacttggccatcaaagatttgttccacttctttccttcacaaaactcaactcccccaagctttttaggaaggcacaccttctcccatgaagctagatgaaacttgctctggttccccacaaaagtcacgacatctcttatcaatggcagtcgtaacttcacttggaagagtaaagatactcatccaaaaatttctaactctgagaagaactaagtgtatcagttgagcacgacctgcaaacaaaaggttcctactagcccaacagttgaggttcttatttatcttgtccagaatcactccacagtcagatgttttccattttctaggacggagattcaccccaagtattttagaggaaaagagccttcttccattttgactaaatcaagaatatgagcttccatttcatctttaaccccaccaaagtaaatattggattttgacttgttcgcagaaagactagtagcttggcaagacttcagaaaggcttcatgtaaaagacttactgaattgagattacctttgcaaaaaatgattagatcatccgcaaaacacaaatttataagccataggtgtttgcataaaggatgaaacctgaatcccttcttttatgagtactggactatgagtctggtaagatactctataatcaagacaaataggagaggggacatatgatccccttgtcagagacctttctcccctttaaatttaccctaaattttgccattcataagaagattataacttgttcccttcaaacagatcattatccagctgatgaaacgagatggaaaacaaaggagcttaaccaaatcgtccacaaaaagccaatcaacagtatcatatgccttactgagattgatcttcattatacatctccctgagatgttcatccttaacctttgagaagatcctacaaaatcataatgtagtgagcaaggagtctatttttcacaaaagcaccttagttactttgaacaagagaaggaagcacttccgagagccttgtgcaaatcattttcaaaatacatttgtagattgtgttacaacaagcaatttgtctgtagtcactagctattttcgggtctgccaccttaggtatgagggatatcactatttcatttaagttcttaggtaagcaaccattttgaaagaattcaagaaccgcccttgaaacatcatctccaatatccctccaaagttctttgaaaaagccataaccaaagcaattcaaactagggctttttgaagactgaatgcttaaaattgctttcttcacatcacccttactgaaaggcctgattagattcacttgttgctccaaattgagacaaatacaaaggtttatgctctctttatctattctgatagtagcaaggcttctacttcccatctattgttcaaaatgagaaatgaaatgctttgtcacctcattaaaattatcttcaattctatctcccttagagaaagaagtgatcctattttcaagcctcctttttcacatagcaatatggaaataacttgaattctcatcgctgaacttaacccaagttatcttgctctgctgtataagaaagttggagtaatttttctaaagcaaactgagttgttgcaaccaatccaaagcagcctgctgaagagattcatctgctagattcgaggttgcttcacactgtaacctgctgtaactctccttcatagctttgtaattcaaagctatgtctcccacctcatccctactgaactttttcaaggcatgtttaactaaaaacagttcttgcacaattctcttaagccctaaaatcttcactggtttgcactagtacttcaaaactgtttgcttataattcagataagcagcctaataattgcaaaatctaaatggcttgtatcccaccttattgtgctcatgactatggattatacaataactatgattcgaagcaacatcccattaataataagcatcagttttaggaaaaacatcccagtcatttcacattcgtaaagactatcaagcttggaaaaaataaggtcaccaacctcgtgcttatttgacatagtgaagaaggctctcaaatacttgaactgctcaacttggacaaaaacaagccaattttgcgcatccttaatatctttagcttgaatttgtctccttccatttctatcttggaacaaaaacatagcattaaagtcgcccaagataatccaaggcaagttcggttgacctatactagcaaatttctcccaaagcttcttcctttcctccattgagttactaccataaacaacagtagctaagaacaaatctttttgaccatcaaccttgatcttgcaatgaacaagttgcacatcctctaagactacctccacgtgaacaaacttggcttgccacaataccaagattctaccagaaattacattgctcgaatagtaatcccaattgggaaagttattctcaaagatatcatgtaccttttcatgtttcatcttagtctcaaacaaagctccaaacccaactttattcattctacaaacattaagaatagctttttgcttttctcttttattcatgcccctcacattccaccctaacatattggaaacttccctcaagtacatgggtgagagtagggaaccatgacctcttcaatagcctcttgtaagactgtataaccattattactactagcttcgttgggattctctgctaacctgtc

SEQ ID NO: 21218 - DNA, 4946 bp, Cannabis sativa
  modified_base (4141)..(4144): a, c, t, g, unknown or other
tattttattggtaaattagggtttaagctctcatatataaagagccttaacttaaccatgaaaaacctaagctgctaagtctaagcctaagcctctaagtttgataacacactctctctctctcattcatatgcccacataagcttctatcaacacttgagatttgtcatctttgattcctactttgtaactttaagggatctatatcagatcccacctatagtgatttaaataatattatccctcggtatcagtataactaaaaggggagtaggtcattaccccctaactaagggggccaaacctctataaaaatctttgtgttctttatttttaagttctaattgtgtaacacgtggcatacatcagattaatatgacttcattgtcggttggccactttttggggttgacatcatctatacacgagctaggactctcatctttcaatgatagcctattgtagaatagacacgaaatgttcttcatcccacatctagattcaacgtcctttagcattcgataattgcaaaatttattggtgatgtggtccatcttccaacgagaagtgtacttggctttaacaaccggatcataatcatcctaatttttgtgttatgatccctctatgttcatcaagcgatccaactcttggtcctctgacattgcaagaattgaaaaacatggaaaccaaggaactaggacccgcactaaaatatattaagggcacgggagaatccttcgaaataattgctaggatatgttccttctggaccctaagtcttggagtcatttcctcagggaatgtaactctcaaaagataaattgaaacatagagcaaagaaaaataatagcaaatgttgcatggtctaagtctgtaaggatcccagataagatggacaagatgcaacagagccctaagaaccctattagcatctgtgaggtctatgattcgaatttgcttccctaagcatggcatggtctatatgttcattattcatcttccaagtacctaaattttccaaccattaataagcctaaagaccgcccttagtggcagagaatgcaatcgacaaccattaacaacccataaaaaaaaaatccccaaatccacaaacctagaaattaactaacaagaaaagtagttagaaaataacaatgctaaaaatcattaaaagggtatgtaagtgttggaatcgagactaggggtatcaagttctgggtaaaagaatgaagcttcacctggaaacttaccaatcttcttataagttctttggtattcacttggaagtccgacgggagtgatacattgggcgaaattgcttctaaaaatggggaaattctataaagaatttagaacaaagttgtaagaggaggctgtagagattggttgcagggctattagacattcactagagtttctctgagcttttctcggtcaggttttattttttggaaacctaggcaagaacagccagaagatgaaaagtgtcaaatgggttttctttcacttatttgtatgaaaagtggtgacccgtgtattcatgatccaacaacctaaatcaatcatgagaaagcacagatcccttggagccaaaggtccaggaataccaacgatttccattaaacaaattataaaatcgaggagatgtagaataatgatgatatttgcctcagatatcacgttgacattacgagttatcaatccatgacttgaggcatcacacgcttgcttgagccgtgtgagagacacagaccaacaaatatctcacatgtgtactccaatcacagaatacaaagggctagggccaaaaaaattcaacaactctccccttctggaatttcaatgggttccaattgctcatggctctgtatattattactaatccagatggaggttgaaagcctttgcgactcttaaactttgaaggcttgaggggtaaatattatccgcgttcctgggaacatgactcgtgtaatgctctaacatttcacacttgcttacgggcctattcacaaggcccgagtaagcaaacaacccaatcaaagagaaaagttgggctgggatctagattcaacccttattctattatgggtaaagccagatagatagatccagaagattgaaacttaccaaaattattgagcaactgaggaagtatagacggataccctcaagggtatcccgaaagagggttttgcaaaacactattcgtccaggaccaatacaacttggcacgcctttaacatcaaatttcaacgaatcaagggtttatctcctctgccaggccttggacgagtgcacaacaaaaaagccaaccaccttttggccaacgtccattactctaacattcactgttcccaattgacgacgcatgcccacctatcatcatcaagtgttactgtccagtacggatgacgattatccctcaaatcgggcctcacctacttggactaaagtcaacattaaaatattttaccccatttgtgggcttacttttacatgcaaatcctaacgggtttaggtttacccgaaaacctgagtttggcctataaataaggccccaaccgttgtccaaatgattacaatttttcgcttaaaaccctggttacaaagtttggaaagaactctcttgtgcaaaatactccatagccaaagatcgctcaataatattgactcatacactaaggctccttaatactacaactacgtaaaaacaaatttcttctctatttttactcatattttctttagctcagtctatttttaattcagcttctaaaaaactcgataaatagtttctattttattataaagaaaggtgtatataatttttgttagatgtggtataattattttaattgtagtatataattttggtagtattatacatttttttaagaatattattttacattcaattattgtggttatatattttctaatgaatgatatgtgttttatattgtatatagtatattacttatttgaaatgatatttagtctctatttaattatatataatgattatattaaaatagtttagtaatgtatatatattttaattttgttagcattgtatttattttttgagtattaatataatagttttatttttattagaatatttttgttgtatataatattattactatgatatattaattttttggtgtgcatacaatatctatatttaataatatagtatatttttttatttaattacaataaattaatatgcaatactaataaatttatataacataattttattattacacaaatctctttttaaaaaattggtataaaataaaaatatttttttattattatcatctaatttattatatttgactattttgataaatttttataagaagacgcatttacataattaatttatctatttaagattagttttcactttattattattttaattggtatataattataaataaatattcataaatattattattatcattaaattataaaaaaaatgaaatgattattttattgtatcgtgctttactcaatcatgttgtgttttatttgacgcccaattttctatatattttaggatatttagaattttatatattttatactacttaattacattatatgtgataagaatttatttataatttattatacattttaataattataaaaaataaatgataaacataaaaatatatataaaaaaataaataataaatatacatattttatttataaatttgtatttaaattttagtgaacacactatatcaacatatcatcacaaacttgatcagaaggacaaaacatatcatcacaaatattatcataacaaatatgttagattgatacttaataaacaatatcaataataatatgaacatagtgtttatacataatgtcacatttaactatagttccgtttatttttttaaatacatttttcaataactaataagcataagtgttacattttaaattatttatgaccttttaataaacaaaaaaaattgtgtttatttaaataaataaataaacttaagtgttttacttttaaaagtgtaatttgcgttataaatacctaaatttaacacccaattgtaagtaaataactaagtttaatttttggcagtannnntacttaagttataattctagaacttctgtaggtatttaactattaagtgttaagtaaattgccacgtgacaatccttgattggtccaagtcattaaatttttaatttttttaaaactttgtttaaatataccaataagaaaataatacgtagataatgacttaatatttaacggttaaatacctacagtgttacagaaatataacttagggattattaccgctaaaaattaaacttaagtatttatttagaattgagaattaaacttaagtatttatactacaaattgctctttttaaaattgttacgatcttttaataaataaattatatttattatgataataaacatgctagattaataatatcattataaatattaataatactaattacatatttaataaatatatatactttatttataaatataaacaaaatttgtaaatgtgcttgtatatttttttaatttcgaattaaattttagtgaagatattattttagtaatatattaaaatataaatattaatttttatatttatatatttaattttatgtatttatttttaaaaaacaataagttaaaagcaattctaaaattaaaattataaatatttataaaattgtataaaaatatataattacatatttgttcacattttgtatgtatataaataaaaattgtctaattcgggaatatatacgatacaaagtggtcaaatcttgcaacttcccttgaagacgaagaccttggctctagctcctcgtcattcttgtcacgggggaaattcttttggtccctac

SEQ ID NO: 21219 - DNA, 1334 bp, Cannabis sativa
gcaaatgaatgtgtggttcacctgggaattcattgttcccgagcggaagaattcctgagttgattcaatgaccaatggaccaatgatctcccaatacttcctatagaaacaacccgaaaaaccatcgggaccaggagcctttagccgatgcatttcaaaaactgctccttgaatttcctctagtgagggtaaggcaattaattcttcattcgcttcatggctaatttgattttgaaatagactatcaaaattatcagagaacttcggatcaatggaagagaaaatttcattgaaataagagtttataattccttccattttacctctcgattccctgagagcattttgattgtctcgcaatccccatatatgattccttcttttccgaactgcaactgaggcatgaaaaaatcgggaatttctatctcccagtttcaaccatatgtcccttgacctctggcgccacatatcttctttacatttccaagccaaggataatttctcattcaactcagcttcttcatccgataagtcctgctgtagtggctgtttttgtatcctggagatcctatcttcatagcctctgatcgtcttgtctatttctccaaagaaattttgcttccactttgctaaggcacttcgggtattaccaatatttcgtagaaatatcccacttgctgtagccgcatcactattccatgcctttttaattacttctcgacaggattcatcccgagtccaggcatcaaaaaatcgaaagggaatgcggctctttttagagaaaagtttcgtgtccagaattattgcagcatgatctgaacaagtaatggggagattggttactccagcctctgtaaagttggtaatccaatctattgaacccaccgctctatccagtcgttcgcgtatgagcccgtccttaaatctcttattatgccaagtgaacttgccacctttgcatcgaatatccactccccctgtatcattgaggaagccagtgagccacttgagatcattgtgagtgacccttcttccaccaatcttttcctctggacttccaatgcaattgagatcccctataaccacccacggaatatcgcatgtacacacttttgatctgagatcagtccagaatttactcttttcagtcaggtacggtgttccataagtagcatacaacatccaattctccctaaaatgatgattccacacctctgcttcaaaagaacctccactactactcacaacatttaaattgatatcatgtttccacatcagacagaaacctcccgccaagccaattacaggctgacaaactatcctactaaaaccca

SEQ ID NO: 21220 - DNA, 4459 bp, Cannabis sativa
agcactgggtctctcaaatacccaataccttgttcacttcaatttccactatcaatatattagctattttcctctattttgccactatttatacttaaatgataggaaattcctatcattttgtcaaatgtttttaccctaaacctaaaacttcatctttctaatcctaagaatttctcttccctaactctaactattgtggtctgatttctaatctaatcctaaatcgtaaaaaagtttgataaaaaatcgggctcaaggtattattatgtttaattttgcaaaatacagaagtgttatttaacaaaacaaagaaatcagttgttatttaccctattgaataatgaggtattatagtctttctaatggatgcttactgaaagtttatgcatacagtatgttacatcagagacatttagttatgtataaagaatatgttattgtattcccaactacttgtacaacattcagttgcttacttggggatgatttactgtctgttagttcttgctatgtatttaaatttatactgtctcatacaagatgcatttgatttaaagctcaatgtattgcaggttgccatgtgtaattttccttctataaaggatgcagcagatgtagctattgctactatgcattctggtatacaggtaggaatctgactctgtgttatgctgtgaattttgaccttcttaacagtttcttctgttaattcttgcaaggtatcaagggtagagctaatggatgaagttcaaatcaaggctatcaaccttgccaatggaaagaatttgcccgaaactccaaccttaatgtttgaattcattggcacaggtgaattagattattgaatttgtcatattgggattaatagtcaaatttaatggttttgcttttaaaagttgcttgatgtgatttgcactgaatttcctaactgtttttagaggcttatgcccttgagcaagcaaaaattgttcaaaagattgcttccaaacacaatggctcagactttgtttttacagaagacccaaaagcgaaaaaggaactttggaaggtaaagaacttagacctttataacaactacctttcaatgccagtgtttatagttctgctgtcgttttcccttaaaacttgaaataacttgtttcgatgcctgtgccgttcaattgaatttggattgccttatctcttgaaggataatcttgaaagaatcataatcacaagcctattattgtatgttgttcgtattttcttttcactaataaatagttcttggtttgtcatttgaaatcccgtcccgtccgtggccatgttcttatctacaccaattattattgttactcagttcaagtcttggttacgtgcagataagaaaggaggcactctgggcttgttttgcaatggtacctagttatgaggcaatgattacagtgagttgcaggatataattttcttttctttggttcttcccagattagctgctgtgagaaatcacaattatactaaaggtctttttctaaaaaaaaaaatataaagtccagtgatcttttggctgctatttgctattccacaggaccattttctgcattaacagtttattcttatagttgtgccaatcacattttataaataaataatttcattttatactttagccaaattaatctttctttatcttccattaaaagtgctcattttgtgtaggatgtatgtgttcctctttcacaccttgcagaactgatttcggagtccaaaaaggagctggctgcatcctcattgatctggtattgtcttttcgagtttattttttctacacacaaacacatcagaatgattatctttctgaaaatgttgcttgaaatttatgtccaagtctccaaggtgtttaatgtcttgattgttcgttcctaatgacagcacagttgttgctcatgctggtgatggaaacttccacacacttatcctttttgatcctgaaaaagaagaacaacgacaagaagcagagagattgaaccatttaatggtcaatgctgctttggcgagggaaggtacatctgttcatctcttttatcaaccaagtatcaatttaacatcagcataatttctgtctgatttttcttttattttggtgccattttaaaataccatcattcattgattcttacctctaaaattcctttgattatttttattttattttctttctttgtgactagtgtttcactgtttagtaagtagatgttgattatgcctcaatgtttgtttcatttttattgatccacttttaaaaaagtaatgatatgtacacacatgaattgtgcacaaatttgaccgcacacttatgtgggaagtcacttttaacaagtgagactcatcttaaataaatctagttgattcaaatttgttatctcataagtgtgtcaaatttaggtgatatcattactcctttcaaaatattacgttatctactgtaaaacaacaattgtgctgacatgtttcgtgtgtctttgacaactaaacaggaacttgtaccggtgaacatggtgttggtaccgggaaaatgaaggtagtcctttcatagctttaaattattcattggctaattgtgtcaactgttgactcggtcttgacatgtgtcagaatgtttttaggtacattcttcagttgagagactattctaactaaaatttgtttttatgtctaccagtatcttgagaaagaactaggagtagaggctttgaggaccatgaaaagaatcaaagcagctttagatcccaacaatatcatgaatccaggaaagctcattcctccccacatttgtttctaagatcttcctctctttacatgaatccaggaaagctcattcatgcagtccctttctcccctttcgacattacatgatatgtattgttggtctagtgcaatctaggtaggttcataaaccttatcaccattttcacttagaataaagatttactaaattacctggatctcagtaatcattccctttcgcactttactcactcccattgatgtgaagagttaactacttggatatgagaatggaatgtaaatctttgtgcttggcttttaatggatgattatcttcactcatacatcacacacaatatatatttcaatttcacacacaatcacatcacatcactcttcaccatcatgcctttatgcttttctttcattccttttcccccctttttctttgataggttatatagcctttcaattagtgactcttggatgattcgaatcaatacagaaagggacactaattacatttatttagtttaattgaaacctcatcataaaacacatgaccagatgggatatgcagcttctatatatatgcaggtatatacacgtggaataaaatattcattgtcacctcaaatattgatgattctgtggagattttcagcttgtattcatagtgcttaaccttttgctctaactttatatagattctagtctctctcattctctttttattatctatatatatgcaaaaaaacaagttggttctgtttgatttgacggagaattttaatttttacctaagttatgtatgagaaaagtgtggaatggattaaactgaattctatgctggccaattgggtgtgtgattcctggttttaagcgaattgtttgtagggtataggctgtgaatttctaggatgaacaaatgttaaagtcaatgatgatgcaaaggaaaacagacaaaaacaatatgaggacaaatatgcaaaactcttgaaaagattcgtgggcatcttttatccttaaagtgcatttataaaagggctaaaatcttcaagattgtttggttaagatcttcaagattcttttgataaccaaagaatcaacttggttcttgaattgaattattgtttctacaccttatattttggtagctagggaatatcaattagaccactgtatatgatattcttcttatttatatatcctcgaaaataatataataaaacaaataaaaactaaatcagtacttgcatcgtatataaacatttttttaacaaccttttctttatgtaatacaagagtgattttattatggataaacatcacgaaccgttcttttttttttttttgcaatcgaagcttatgtcacttcccaacatgatctatctatgtgtgtgggtgtgtagtttcccattttagatttgatttattaaatggtaataatactctttttaaagttatcacaaaggctgaccctgaatgattgccacaatatccacttaatcagattaggatatgcattatctactctcagctaaaaataatactttgttttactattaatataataatattctcatatttaggttgcttatcttttttttctttttctttttagtactactaattaatcttatctaatgttatacactaatataatatttcgaagttttcatgttactag

SEQ ID NO: 21221 - DNA, 3301 bp, Cannabis sativa
aataattttgggtcattgaaaagtaaaacctttgactcctctccataatattaataattaactattatcactaagaaccatgcaattattttgaaactttctactgttttaatcttcctttatgtttagaaatgttcctcatcgctacttttactgggtttacaacttactttataacgtttatctttattgctgaagttgaactagaaaactaaattttgctcaagaaaacaatcttgctacaataaattcatgttatattgcatgctaatattatttattgttaatcaaaatgtatacgtgaaatattagactatttcatgacacaaacactttggtgattactattctagcaagatagttataattttcaatcgacaaagtattgattaatttttttcaagaaacttctcaaaagatggaagagtgtaaaaaatttcttggcagattttactgtttaatacttcgtttaattgtttaaagcatacaaaatctgttgtaaaataccataaaagagttatacagacaagtcaatgacactacaataaccaaactattgaatgtactaacatactacttgctgatcccattgtaattttagtttatttcctttctgatgtgtcttctattataattattttgttaaagggaaagaattcatccgaacagtaaattcaatcaatcagaatttcaatggagtcactttctttcataatcataggccagcctgccgtctacatcatatttctgataatctggatttccagaaaagccaaatgaaaccttccaaaacagtgcactgcttttttatttttcattatggcgtttaacagtggtattaatgatttgacagagataaccaattcaataattttgatcatagaagtagatagaaaaccccatttgtgatgtttaggggcaactctgatatcggtgttgttttcctacttgtacacaccaacacattgcgcaatcaaacattaaaaacaggatttcaatcaaagagcattaaaaaaatacaccaaagataatgctatctggtataagatacaatattttttactgttatacattacattgaattgaacttaaagtactctgggctttgtttactatagaatagttacacaaatcaaatgttaacccatattttttctctattattaaacaattattttactgaatttgattgtgttttgataaacaggagtaacctctcagtttcaaacttttacttaccaaatccatttatgctgtctttctctccattgaacagatttctggaggcaggtagaccaagatcaaagggtcccaatgattcactctgcatggaagcatcgaatatttatataaatttatatgaaccatatatgggactcaactagctatttaaataattaagaaattcaacatacccaattgatgcctccgaacccaaggctgctttcatcaatatacttctgcgaggaaggcaagacatctgtctgagattcttgatatgcatgatcttttggaacttcaacttgaacattggtctgtaacaaacattagagaaaaaaaaacacaacattaatagtttagaaaaaggtgtacactattttaactctcaataaatactccctctcaaatgacaattttataacaaataaatagaaatagtttccttcatcctgcagatgtcaaattcagaatagacagcaaaggtgggtaaaataacaaaagatcaatgtagaaattgagcaaataatatcaaaagttcagaagcagcttaatcctaatttttcatatgatttgattttagatattcatatgatttttattttttatgatattcatatgattttccacttcaagcgcaacaattttttctaagaccaccgtaagcactaaattcttgttaatccgtgagcaactagatacctatagccatcactcatccagcactggtgtcatggttataatctctagagcataattcaaaacatgctggaaaagaacttttgcgaagccttctccaatgtccatgtttctaatcttaaattacaacttcaggtcttaaattaagagaaagggaaaaaaaaaattgaaatttgcagttgccaacatagtgtacattagaaattttaaacaaacctcgtcaacttttggaaatctgaatgatctggagccactatcctggctgctgcctccagaactgccactaaaagctgaaacccttttgcttgaggaagagaatttttggacagggaatgcatgacatgtctcttcagcatccaaaatagacgagtgtgaatcatgagcaggtggcctaggaccttgaggacaaatatgttgagcagagataaaagcatcaagtgagtcagaaatcatttgagttggctgaaagtctgcattgctcacaatagctttttcagtattattactgaattttccctgtaaggatacttcggataggaggcctccaatgcttatattggttagaccatcatcccaagatggcagtgatctagggaagtactctgtttggactggctgcactccattatttttctctgtcaagtttgattcatggctaccgaacttaccctgtaaagatgcttctgataaaaggcctccaatgcttatattagttatatcatcaacccaccgtgcagcaaaatttccgggtttactgtcggtcctctgttcatcatgcacacaccaaaaaaaaaagacagtttaggtaggcgtgcaatttaagtccaattaactataccgtagatctccagcagcatattactcacatcaaattacaaagccacaacaattaatcagttaaccatttcatccgtaaatatgtttagtgaaacaaggtagataaagatgtacttgtaaaatatattaataaacaaaaagccatcaaggaacttcattggacttcaatcttctaaaatgcatcttaatattttataatctataacagaccaaaaaaatctattacagccaaaatttgctaatttaaaatgcatcttgattctcagttggaatcaagtcgttctttaacttacattgatcagtttaaaaccttcacttgataccacaacttgtctgtcctccgtatctgtttttttcccaacggcactgcaaagtctctgttcattttcagattgcaaattaaccttgcaaggagttgatggtttacaaagctcttcagatgttttagaatcagaagttgagaaccagccgtaccttataagttgacaaaataaataatgagattgagagatcatgtcagtcacttaaaataatctcattcacacac

SEQ ID NO: 21222 - DNA, 4593 bp, Cannabis sativa
cattatacccccaaagaacaaaaacaaagcaatacaacaacctaacatgcacataatcaagaatcaccattggaaaggaaagtttgagttcataaacttaaaccttgctcaaacaacacaaacaaccctaaaaccagctcaaaacaacatgaataaccttaatttaactccagaaaacaaattcaaacaaccttaaaaggtacaacaccattggcttttattaaccgaacacaaggtttgattattcacactatataaatgctcaaacgcgcaacattggctttttattaaccaaacacaaggttcgatcattccgaaagttatttttttaagttttttttgattaaatagcgactctatttaactttagcattcttactacaaaagagcttgtaaatcaacctgaacattatgctcaaaatgttatgatcacagagaaatcgagagtatttagccataatatgtgctactcaatttgctgatcgtttaataaaacgtaaattaacattttgtaagagaaaataaaaagtttacaatcatgaataatcaacctaaaaagagagcttatagcttgattattttgaactccttggatggtgagcatattattttgactttaagcccaactaaaagcttcttctattctcatagtttattgaaagtttccttagtgcatatagataaaggaaaataagtttcgacaaaggtataaaattgaccttattcaagtttcggtgatccccactttacttgagatgatgagagtaagagggtttatttttttcttctctcatttatgtgttacttcttactcttctccattttctacaagcatgtgtaacttttgttatagagttataacattcatgttattgagttgtaattttaggtttccattccattaaaattttaagagtagtttatgaaaaaattattagcaaaataactttataaaaaagtttattaataaaataaccatgtatgatggtataaataaccgaaaattatattgtgcgatcataaatagtcattttgtaactattgatttacatttgtacagtcatcatgcatgattgcataaaataaactgagtgtgattattttgtaaattttactattctacattgttaatttggcaattttttcataatttaatatctctaacatatagttgctggtgttgtggatattcctcctatacatataatatatgatcatgtcatcaaaaaccatgctgtaatattgtttggggctaaatcctggctatgatcaatgttggaacacagtgaatcaaagaaaaatcaattaaatcatgcacagtgaattaaattttactgcatacaatgcatgaaagaaaccttattataaccaatccagattttgcaatattctaaattttttcaccaaatcatacaataaatccatacaatacactacactccaattataaaaattaagattaattatcatcaagattacctgaaaaatattatatattaatagatgccacgtggagaggagaatcaggaaataaaatagataatatctatcccttatccaagtagagatgccacgtgtaaaataaggattggagaatgagatattaatctaatctgttaattgggccattttgaatacccaccaagagttttaagtctctgttgggcccattctgagtttagattccattcttaaccttcttcatttcttttcctttgtttcttgactgaattggccacaaaccaaagaagaagaagaagaagaagaagaagaaaatggcaagtcaagctttggtgtcttcatcatcactaacatcttcagttgaggccacaagacaaatattgggaagcagagcaaaccaatcatcatcatcttcttcaaaaagatcagcttcttttgtggtcaaagctgcttctactcctccagtcaaggtcaataattttcttttatctctattctcatatccatttttgaattgtgaattgaaatgaatgaacctttttttgtgttgtgttaattggttttcagcaaggagcagatagacccttgtggtttgcttccaaacagagcctttcttacttggatggaaggtatatattaatatttatatattcattcaatattcataaatttatttaatcaggtctcaaatggtttaattctaattaagtggagaatgttattacaaattgtatgaacaaccatattatacataacatatttattgttattttgctagttacctccttaattttatatttagacaaataaatcagaaaatattggttaaacactgtaataaaattttagtaattaaataaatattattttagtgtgattaaatctataaaagaaataaagtttttaattttaatgtccaaccagtcttgcatacaatacaatcttttctttcttctttttattttctctcttcaaagaatttaatggaaattacaaattttatggtttttttatatattttgtacaaaaaaaattatattattggaaaattaaagaaaaaattaaaaaatatgaaaaaaataagtacgtagacgagtaattactaattagctaccataagaaggtaataaggtaacttatgttgttttttttttctatattttttctttttgtaaaataatttccataatttttatttatttattttttttttttgtaaaaatgtcatatttttatagatgaaaattctctaataatttaacgtatttagttgaggaaattacatgagatacccatttattttatttgctttagggtttttataaaaatattaaattttgaaaaaaaaaaaaaaagtataattttacttgttacacagattttttaacaaaattactaactttttataaaaataaccgtaaaataataaaacagaataattaaaatcatggtaaaacagaacaactataacagaataattaaaaaataactgtaaaataacagtgaaaacttaacagtatttttgaaaaaaattatgctccactaaaaataaataaaaaagttagaaatttctgtggtgtaaaaacttcatttgcttttgttaaacagcttaccaggtgactttgggttcgatccattgggcctatcagacccagaaggcacaggtgggttcatcgagcccagatggctagcctacggtgaggtcatcaacggtcgtttcgccatgttcggagccgcaggagccatagcacctgagatattcggtaagcttggtctaatcccagaagaaacagctctcccatggttcaagacaggtgtcatcccaccagctggtacatacagctattgggccgacccatacacacttttcgttatggaaatggcactaatgggctttgctgagcacagaaggttccaagattggtacaatcctgggtccatgagcaaacaatactttttgggccttgaaaagtaccttggtggatctgataacccagcttaccctggtgggcctttgtttaacccacttgggtttggaaaggatgagaagtccatgaaggatttgaagcttaaggagattaagaatggaaggttggctatgttggctatattgggctattttattcaaggccttgttactggtgttgggccttaccagaacttgttggatcatctagctgacccagtcaacaacaatgtattgaccagtctcaaatttcattaagattaatggaagatgttgtataatattttgagtagtaacatcatcaccttttgttgctatggacaacgaaaacccttttttgggggatttgtttcctttcttcatctcattgttacattatgtaagaatcttttctattttcccttttctttatcttttgtaattttgtaagaaatgacttgtgaagaaaaaaaaaacaatgaacttagtatatagacatgctcatatgctagctcaaaccaggagtatgaaaattaaaactctattttcagcaatgttaactttttttaaatttaataaaattttataaatatcttaaatagctataacatacgtgataatgaaaaatttcattccagaaataactaaggtactagccagcctatttggattgatcgttgaaatattataatttttacatattgagcttaaggtaaaacaaaggagttttcaaattgaaatttcccacgttaaaaatttttaaaaaactaacaggtaccctagaattatgttaagaatcagaattaagaaaactgagacatgtagtaaaaataaaaatgaaaaactaatattcattgtttagagataaaattaatcacatgaagtaacagaaagggctactcgaaggtcatttgtggttccacatatatacattcgatatgtttctatttcttgttgttgatgcaatccaggagtgtggctagcatagtggttacctgttaatccgtcacgaatcgaaaatattatctccctgagaatcggttcatggccattgagaagattgcccatgcttaaaacttttctccacgattggttagctgtcggatgtgtaaacatactagaaattactgctcgttcccgcgcccttacttgttgcctcttgtcaaactccttcagcaaagaacaaa

SEQ ID NO: 21223 - DNA, 1182 bp, Cannabis sativa
tatactattaattatcaatcggtataatatatgtaatgaagagtgctatgaaaattaaacaggatggcatattacattttttttgggtacttaaatggcatattacagcttgaactttcctatactttacctgattagttcctttcacataaatatgatatggtatcaaagtgcctattccatttgtttttcaactttaatgacattttttttttttcaatttttggttctctactttcttatttattattttcttttatttagaaaacagagtcttcattcaattatataaatttggcacaaaatcatatggtttttgtgttgaaaattaaataaataaagtaggatcaaattcaaatgagtttgggttggcattctactgatcaacctctttcttttcaatgtgtttataaatgaaagactgacagcatgtaattctttaaaaatctcacttgtttttcctcttaatgttattgggaaacaacaagagacttgtcttgtaatagacaacttgtccctatatcttttatttaaatacaaatataagtattttttagtatactaatgccattattaagatctgtcaaacaaagcaaaaaatgatgcttaagaaggtaaaccaatggagggtcttcttgtctccttatggatctaccctaatcacatattacttttattataaattttaggataatttacgatataaatttatttttgatagtaataatacttaaattatatttttggaactctataggtatctaatcattaaatatcaaatcattatctacgtgtcattttttttttgaatttttttttttatctggaccaattagagattgtcacgtgataatttacttaacatttaattatcatgtatttactgagttttaaaaatataacttaagtattattgccgccaaaattaaacttaagttttatttacaaccgaaaattaaatttaaataattatactgtaaattattttttatttttattttataatattatgaatttgagtggcataactaagaagcatgtgcaaaatgtgacttgcagaaaatggatgtgtgtacttatctttactggtaatatattattctcttctgtttaatatattatcgttactagtaattgaatatatttagttatttacttctgttttaagctttgagaattttt

SEQ ID NO: 21224 - DNA, 7303 bp, Cannabis sativa
  modified_base (1123)..(1145): a, c, t, g, unknown or other
taaatgaggattagtgacaaataagggtttgccaataaagcctctaaaacttgtgggaaaggaaaaatgtatttaatgcattgaaaagttccagcagaaaggatctttgggggataataatcatcagagacattaatatcacaattaatgctctgaacagaggaatgatgaaagaaggaaggaggaacccaaacccgattgccaccacaccaccgtggagggtggaccagaaacccaacgtgagtacgagacggagatagagaaacatacctcttgagagttctagaaatcgccattatccctaggtaactacaattctaccatatgcactattaattattcattgttttaaaaaatatcctattagaaattcccatcccatctcctttttaggggtagatgagatccgtcctaaaagaaatatgacatgggacccagccggtattcaaactgaaacaactatccgttatgctaaaaccggaaactaaaagaagattctagacattctgtatttttctcaaaatatccgggaatggtctagtaagtaacaatgctcatttctctcttttattttcttcttttatttccttaaatacgttaacataatttaaaacaaagattgaaaataagacagtttgaaactgatcaccgttgagatccaaattagatttgcaatagtaatgtcggagaaaacgcgaggtatcgcaatgacttttcctgcggaagatggagaaaaggaaaaggggtcgccagtgtctcctaactctctctctccaaaccttcctccaaggctcagacgccgtcttatggtctccaaatcgcctattactgctgaacacattgaatccaaactcaatcaagcaaatcaaagacgacaggtatctccctcaattcaacactgattcctaattcaaataaatgttcttcttcttcttctttcttccattccgttcaaacttatctgttgaaccgtgcagcaattctacgagctgttgtcgaaaaaggctgtgccaaagtcgagagattcgtctccctcatctgcggacgaagatctgggtaagcgacatgaaccaaatcttaaaggtgccgagcagaaaaggtaaactctctctctctctctctnnnnnnnnnnnnnnnnnnnnnnntatatatatgtatatatataagctgtataaaataaggcaattcttaatatataaacctagtgcggctgtatatttgaacatatgtatttagatcatgctaagaaagaaagaagaggggggtgggagaaccaacttgtgttttgcttcttatctctcctaattacagataaaacactactacacaatcggagtaatatgtcaggccaattataccatctttaactgatattagtgtcttatctctactagaaatagaatggtcagccagaccttgtaagatgctacgagtcctagaaaattgtgcatagcgttaaaatttaggaattttgtggttaagatgcatgaggttcatctcaaaactaactggcttatgcatcctgcgtatgtatttacttttcacgctatcaacgtagagcatgtgaatgtgttgctaaggatctggcatacaccatttcctcgtctgaagtgtggaatttatcaaattagaggatgagaagaggaaagtttaacatgacatgggtcataactctgatgaaggtgctaagtcatatctcgatgcattaacaatcgttcatgtcagtgccttttgagatttaaatactgtcattcattcatatttcggtcatagctgactagaatttggttttgcggggataattagagtatttcttatgtcaattatggttttttttgtagaactgaaatcgggattttttgtctagtgatgccctcttcaactgtatttgtttttattgtgaatttacggttactttgaaatttttgcatgagagaggtgaatttaatttagctgtctaatcttagaattctccgtattttttttttatcatatgtatcatattacaaaacccgtttgaagactactgctgcgtatttgaaccatataaaaagcttggattcctactgaagtgctggaatttatctggctttcagtcatagaaagttatcaccgcctagtaatgctgaaggaaaagtcttctatttttatttcacttgactcaagtcttaggtgtaaattcagaataccagccacctctttttctctatttaatagagccgactttcttcgttatttgtgaattttacctacctgattgtaattatatctcttcttacttgaccacctaatcagttcgtacaatgttaaagtaaatatgtcaactttcctaggataggggtatagcaccatgtttaaattcttgaataactacaatattatttatccttctcagagtttattttcagaagaaaaagaaatactttaaaagatcaaatgccatgctaaatacaactttttcatgccccttattcttttgcatttgtaggtctgcaaggcggtttttgcatccaaggaagactactcttgccctagcaaaagcttttgaggctctagcaattagtgaagaatctgttaagtcaatgtcatttgagcagcttgcccttaaaattgaatcagctacaactattcgaagcacgaaagcattacttgatcgtctagagagtcgatatttgatctcacgagcagctactggcagcagtcttcctagtttggagaacattgattaccttctacagcgtgttgcttcaccagtcagtaaggaaaacattaacatcaacgaggaatctaagaacattcattctagtgatgaaacccctttaagttcagttgcattgccaaggtatccagtaagagtttttctttgtgcatacatgattttgggacacccagagacagtttttagtgggagaagagagagtgtgaatgatctggcccagtctgcaactgatttaatttgtgaatttgagctattacttaaaattatattacaggggtcaaataagactccccacaaagatacagctcccaaatccagcacaattactttcacatcccagctagaagcctttgataaagcatggcgtttgtacctgttgcacttcgttgcatggaaagataccgacgctaagttgttagagcatgatttggtgagagcggcttgccaacttgagctttctatgcaatcctgtaagttgactcccgaacttgatatgaagactatccaaaataaggtattctgatttcaaaatcatttgttagtgcatcttttttcttccctataagtaagtcccacagttgtattcttattattattgtaatatattttttattggttgatggtagattacagaaaatcagaaaatactaagggaaaaattgcagcagctaagtggtaatcaaggacttgaaaacttggaagctgctctctctgaggtacggtccagatatgctggatcaaaggaatctgcccgtttatcttcttttcaccctgcttcattgggtgattcttcagtatctgtatctgctgaaacgagcaatctcacggacactcataaaagctctagtccaatgaatcatattgtctttgacaaagatgaatctgaccttgccaatgaagtcagttcttctttgtctttcaaaagtggtacagatggtcatttgagccctactaccttagtagttggtgagaatgagctgcttgtaaacgaaattctccatgatcaacaccttggtgttgttgatagtttgacagacggtaatgagggtcaaaacagtcttaaggttggtacataaacttataagtatcaactattaagcaatttgtgtaaagattatgaagtatttataaaaattcatctttccttgaacaggcgaatgtgagagagaccattgaaaaagctttttgggatggtgtcatggagtccatgaaaggcaatgaatccgacttcagctggattcttaaacttgttacagaagtacgagacgaactatgtcacatgtctcctaaaagttggaaacatgaaattaatgaaagtatcgatgttgatattctcgaacaggtaaatagctaactaactattccatttagtgcaaattggtgagttttcctcaatccctaatcgaaatattttcttgacttccatctcctttctttttttctattttcattctacgaagatgctgagatcaggtgatttagatgtggattattttggaaaggttctagagtttgcattagggactttaaggaaactttctgctccagctaaggaagatgatatgaagactatacattaccagtttttgaaagaactaggagacattttacaagctgaagacaaatcaaaagcttcatgtgcccttgccataaccaagggtctgcggtttgttttgcagcagattcaggtgtgtatttgacttcaagggcttgcatttttttttttttttttgccttttcttttagtaaaaaatctgtgctttctgcttacatggtctgaaatgagtgtggatcctgctaagtaattgatattacaaaatattaagcatatttatttttgcctttttggatctttagcttgaaacttgaagttccctgtatgattattccaaccaggttttgaacaatgtcatcatttcctttcataattccgatcctttctgtatcttccaatcaattcaaatgtggagatgattgtttaccgaattaaatattctttggaactatctgttttcagaatattgataatacataatgaagttcttgtattttgataccacggcaaaacatatttgatacacaaatgtacttttctacttcagtgctgctagtattgactttgcattaaccccttcatatttttgtgattcttctcctgctttctatatctccttactcttgtgagtattagaatccttcgtgatacaaagccaacaaacttgaatttttacatcccatgttataaagttaacttgatatttttagcagactcttaagagggagattagcagagcacgtctgaggatggtagaaccactcattaagggcaatgccggtatagagtatctgagaaaagctttcattgataggcatggttctcctgcactagcctcttcttctttgccaactacaaggcagtgggtttcatctgtgaaagtgatggtagagcaggagtggcatgaatacaataattctttatctgttgtgacaaataaggaaccttcttctggacttcctcctaccactctccggactggaggcaaaatttctggaacaaaaatcagctcacaagcctcttcaatagactttattggtaactcaactggtttatttatttatttattctgctgtggaaaagaataattatgatggtttggctcatctatcaatcgatttattgcttaattgtctgtttaaattcttccacagattcggcttttccaggagaacaattaccagagtgcgtgggtgaagaaattgatttgttaattagacttggcttattaaagctagtgtgtgaagtaggtggtctgagcctagaagttttgcctgaaactcttaagatgaatctctccaggctaaggggtgttcagtctcaatttcaaaagataatagtaatgtctacctggtaagtgagctcatcatgtgtggcgtctcctgatttcctcaacttcctatttgatgtaaatggaaatttgaaaaagatttttccagcttatcattatcttctttcattatttattcttatttacttatgcttcagccttgagactcttactgtaggacttagcactcttattttagaaaactccgattagtttttggctattaaactgtgctaagtacaaattgagtcatcatgtacaatctttcaagttctttacctctctctctcacccacacactatatgatttatcattcatggatgcaaagttcatgatgtttcatcctcgtggtatgatttttgctcactggattgcatggcttctgcctgttgtttatattaaatcgaacttgttcactgccaacgtatgcaaacatgtttctcttccaactgtcaatgcatatgtgactaataaatttgttatcatgttttacagttgtttggttcttcgtcaaactctttcgaacgagaacttagtgactaatgctctcgacatggatacaatagcattaagatgtgtaaatcagctctctagcctactggaaactgttgaggacattggtataccagacattgttgaaacaataagtgggtgcgcagaatatagtgaacatcattcatgcccagagaaactagaggcgaggaagcagattatggcaaggatgctggggaaaagccttcaagctggtgatgccattttcaaacgggtttctcgtgctgtttatctagctgcaagaggggttgtctttggaggaaatggaaaaaagggaagagaacttgcagaggcatctcttcggccagttggtgccactcttcttgcagataatttggtcaaggctgcagatgtactgattgttgtggcagctgtaacatccaatgttcataggccatggtatgaggaactactcaagaccttgtgatttacctaacggaaaaacatgtcctgtgtgtaaatatatttgtacgaatgtatattattttcttctgaacagccatttgtttgtataattatgtggcaatctacaattacaaattgtatagtggatgaatatggcttaggttatgtgttttggtgtagttattaaaattatcgagattgtaaattttgaaattcgatattttgtgtatgatgatcgagggtttggagattgctcaaattttatcaaattgtgtggagtgttgtactcttgcttgaggagttagtcgaaatgcctttcctttttagatcatttgaggcattgccacctagcatttagttgtaggtcactagttgtggaactatctattgatacatgttagactttgatcgataaagtttattttagaggttagtaatgaagttttgatgttcagtagttccacaatatatgtttgatagtataaaatgttatacttatttaactagggaatagatatgcgctttgcgcggttttcataatttttaacgaataaaatttcaaatttaatattttttaaacttttttttatgaataatataaattatattatatatttatgtaaatctcttttatatttgtaattagcataaatattaatcataatacaataaaaataaagatgcatctcaaataaagttatttataataattaaaagctattgaaaatataaattcttttt

SEQ ID NO: 21225 - DNA, 3758 bp, Cannabis sativa
tggtaaaatatttccaacacctatcacgaaagaacttcacagttaagcgtgcttcacttggagtaattccaagaagggtgacttcctaagaagtttttcaggaagtgtgcgagtgagaacaaagcacattgggaacactcgtgttggcctaaagggatagtaatcaatccatgaagcacccaagagggacgtacttgtgtataagaaccataaatctgtgggagaaggcccaatggaggcttaaagtggggacgttacaaatggtatcaagttagtaacgtataatagaacgtcagggagagtagtcgatcactaaggttaagaagattacttgaattgcccattgtaatacggtaataatggagaatagttttatatttaccagatggtcaatctggtatacaaggtgaccattgaaattccaagaaaagattgtcttactcaacaatgataaaaagatatgctcacctaaaatgtgaaagaacttataaactgagacgcaaattaatggacatatattcaagtggttggtgaatgttggatcacaaagtatattgtttattaaacaacaaactatctaattgaatgtaatatatgtttttgagtgattaaccaagtatgaagatagtgatgattgcaaggaagcattagtagtgtaggaaccaaggagtaaaaccttagtggcaatgaatagaaaagaatacgagagtcttagatgttgatgaatcagtaccatcaacactagactcactataagttggtatggtagttcatactaaggggttgtcaataaaatagagaatatacttgaggtctgtatatttctagatgtgtttagaaagattatcaagatttctaccaaacatagaaaaaaaaaacttcaggatcaaagaatgatctttcataattattatcagttgagaatttaggaaatgggtactttgagtttagttatgggtacccggtatgagcaatgtttcctccatcgtatatgttgaatcaatttattttagaacggtcgttaacggtaaataattgagaaatttaaaatttgtatcagctcaagataaattgatacaatttaaaataagtggagatgaacaagattcaagttgataataagatgggaattcctcaaggttaagtgaacaaaatcgatgaggaattgtaagaggctaatgaagggagtgaaggaaattagatttaattaacgaatgaatgaaagtaggaaatacaattaggaatgacaaagaagcaactacttcctaataaccatgagcttaccttggagttaagcatacttaacttggagtaatctcaagatgaaaagtcttccaggaagttatctcgaaaggcatacgaataaggacaaagtatgctggaaagattcatattagaatgtaagatcagcagtcattctagaaattatcaagatgaaggtatgtgttaataagtaaggaatttcataattggatatccattagagcaaacattcaacttgttaataagttaaatcagtacattaacaactagtaagattacatcagcttgggaaattccataggaagaataagaagatgtaattatggatttggtactgtgtaaccttatgatttgaattgagtaatggcagtagaatgtactaagtcatcttgcagtctactagtgtagacaaattgtacagtaagtaagggtattgagttatatgttgaaggaatataatctagtaaagtttcaaagtcaaatcccataattattatgtaaagggttaaagaagattattgagaaccatagatattaaatcaaaaatagtaaaacttttattctcgaacagatgaataatctaaatggattaataagactctagaaaacacatcgtgggcatataggataaaagttagagtatcttgaaataatctcctcccttgacagaatatttgcctaagggtaacaattcactgtatcattgattatgtactttaacaagtgtggtacaggagaattattagatatttgttcactggaataacataagtaaaaggagaatacaatggaccggaaggatccaagagaattataaggctgtagggtgaatttgagttgtatactcacctctttgaaaacatagaaaagctatgttaattcaaagcgtaggaatattgagtttcaagtggaaggatttgtattgctttgagtatcatattcataatgtgaccttttgatactggagtaagtaaaataggtagcctataagttagctttaactcttgcgttatctgaagtgtataatgtgtttcataattttatactgagaaagcatgtattagacttgacccatattttgagctaaaataattctaagctcagacaaatttattatatgaggaaactacttgtccagatttggaactagaaagagaaagtactttgggataagacaatttcactagttaaaagtaatgtagaggaaacaacaagtttgaagaagcaacttgagagttagagtcgtaaatgaaagagtagtatcccgagttgctcgggtaaatttggaggacgaaatttctataaggaggggatagttgtaatatcctgataagcataatggtaaattattagagatttattatatactatgggttaatcaggtaattagtgggttatgatcctactaatctatttcagtaaaatttaattttgttataaatggataaataagtgtaatttattaattatgaaaacttatatagcatgtctttatataatatgagctatttgtcgaataaaaatatttttaagtttggtgaccttggtgactcgatcgggggccaaagatatcataacaagtttaattaatagatttgatgagaacattatgataagttgataatataagtattgagataattagaagtgtttgagatttgacctagtgccttagaaatagagattttttagtggctagaaaataataagatagctattattaatagtatttttattaataaaatattaataatattattattattaatattctgataagtttattaatatataaatatatatattaagtttaaaagaaacaatacgaacaacgaaacacttctctgttctccgttcaacgaaaccctcattcttctttatctattttctttgattttcaacctaaaacctagccattcaagctccagtagtagcaagatagtaaatcagtgaagaggaaaagcttaaggtaaggattgtactactacaaaaatggccttttacttcagttcttaagtgacgtataaagaatttgtgtcggtttgtgtaactgaagctataagtgtagacgcaaatagtcttatttttgtttcacttagtaacagacggtaaaatatttttacttcagttcataaaccaaagcaaatagtaaaacattgatgtaaattagtttcttacttcggttatgaaccgaaacaaaagaataaaaaaattaaaaaaaaaacataaacctttagactaccacaacctttcagaccgccacaacaacccaatagtaacaataataaatactgccaccacagcaacccatcgtaccacaaaaagtacatcaaacaaccaccatcccagcggaccaccaccaatgcctacaaaaaaatggagagagaaagagagaaatcagagctggagcggggtgcgtgagacagggaacgagaaaaaaatgatgaatctcacctttgaaaactccattttctcaagagagagagagagagaga

SEQ ID NO: 21226 - DNA, 3630 bp, Cannabis sativa
aatatgtgtttgtattttttttagtatattaatgatatttttataattttttaagttatatttttcgtataataattaatatattgaacaataagagatgtgtaatattttaatttttaagtaatttaataattttatacatttaaattttaaaataaacttcattttttcattaggagattccccatcccgtccccgatggagaatgggtgggggtggggatgggaattaaaatccttaacggagatgacaatagggggcgcactctccacatattcccagccccgtgtgcattcttaatttcctagctgtaactgtactgtgagaaaaaacaactatacagaacagtaaaaaaaagttgagcagagtgtaataaattataaattttaaagtgttgtgagttactaagattctattataattataataataatgttataatccaattcattataatcacaaatatataaaaacttatgttatataaaaataaaaataaaaaaaattcatatattgttaattattttctcttaaaaatataaatttacatgcatttgataaaaataaattataatatttttaaattatatttttattacatgtaaaaaaaaaattaaaaacttaaatatatcaaaaactctaggttaacatgaaatattaatgttaaaaatataaaatgtaaaatatcttcaggataacataaaaaaaaataaaagattcaaatattatttattttaaatatattattttttttaatatataataaataagtaaatatatttttagtacaaataaatttattaatcttttaattaaattaaaacaactttttcaaaaaatcaagttatatcaattttagcttagctataacttttccataaatttttcaataaattatttttgaactatttaccaaatatttttttatcaccacttttttaaaaagcaacttttaatttttcctaaagttatagcaaataggccctaacacaagtccaattcaaaacggtcaatatttgccaacataagcgttagtcataattgcattaaacaagttttcgacaaagatataggatgccacgtatccgaaaaatatgtacaaaaacctttaccctagtccaatcccagagcttcaactacaaaatgatgtttaggatattgcagtttggaaaatagaggcataccacttacaacttgttagttcagacatgttgagttttgccgacaatggtaggtaaaagcaaaaacaatttgccaaaatttcctatacatctatatatataatataatttaaagtacgtccaatccaagcttcattgaaagacaaaacaaaattccccttccaaaaaagatatggcaaaattatcctcgaaaataacttaccatggcaacatactgcaatgatgactactctcattgagttctagggagaggattctcctgtactggattgagatcattggcgagaagcgtgagataacggtttccaattcttcgtcttctctgacatgttgttgtgccaattattttttgagatctgtcatttatagatttgcaaagaaagaatcccagtaagcctgccgtggtaatttgataactaaagaaaataaatagttggggtacatagaaaaaaggtaccaggatttcaatcaccgagaaaagaaagtggctgtctcatgctaagctctgctttgagcactgggaatttctccaaatcatgagaagcacctaaaattttctgcagatgaacgagccaaaccataagttatacacaagttacaacactacactagtcatccactaaataaaatctttagcctcaaaaaagcaattcacgaattttttaaagcatctttcaaattgctctgatttatccgtattcgttagtttcatctagtagcttaaaaatcggaactttcccaatagatcatcaagtgagataaaatatgagctcaaaattgctcagaatggcacttaagggaataatatttaccagtgcagcaaggtgcgcttcttgtaaaagatttccatctgcttccaatcgggcaataggaaactccggaatatgtcccgactgttttttaccaagcaaatcaccaggtccccgtaagagaaggtccacgtttgctaagtaaaaaccatctgacgatttctccagaaccttcagtcgaccaagactagtagaagtagatgctataaatatgcatttagatttccttgatccgcgtccaacccttcctctaagctgatgtaactgagctattccaaacctttcggcgttcataacaaccatcaatgatgcatccggaacatctacaccaatctcaattacttgtgtggcaagcagtacttgagtttctccacttctaaatcgtttaagtgcctcatctttctcgtcgcttttcatttttccatgcaataatccacagctgtagccctgaaacctggtggaaatagcttcaaaatccgcagatgcagcacgaagtttcggtagctgttcagattgctcaataactggatacacaagataaactttccctcctcctcgtaactcatctagcattatctgttattatatgataaaagtagtccttgtatgaacatggtaactcctagtaaatgaatttaaataaatatgctaacacattacaagtatcaaggaaaaagaagtaaacatgtgtattacttttaggtataaatagccaaccataagttagagcacccctcatcttgttcatttagaaaattacaacttggatgagttacaatctttgttcttaagtctttgttatttcattgcttcacaatttcaaagaaaaattactaaataagattctattccatgatggaatggaaattgaccccggataagcaccgcaattatttatcataacaaagatgtgaaaagtgacaatattgcagtactctaaacagattaatacaagatattaaaaacaagaaagacagtcaccttgtaaacggtctcatatccatcctcatttccttcaacagtgacggtctcaactggtattcttccaggaggtaagtcagttatctgcattattaaaaagtaaaattaataactagtatgcaacattactcaaatcgacaaattttagctagctttaaccaaatttagtactaaagattgaggtaaaaacaacactaccaatcaatttctaaaacatcatttttcatggtttgcttcaaattacctgacgcatctgtactatatttttttttgaaaaagagaaagagacctttgtcttagactgacccctttcccgttatatatagataacctcacttgtggcaaaggaatatcgtgattacaaactataacagaaaaatttaaaacgacaccaatccaacaagacatacacaaatcaagtactcttaaacaacattacacaacaatctccaatctctattcaaatctaagaacgaaaactgctcaaatctcttagttttgtaaacccaaacagctgtccaaaatctgactttttcccataaatcttcaactgaggcttcaatgccttctaaaattctgttattcctttcgagccaaataacccaaatgattgctaggacagctgtcctccataggtatgatctacccttactcccccc

SEQ ID NO: 21227 - DNA, 2716 bp, Cannabis sativa
gactcacaagtgtgacatccttccatgttcacctatatacagtataaaaagtaggccgtatatgatataattttttattaattgctcttgtttcactatagtctataatagtagtacaacatatatatatacataataataataatacacagcacatgatactagtacagttatacccccaagtagggacatatagagaccaaacgaaagtcgtcgatattgatctacatattctcactctccgagtcaggatgacttttgagtaaatagctactgtcaatataaagttcaacacagaaacaacaccacatatattaatagtactatatatcgacctctcatttcaccagacaaaccatctttattttcttcttcttcatcttcttcttccatctgatttctccctaataatatccttataaaacccaacaaagaatataaagtcataatagctagtaattcaatacaacaaaaatgagtcagtgtgttcccagttgggatctcgacgacagtacaagtgtccctgctgccagcagattatctcttcgctcccgctctaattccaccgctactgatgtccccctgtactccactctctctctctaaagaaatatatacatataaataaaaatagctaacagtttttttttttttttttttccttttctgttggtttgggtttgtctatagatataatattatttttgttaacattataatggctttgtgatgcaggttagattacgaggtggccgagctgacatgggaaaacggccaaataaccatgcacgggttggggccaccgcgagtgccgaacaagaacataggtacgaattggccagagaagccacgcgccggcggcacactcgagtccatagtcaatcaagccacacgaccctcaaccctatcactaccttacaagccccatggtatgcctacagccgctgccagagaggagttggttccctggatgaagggccatcaagggtcggcgccacctgcagccgcccaggacaataccgcgaccatggacgcacaagtcccttgctctgacccagtcaaatctcgtaaaaacgatcggattaaagatagcgtagtggtaccggggttcggaacttgccatggccagcgaggtattgtatcgtatactcaggtagcatcgtgcagtggcgccgttagtactcaagaggagattaataataagaccaccggaggctttgtagttcctgatcagaaacgagaaagcaggacggtcgtgcagacgacggcgcgtgagtgcccaggagaccaaagtatgagtggaaccagcgcaacgtttgggactgggaaccagccacttagacttgactcctgtgatagggatgtgggtttgggctacccttctacgtcgatggggtcgccggagcatgtcagctctgacaaacgttctagaaagagaaccactgcagatgatcacaactcgttttgtcatagtagatcacaggcaagtccctaactcaattttgttactattattatcaactatatatatctatttactcatcattactttttgggtaactgtaactgcgaccatgatgatggttacatttttgtaattatattatgtttataatattttaaaattatattttaaatttaaattaattataattagccgttttttgtttttatattttaaaattgtgttttttttttttcacatttttactgaatttcatatacaagtttttttttttttttaaagaattaatggaacaatttaaattataattaaataaaaattattggaacaacccaaaccataaattaaaaaaaaaaaaatatattaaatggataattcccttataattaactataaatttaaaataaactaattttttaattagtatattcagtaaagtatttttagtaattaatatttataaatatttttatgaataaaaaataaaaataaaaatatattattatcatgttataaataatttattaattatttttaattaatttttaaattaataataaaataatccaataattaaataaatgtaaatataattattatctaaccagtaaaatcttattatatatatatatatattataaactatgtttatatataattatagttatttattaaagtttaaaaataatttatagatatatgataattataattttatttatgttatctgaatgtgtcacaaattttagttattatgattgttttattaattaactaatatgcttggttattataacagagggagtcaggcgatgatgaagacaaaaagaaaggaaccggaaaatcatcggcttccactaaaaggagtagagctgctgctattcataatcaatctgaacgggtaagctctttttccttatatatttattagaacaattagaagataaataaatattgcaatatttggaagacagaagatagtggacagttttcagttagtcattaattatatttgagtcaaacatatatattagaatttaatgtataacatatatgaggtatttgtaatgaataaaattaagaaaatttgagtaatagaaaattttcttatatatttataagagttgttccaaggattgaaaagaaaattaaaaaaaaatatttttgaacaaaaataaaaataaagaaaaataattgagtttaatttgaatatttttatgtaaatatatttttaaaatagtgtaaaataat

SEQ ID NO: 21228 - DNA, 4966 bp, Cannabis sativa
gagaaactgctaactaattatagacgcgttaaataccttaaataagcatgatgtttttgaaaaaaaaatatattgttgggaataaatttgtggcactatttaaattaaggctatttaggatttttattccctaaattttaacatgtaccaaattatgctttctaaatttttctgaccatttaaaattctttgtcaactattgagattgttttaaagacgtttgtccaattttattctattttactaatttagtgattgttcatgtaataaattatgttcctcaaactttgaaatctattaaattatatccctcaaactttgatatgtactaaatcatgtctctaaattttgattcttgttagactttttttattaaaattgaacaaaaatccttaaatccaacaatcttaataatttagaaagaacttttaaccgccttaaaagtttcaaaagcataatttagtatatgttaaaattcgagaataaaaaatttaattagccttaaattaattaggtttccaaataaaagtaattaatatttaaaaccaataaacctaattaattaataagtattggttagctatttcctaaaagagtttcatttatttcccaaaacccaaagcaatcaatcaaccaagccaagcttgcttgcttgctctcacttcccctcctccgtcgccggtcacctcttcctccagaaacggcgccgttctaaccaataacttcccgttatggaagtgggtctcattcctcagaccccaattcaaggccttccaacttcaaagacgaccagccccttcctttcttccccatcaggtcaatccaaatcaactcttcctttcttcttcttcgcaatcctcaagttttatttttgtggggttcgaaaaactcaagataatctcaatttgaaaacccaagtggcttttttctttttgttgggtgatttggaataaatcagattcttttcgaggctaacacactgtgtttgatgaagggaaattaggtttttcttcttcttcttcttcttgattaaaaaagtaagaagaattagtttgtgtttgattgagagtgttctgggtcagtcatcatgagtgtttattgattttactgaattgaagaaaaaaaagcacttgatgatttttatttttcctttcaaatttcatgactagagttattttagctataggacagtattaagtatgagtaattagaagtttttagttaaagattgcaaatttacaatactaaggggaaaattagtaatctgaagaaaaaaaagtttatatgtattgtactgaattattggtttagcattggtaagaattattaaattttgttttctcttgagttttgtttggaagttggattttggttaggaaagattaaggtaaggaaaatagaaggaaaaaaaaagtgtggagaatgattaaaaaaaatcaatttttcttgtttggtgtgggaaattttgttgaatcaagtttttttccccaccaaaatctaatttccatagtcttatggctttaggtatttagcatttgattctatctaggcatttggtaagtgtaagagtgttttgtaaaaatagtctttatgaaagtttttattagcaaaataactttggatggtcgcagaaacgaacatgaattataatgtgcaaccataaacgtctattatggtcgccaaacgaccatagattacatggtggcatagaataaattaagtgaggttattttgtaaattttagtattttaggagtaatttagagctctgtgtttactgaggttggagtgaattgtgtgtatttgattatggtagtgtgttcatcctctccaattgcagctctctaagtccaaatacactagcttctagatgtgaatatgttactctctggccctcttatgactgtatcttacctatttcattttttttatttttgtggacaggaagctactattctttggtggtttaattttatgtttgttaagaacatagttcgtgtatgatagattgatagtgttagtttataattatcgaaaggagatacaaatggctggttttatggctggtatggttatcaatcatggatcatatgaaagtgattataataaacattcgctagagattccagatgatggaggtcgttggtacttctcccgaagagaaattgaagaaaattccccatctaggcacgacggggttgatttgaaaaaggagacttatctacggaaatcatactgtacatttctccaggatttagggatgagacttaaagtgtaagttttgttacttctcgtttatcgcatatgcaaatcattaaattgttgagcttttcacttttcatcttcaattgaatgccaattgaacattgtcttagttttttcctaatagatggtgcttaacttctatctagtaataggtttttaacgataatgaaaagtcggtttaggataaccaatgctctctttagtggatataaatgagatttagtttgtttatgatcattgtttcaagataatgatgattgtaactattgtataatgcagaccccaagtaacaattgcaacagcaataattttttgccatcgattcttccatcgtcaatcccatgcaaagaatgatagaagggtaagcctatatcattcaatcttggactgcccttctcattttaagtcattgtaataatgctaatataggttgctatacaaaattatcaatccatgctgattggcaaagcaactgccgaaatgtatgagggagaactgttagatacgagtgagttggaatctgatatttgagtgggaattcatctattgtagtacttaattttgtgttgtaaatcctttgcagaccattgcaacagcatgcatgttccttgctggaaaagtagaagagacacctcgccttctaaaagaagttatacttatttcgtacgaaatcattaataaaaaggatcccgcggcagcacaaaggattaagcaaaaggtatctttttattgccttagttcttgcataccaatcattcctttatttatcaatgcatgatatttctcttaggaagaaaagaattatgatcatgttattaggttttggtggtctagaagaaattttattgattttatgagacaatgaggaccaaataatgatgccttaatcaagattttaaaatcgtattcgggaatcgtctttagcctcaacaaaaagaacaaaacacctcatgaattatcataaaactcatacaaacaacacataatttcataacaaagtcataaaattcatgaaaccacccgttaatatcataaattacattcattgaaggttccaaagaaaatcctaattgatagaggaatagtagaatcaaatcaaagtccaagcatgaagaagacatattccaactcaaatgtttaagaagtcataattttcatgatcattatcactattgagactttatgagaaatcattgtattgtatagctcgatcgttgtctccatcatcatttttagcaccttcaaattcatcttcatcttcctcatccaaatctacttggatattttttccatttcctacatcataacatatcaatatgaataatttatatcatagactagcctactctatataactaagtctatacttgtaactacataattgcaatgagttctaaaagtaacctttctttggtgcatgatttgtttcttcttccttgttgctcttgaactcctactctcatcctcaatctgcactaccccttcgatttcaattactctgctatcaccatcttcttcatcatttgggttggctacccactcatcatcagaagacacattttcaacaatcaaaggatcatattctacacttcctgaatgtttctttaaaaaattgtgtttcaactttctattgtacattatgtacagaagagtattcatcctagctgtggttaggcggtttcttttctttgcgtgcactttattgagaacactccaattacgttcacatgtcgatattgaacaaataagacctaggattctcattgcaaattcttttagatcccaccattcgactatataatgaatggaaaaagaaattaagtaacttttttaaaaaaaaaagaaaaagtcgtaagtatttacttggtgcatgtaaaacacccattaatcagctcagaaaatgatttaccttcaattttttattttttttttaaaaaaaagacatgtaagagatagactgccttgagttgtgactgccttgagttgtgatttattagggttttccattgcagtttttttaatagtacagacatgagttaccagacatagctttattgtgagcctgaatagttttccttagttatatatgtaattttacctttaacaaaaatgttttcaatgattttttttttttttttttgtagagtattttcttaaacacaaagccttgactgccaatataattttggattcttgttgacactatctggcaatacaaattgatccatgtttttttcgtttatatctttaatatagttcacaacttcacggttcaagaaattacttgtgtaattttaaggtaaatcatatactcgaaaactttacccaaaaggggtagctcaaatggtcaagcacgtggtttgctcccacaatttctgaggttcgagtccctctttaggtacctacatagaaattgttagagtttgccggtccccaaatgttgtacggttaggcaggaatcctaatttcaatatatatatgtataaactcggaaactttgaatttggatgcattgtttggcatgttatagtacatgttaatgagttacgaaacaggttactttctttccattcaacatccttgaccattcacttcgatttcttgtgttgccgaatgattgcatttcccgctattgttttttctttttcaatttatctcattcgtgtatttgcttttgtcatacaggaagtctatgaacaaca

SEQ ID NO: 21229 - DNA, 6029 bp, Cannabis sativa
  modified_base (5659)..(5662): a, c, t, g, unknown or other
ttgattttgtgtatggtagaatatatattttttttacttggggtcattatagctttaaaagttaaatatttactagggacaaactttatatagatattaatattattaaaaaaaaaaaactaatatagtcatgcagtgacaatctttttaatttcagatgaagaaaaaaggtctaaaagatcattcaaaaattcaaaagtgtattgtggtcatcaaaagtctagtcatttcaatgcatggttcatacattatcaaaggacatgccatgtggagaaaaaggtgaagaaaaattatcataaattctttgttttatttaaataaattgttataaatattttactaatttatttcaaaatttataagttttaagtaaataataataaaaaaagatgacattgataaattcaaagaaatagtaacaaaagtatttggtatcattaaaattatagggatatatcttctttttttttttttctaaaaaaaaaatatgtaggtatatattaagggccactcctgaattttaggaagtcttaggaaaataaatatttttgaatccttatttagaataaaatgtgatattttttaaaattagtataaaaatgtataattttaaaagagaaaataaattttggactcctgggctaggtgggctctaggcacatgcttagtccgcctatgtccaggaagatgaaaagttaaagaaaattatactacatacctttttaaattgatgcttttaatttttactctctttttaaaaatctcttatgttacctatttttttcaattattgaactaattttacccatatcatttcacaatattatccgttcttcttaaaccaaaattttgtctcaactttcctacaaacctactcatctatctctaaagaacataatctattatgtttgaaattgcctcttaattatattagaatgtaaaggtaatttgagtaccatactcataaatgagatatatacaaattaaattttatttaaatgtaaatttaattaaagcatataaggaaaaatattcttcaacttctccccaaaagttacatactaaaggcttactctccaacatgataaagagtagcatatccaatatgttgttgtaaaggacgtgcctatactatgagggcatacctcatactcaatgcctcatggctccactcattaacatggtactcactatgtcttcttcgttgagttacaagtacttagagacatgtacatggaaagcttcatcaaagtcatagcatcaacaagactaacggttatcaccactaagttacaacataacaccagcatgccaagtaccaggccgcaagtactcaagccgcatacccatttcgagtactcagaagtcatgctgagtgctctacgctgtgtacgaaaccagcgatgccttatcaaatttcaaactcatgagtggttaacaacccacaaaaatagcaggattattctcctcaagaattgagcttcaaccaatttcgaggaataagggaaccctacctagtttaaaaataaaaactcaatcccaatctctttctttcagcctgaatcacaatttctaaagaagatactcatataattctatactctacaagctattcatcccgttatcgactaaagatttattattttctttgtgtttcgttctcttcaccaaacaccacttatgattttcatcaacatagaattgggatcatcgtcaccgctctaataattgagatatccaagatctgattaagaagagtcttcaagaggtaagagagttcttccatttattggtgtcaatttttaggttatatcaagagatatcgtttttatttttctaactctcacaatattgatgtgattctagcaatcttggtaccgttgcaaagataatttgattctctaatgtttcatgaagaaattgttcacccgttcgacgttattttatgtcaaaaattagtatcttcacactgttattgtaattcattttttttcttcatattcacagttgtttattgagattttcgaaaactgattatgtagagcttaagaaaataaaagatattcaacaacagacaaatatattttttttacgtagttcagacgttaatgatctttagtccatgagacaatagtattagcctctttgggcaaatgtttaggtacgccgccaggaagaaacccaacaacgatttcagtttatgccataacccgacattcacatgttactgctatccatacctaataaggtacgccaccaagaagaaacccaacaacgatttcaatctatgccatagactttcattctcatatcactgctgcccgtacctaataaggtatcgccgacaagtatatcgcatcaccaaaccaggtgagcccgtatattacattcataatatcatcacattatcattgcctaatcaggcaatcttttcattacataacaataataaccgtatcttaatcccaatatcaatcaattctcaacaatattatttgtattacaatataatatgctatgcagtacaataaacttttcttacctttaatccaaactcatgcatgtctatcaaccaaagtggaaaaatatccccgatgatctcgaccctatgtcacaaaaacggtaaatcaataagtgtttattccaaaacactacttaatactcgcgtaagataatctaggattttctaccaaatcccgcggtataaatacactaaaataaaacttatattttagctctaaaacatacaccatattgtagagctcgtcacaagattcaaaatggtgtataaaacgtccaaaacggacaccggagggaaaagctatgacaaaaatgtgatttctaatctctcaagaatttccaaaaatggtgaattacgaaaatcccaaattttacacttaccaaaacactcccgaaacatatccaaatcattccaaacttcacatgacacatatataccacatatactacagtcctaacgtaaccgaaattaaaagcgagcccttaaacggaaaatgcaattaacgtttgaactaaactttaaaaagttccaaactcgattcctaactcaaaattacctcaaattcaactagtaaacatcgaaactagtcccatagctaccaaagaaccattttatgaagtcagaatctccataatcactctaaatcacaaagccactgcataaaattaatcgtttttaccttagaacgaaaccaatccttaccttaataagctctccttttttaatgatttactatcccgctactaccggagcttgaaatactaggttttgggttgaaaatcaaagaaaatagaataaaggagagaagatttcgtcgcaccgatagagagagtttcgtcgttctttcattcttgagtttatcaacttaatatatatatatatatattacttaaatgatatatacgttttttaaaatataatacataataataaaatttttattattaatagttatcttatcattttttagccactaaaaatctctaattttaagggtatttggtcaactctgagtacctcaaaatactctaatatttctaaaattaatttatctcaataatcccatcaatattactaactaaaactattatgacattttggcctccaatcgagtttatatggttgtcgaacttgaaaatatttttatttcacgaataatttatattatatctacatatttcaattaaatctctgtaattaataaattacgattatttatccacttatagcaaaatttataatttatgctaaactaagttagcaagatcataatcttacttattactacttaattaacccataatatataataaatcttaattatttataattaagttttcgggatattacatagcatttgacttttcttttttttttagaacgataaaattttaatggtgtttgaattttctcttggttgtctctaattttgtattataacatttatttatgctttgttgtcacttctgacttctttagtattaaaaagacttgttatagtattcttcaatattggggttcttatgtcaatttcataattattttaatcttgaattatagacatgatgtttcattgtgtagctctaaagtaacactctgactttttctttatctaagttgcagcttgggagaatgaatttttcatgttaaatcagtgaaggaggaacatcctgataagctctgtgacggtgtgaaagacttacttagctcaagatcctaacaaagacaaagcaattcctttcagcttttccaacaagtgggcttttgttttcttttttagtattggggttgatttagtttttttttgatgtgttaatctattattgattcccttgtaattattatgaaatattattggaaaagttgagtctacatgcttaatttttgtttttcctagctattcggttgatatgaataatgaaatactagtgatgaggagagaagagaataagaagaataagcttggatattaagttgttgggtagaacatatcattatctcatatacttctatagatatagaagtttttgaagttcatatagattttctttagtgatcttacaattcaagggaagctagatatttgcttctaattaaattgttcctttaactaattgatgttcttccttcttggcatatagtgacactgaaataagttacatttgtgacaaatgtcactaatttaataaatgtcacttaaggttagaaattgtaacattttcaaatgtcactaaaagtcaaattttggtgtagtaaaaaagataattaaaattactcttttagaataataacaaatattggaggacatataaaatcaaacgatcacatttataaagttaagtatgttaaatggttatttaccatcaatgtgggttttttttttttacaaaaatactcacaaaaggccaatactcaagggcaactccaatagacctttataaacttaaaaatagtgagatttcagcacaaaattcttccaaccatatggtaaaaggcatcatattaatgagtttatttacagtgttccactaatattagtggtgcactgtagaccactatataatttttattttagtttataaatattatatattatttataatatatcttcttggtgtttcatatgcttttattatattaataaaataataaagaatatatattttagtgtaatatttagtgttgtgattagaattgaaaaaaaatttaatgttgaaattatactttttagtgttagttcaacattatatttaacttttaccattggagatgaccttagcatccttcaatcttttacatcattcatacaatagacaattcaggcttagagtatattaatgaagtcccaataatctttgaatttgagttctatcacaaccttagtcattatatttaaaggaatagtagacatctacatggcttgttcttgcatgaaagatttgttagttcttactaaataaattgcactctgaatatcacaagtcaccttaatgagtttttgtataaagcactattcttcaagtaagctttgtagctagcttccttagcaacctttataaagggttggtcttgagctcaaatgagttatagagaaattttttttaagcctttattataaagataaatagtatttttaannnntattaaaaaaatatgtatattttctaaaaattaatttttttatttggacccctaaaataaatgggccctaggcggccctgcctcactaactaccatatagtttacttatgcgctagattaaatacttgttgactgcaaagtagacttctaatttactggtacttttcaagagtgaaaatatagtcagtagttgatcgacacttgtctatctcatgcatagttagaaattatagaattgtgatattgaactacacaccgaccaactatctcattttgttcaaatattaattaacatatacaatatttgacatattaaacctaatacacattattgtatacgctttttggtaacacttttattttttaa

SEQ ID NO: 21230 - DNA, 3695 bp, Cannabis sativa
actgtacatataaagttaaaaaaatgtaatgttaagagaaaaacctaacagaaagagcataattatgtaactgttctattttaatgataattttgaacaagtagtatattttagggggcaagatcaggtaatgtcaaaaattcagaggataaaaatactaatttttctctttatttactagctcgggactaaatggataatagttggaatttttaccacaaaaaatgaactacattaattacataggattttatatcagcaaatttatataaaaatttaagtacaacaaaataaataacataaaattctcaaaaaaaattacataataattaaattcaacaaaatgaactatacaacgatcttttatgcaaatttcccaaatacaaattaaattcatcaatagtctttgcaatttctcctttttcttttttttttattaagaataaagaaaaacttacataaaatactatttttaataaaaaaaaaattatacttttatattcattcttttaaaaataattttatgatgttttataaaaacaatatgaaacaacatgaaaattatataaaagtaagaggaaacaacatccaaacaatataataacaacataaaaaataatatacaaataacaaaaaatgaacaacaaaataataaaaatatatcaaaagactgtattttttataaataaaatcttaaaaaccgttgtacaaccctatttttattttttgtttgttttttttttttattttttttttttttttgaaataatcccaaaagaaaaggtgtgtttggcccacttaggcacgtaaagaattacttttttttaaagtaagaaacaaatatctcgagtaataaaggtttaactcaatcactattcactaatgggaagagcaaaagcaaataaccccttaaacatacatgcaaacagaaacctcaatctaaaaagatagataatagataatagataaaagataaaagaaagtaatatataagtaactgttggaaaaaatactcattaaaattaatcataaggtaatgatcacttcaaaaaaaaaaaaaaatcagaaaaatatgctcataagcgtgttgttatgaaaatgtgagttgtcatatgaacagaagtaataatcaaattattagtaacatcgatcgacctaccttttaaaatagtgacattttacctaaaaaaaaggttcataacacaataataaaaacagagagaggtccactcttaagtattcgttgtcacaaaagacttgtttcctgccaattttgactacatacttttttccaattcataagcttaagattttcattaattcaatcactataacaaaattattacacacaagaatttgtatttgtagacttgtagacttgtagtagtgttgaaccaacttaataatttccaagaaacaaaactaattcgacaagatatatgaaaaataatgactaggtagaatgagaatagtaatgaaatagttactttccatttcatttctttagtaattattcaccaaaactcaaaaaggagatttacaatagaggaatgcttgacacactctcaatatttaaaaaagaaaaaaaaaaactctacttaattatatatgtatatttctttgtgtatacagtttagtttcctagagaatataagaaaatatataatggttttaattaaacacacaaaaaaccatacttaattatttaactaataactaaattgaataagatcacagctccttattgcttacttcatgaactgtacccaaacccgaataggacagagccacgggctcgcgtctaactaaaccgactgggccaggcccaggcccacaaggcccaacaatctccatcatcacagacgacgacgtcgtcttcttcctcttttccaaatacattttcacataaaagttcacgaacagaagaagtatgacggcgttgaggaccgcgtttaaaacccacgcgccgattccgttacagccgcctttcatgaaatgcaatagcaatacgccgacgtggcaggcgacgttgcagccgagcaaagcgatctggcagttggcgacgaaggggaagcacgcgccacgtaaccctacgtcggtccagaaccgataaccgtacacggcggcatagacgagcgtggtcgatagtattgccaggacctgaaacgattgggagaattcgagccagagaaaagccatgaaagtgaggattgagttgttgaggagttggaagaaggagagcttacgacgccgtacaatcgagaatagcgttcgaagcatgtggaggaatcgagagaggtaatacatgtaagaccagaagaagacccgacccgaaggacgggttccgagaggaaaacagaggagccattcgagtggcgttcgtttggatcgtctccaagaccatcgcgtatcgcggatctcggcggcggcggagagtaggattccggcgaatattgttgcggagattaaagccatggttagactgtggacggctgggattggtcctagggaaatcggacggttgtgtatgagggttaggaggagatggagaaggagtgataaggtgaggtagaaggcgatggaggtaaagagaaatgaccacgtggagccccatgattgggtgtgactccaacggaacccgactattgatggatgctccgaaagccaaaaagtgatcatcatcgtcatcgccgtcttccccgccatatctgacggtggagataaattgtatggtttgatcacatcaattgattattgaaagaacaaaagaaaatgtttcaaacaaaaaaaatcttttgaataaaaagaagagagagatagagaaaatgagagagagagagaatggactaaattgggcggaagagaatgactggtgagaattaacatatgaaaatatttaactacttttatgggtacacgtgttttcttttcattggttatacgtgttcttaggctcatcattttacgttggcatgtttacaatatgtgattttgatgaatttggttggggagttctattatatatgttaaaataattattatagtaataataatttaggaaaatcagaatttaaaaatgaaatgggattgaataaaatttattatgtacctaacaaatttataaaaataattcttgcattaaaattctctttattttttatttttaaatgaatagtaactctacaatatataagatattttcctttgcaaccgaataaaaatcattctataatattataaaatacaataaaacaagaatgaaatcaaaaaaataattatttttttcttccatgttattatcccaaaaacgtttatgtttgaagacttgtccaaaaaggaaaaaaaaaaatcaatgttgaaggaaaataactattttatgaatcaaatgtttgattgattgtctactttttataaaaatacataaaacaaacaaatcttcatataaacataaaaaatatatattataatactattttatctattttttttattattattattatttaacaaaaacctagcctaacccctcagttttacaaaacacttcaatttaattttcaagcaaaatttttggattataattttctaaattaatttttcaaaataaatagggaaaaaaacaaaaaaatacaaaaaagaaaaaaaaattacaaaaatactttgggccagcccattaaacatttatacagtccaca

SEQ ID NO: 21231 - DNA, 2951 bp, Cannabis sativa
  modified_base (1662)..(1678): a, c, t, g, unknown or other
ttttgttatttttttgttttgttatttttgtttgttatttttgtgcatttgtgaaattaacccttttttaaaatttttaaataatcaacaatttagttgcaggcctgacactgagtatagacgggctaaacttgtgtctaaggtctgcccacctagcttaagggctcaaatttttttttaattattttgaaattacatatttttttactaattttaaaaaataacacatttttttttctaaataaagggtcaaacatatattttttctatggctccactaaattgagaacccctcttaattgtataaattaatatgcaaattccagtttctgatacattattacacattttcattgtgtgataattcatgtcgactagatacaatcaattgccatccttaatttcagggtgattagttaaataccatttcaactatatttctctctagctagctctataggttgtctagaaaaagctaaaactgaccttcacttctcaatccaatctaaaacaggaacacttagaataataaaataagattttattttttaatgtttattcttttaattatttctgtctagttgactcaaattggttgagtacttataaatgaagttaattaagtaaagtgatgtataaaatttgtgtatgaagtatcattatacccttataatattagtgagacatagaaactggttgtggttgagagtgagcaatacaaaaaactgcagtatataaattttttacccttggtacgtggatgaagcttattgggtagtaataaaaaactatgaatatctacgagactgtagtaaaatcttatccttatctcacaatggtgaagtttcatatcagtgagttttggcatatttccttcttttcattgacaatatttaaatcaaattgccacatcaatctacatgatgaggttgctttcatacatagtttgagtcatttcatcctgtatatattaatataacccaataaagtataattaataataagtaaaaacaaattgggtctgcccccacctcttcatcactttggtttctagttatgattttatatgtgaaactgaaaataatagagagaaggtttgtaaccaccatctccatttcttgttctatagcttgtgactgtataacactctaaaatttgaaagtggtagaccccatcttaatgtcatcagttcgtgatgtacgcatatatatgtatataatcaactgcagaaaaagattggtttcaagatactataaccatcgtttcttttagtttttgaaagttattgaatcatcatgtgtatatgggtagggtactatgcaatagttcaatggctaatattgcttgatggttattacaattatttaactacaaatatcaattttaaaaatgttaaattattaaattttaatctactgcaaataataaaaacaaattcagtttatatacttaattttactatttaataaaaaaaaatataattttttgtattttatattaaaaatatatttatataaaaaataaataagtaaaattcaatttttttatctttttgacactgagtaattttatttattatattttttagtcgatataacaacctcaatttatatattgtataaataagaaatttttttaaagaattttttatttttacacttnnnnnnnnnnnnnnnnntttttttacatttttatggaattccacacccagaaacttctatatcaactaacggagcaaaccaaatcgtaaataaaatgtgtacaacaacccacatagaaactacggagaaatcaccagagcaacccaaactgtaaatttgaaaagaaaaaagttaaaaaatagtatataaactaattctctttttttaattagataaaaatattaaacataaaaacttaatttttttaataaataatactcattaagaattactaacacttgctaaatttggtactatgagtttttttattaagagaattataagagagtattgaaattgctacacaatttattattttcctagaaatttctaaaaaatatgtaaaatactattaagatttctagatattttctagaactttttccttatagaaacttctagttatatatactaaaacatgtagattagaatgatagaaaatgtaacagctagtgtaatgttgggtcagtacacacaaacgatcgactctagctatattataattagctctaagtgtatcctaaatttaatgtaaccaaatatcaatcactactatagggaaggaaatgaggcaggtaataagtgggaaatatttatctcatcttcccgttaattatttgggcggtgaatctcccttggggcgagtaatttctatgcagcccatcctccctatttaaaaacaaataaaattatattaaaaaattaaatattatatagtaataattcaaaatatataatatttttaaaaataaaatataaatattaaaaaagttactaataaattatcaaaatacacaatattctagcaattattacatgtagaagttgagtatattgttccaacaataagtacaagccaaattatatgattaaaaaaaatattagagaagacatgagagaatcacaacgaaaactataaagatctattgtgacagcaaattagcaaacaatagtaaagaatcttgtatgtcatatagtatgactaagcatataatagcattaagtatcacttcattcaagatttttgaactttgaagtaaataaaaaatttaactcaagtattacaaaattgaagagcagttaatagacatattcacaaaaacattatcaagaagcaaatttaaactattacgagatatgattagaattacaaaaatatgtaccaaaaaagagtattaaaatttctacacatttattggaaatatgttgaatactaatagaatttccagaactttttcattgtagaaactt

SEQ ID NO: 21232 - DNA, 2361 bp, Cannabis sativa
taatataaatgaagacaaaggaagtagtaataatgacattggtaaaagtagttagaaattttcacacaaaggaagtagttagaaattttcacgcggttattctgcaggcaaagaaatgtgaacagataaaagaaagagaaatgttaggactagtggtatttagcatgtgctattattgtgattggctatcagattctatataatttaatataataacttttggattacatcactagaagtattaatcaaaagaaaaaaagacagcagtaggtaggtagaaaaggtccaaagttaggccaataaacgagtatataaatagagcaaggattcagcagctcaaaccactcatcactgcaaatattcattattacatatattagtactctgattagtactcttgctttacacaactttttgctttctctgtgtttctctaaatcaattagttaaccatgttgaacggtgtgaaaagcgtggtttccaaagtagtacaggatactaatgttaataatgtagtggtgcagcaaatcgagatcacatctgatcagatcaccagtgtcttcaccatgtctgacaagaaaattaacgaccttatctatgccactcatgtccatgctgatgaatctttcgacgaggactctcttttcgtcatcgtcgaaaatgttctcaagagttcaaaccaaatcattgacaagattgttcaaggaattcacgttcatgatgtggacaatattgagaacaagttcagcttagccaacctcaatgttcccctttgcacgctcaagggtatcaacaacgaggtaacaataattaataatatgattattatattatgattacaaattatttacattaatggtattaattgtattacagctttcatgcaaggctcctaatgaggtaactgcccacgaaacaacactagccattctcaataagctgtccaactattcgtgggaagcgaaggctgttttggctcttgcagccttcgcctttgagtttggtgacttttggctcatcgctcagctttacaattctgactcattggccaaacaattgggagtactcaaaagagtgccatcccttatcaagacttctgagctcgtgaaacgccgacaggcagttctcgagctcagtagtctcatcaatgtcacaatgcgagtcattgctatgtttgatgagtttgagaaattgtctgcttatgatgtcaaagacattcctggattgtctgttgccttagatcatttgcctgtcgatgtctattgggcaattctaactattgctgcatgtgctactaagcattgtattctcatcagtgacaagtaagttattattacgatagataatgtataaacatgttttcttaattaactaattattaacaaatatatatatgtacgtaccaggccagacagaactttcgatttgtccccttatgctcaaaaaatcagcttcatccaaaaccagcttactatgcatttgaatgtatgcagaagacaattgggtacgtaattatatattcagtgcttttaattttagtctttttttgattccatgaaaattaattcattaataaacatttcagaggaggccgagacttacaggaggctttgcaagctgttccgtacaccaactgaaatcatggagattttcaaagccttgatctttttcaaggatactccaaggccactcattgatggttccacaaaccgactggtaataataatattgcatataattaattatttagtaaatggaaaatcatttaatttatatgtttattgtaaaaaaacacaggtgaacattgatgtgctgaggaggaaaaacgtattcatgttcttttctggtgtagagatcacagaagaagatatttccatccttaaaccggtttatgaagaaacaaagaaagaaaaaagctacacaatagtgtgggttcccattgtagagaagtggtgtgatgagataaagaaaaaatatgagactttgaagagcaaaatgccatggtactgtttgcatcaatttggtccgattgcagggactagattcatcaaggaacaatggcaataccagggtaagcctatgttggttttgactactcctcaagggaaggtggagaaccttaatgcacttcatctcattcgtgtttggggaatcaaggcctttccttttgacaagaaatctgaagaaatcatctccaaagaaattcactggattggttcacttgtcaaaagaattgacccaattatagagacttgggtaaatatatatttgatcaatatttatgtttccattataattaacttttgtttagtaaggatgaaaagtttcatccaatacttttgccggtacactattttcagg

SEQ ID NO: 21233 - DNA, 1649 bp, Cannabis sativa
tattgttgttgcagatgttccttttatgtttttgtaagttatgtcattgatctttataccagtcacctataaaaatgtatatgtatatatgatcattaatatatattttatacaattatgtatatctagttataagtttaagaatgtatacttacatgagttggacaattaacatggcttgggcaatagttttggtcaattatgattggattttgaacatttctcatgacgatatttgagaaatgaacaccctcaacaaagcctttgctaggtttggcccatgatttgattctaatcccattttgagtacctgtaaaaacagcttgcttcacagttacattttggactccctcttcatctatgtccttggctaggcttccgatgctaatgccatgaccaggaccacacgccatgcgttcgatccagagattctgagttccggggccaatggaaacacaatcgtccccagttcctactgcggagttgtagatggcaacatttttggagagttgaacgtggatgccatcggtgttgggactgtcaccgtgagcaatgattctcactcctctcatctcaacattttcacagtggtttattacaatgtgaaacatttggctgttcaacgacaataatccagtgatttttatgtctttagagtacgtaatgctcaaactctgcatggagataggaaaataattgtcacttaattgattgattaagaatgattaaacaaattaattaaatccctaactaatttctaattaaacaactatatataatgatctatgtgcatccaaaatatatatgcacctaaacattatatatatgtacaatgtgtatccaagcacctaaacattacatatgtgcagttacatatatgcgtttttaatttatttcaacctatcacatttatttaaagagaattgttaaaaaatattattggtgcttaacactttctttggtgtcaaacagctattgatgtaattaaataacatgtcttatataaattaagaaaagaacttttaggataaatatcgctaagtttatcataaatgctgcttatagaaggtgttgggccactagtgtccaatgctcttatctaaattaaacttgctaattaattctctacatataatttatattaaggttttttattttatttttacataccttaaaataatttattttgcatttttacaaaattctacacagaaattctatagcaactaacagaacaatttaaatcgcaataaaaattcacatagcaactcacataaaaactatcagagctagcaacccaaacaataattttttttttttaaaaaaagttaaaaatagtatacggaataatttctctttataaaataaacttttatagtaagtaccgttgctccggagggacatgacttgtcaggattggccttacaagcccacaaggcagagcctctagcatcaagtgcaccaccaacaatagaaacaccgctaactctttggaagttaagccaattctcagtatcacccaacacttgatagtcctctggggcgacaagggtaccatcaatacgaaaggttatgtatgggcttttgcatggacccttgaagtccattgggcgaaccaaatacctacccttgggaacgtatatgagggc

SEQ ID NO: 21234 - DNA, 3285 bp, Cannabis sativa
ctaaactttcagtagataaataaaaaaatatatacaaacacatcttcgaagtaaaaaagttgtcacattgtgcatcaaaactgatttgtagttacctgtttgtccataagcaaaacaagttgcctttgtgcgttgaaaaattattggaacaataggctccacagtctcacggtatacctgaaagtaaacaaacagcatattaggaatgttaacatatgcttacatccaaatacgatataattttaagcactattactttctaaaagtagaatattacctcgtcatttgacacctcctcattcagcactgcatcaaaaacaaattcatgtttttctacatattctgtaaggtcaacctgcaaaaaattaagaaacatgtaaagccatggattattaagttgtacaatacaaaataaaaatgaaaaagtaacaataaaaaaatgtacaacctgttgtgatatttcatattagttccaaatactgaattgaattttcattttctcacaaatattacttgaatcggcccataatgaagcaagcaaaaacttagcataagaaatgcaacatttaccttgagcttagtctcatgaacggttagagaatttgaatatgtatctatgatatcttcctcattcttagccagttcctttttgttaagtggtctcttccgaacctgtaaccacagcatcaatctcagatgttgaaaaaacagcactaagaggacatataatcaatcttatccagattaaaccatattgttaaggctgattagaatacagaaatttaaaaccacatttacttacaagcaaagcaaaccatttagattgaaatcacatcctctgttatgattagaaactagttgaggaacagaaaagagaaaggcataccacaactttgatctttgctacagcactggctttctccttgtctacagcaatacttttcaggaggttgttttctggcaaaccacgagctctgcctgtttgcttggtaaggtagggttcagaatcatcaaaacttcggcctcgaacaggaggatacagagaattaccatcatacagaccagagactggcatctaacaattacatataaaaggatgttagcagaaaatatagccaaatatgcacttcctaatttagacaaaagggtaaagaaactcactaccacctttcttaatggattgagcaaatgacaatgcaagttattattcacagagatttcagtttaaaccaattcaatatatgtttcaacagagctacagaatcagttcatcaaatcaaatgtttgagttcacacattacaaaaacatatttaaatcaaaacaagaaagcaaaatgcagtcttcccctagcgaaaaaaaatgtaagagactcacctcagggagaagctcggtgtcaaaagaatgcagatccaacagtccaggactaaactcattaggcgagtcatcactgttcttcctcctcggaggagtatttggctccatgtaaaaatcattgaagcccctctgagcattccgatacattctagacccttgcgctccaccaccaccaacaccaacactaccgtagaaaccaaaatcctgcttcgaattcgaccatcaaagtagcacagtcaaacagctgagataccaattatagactcagatcttaagatcaaaaaaatcatatgtttaaacccatctccacacgcaaaatcctccatctatctatcttcaaaataggctctttcactttaacggattttctgggaaagaaaacacaaagtaccaaaaccaaaaccaaaaaaaaaaaaaaaaaaaagaaaaacctttttacctgaggaatagcactagaggcgttggaagactgaagatgttgaagaccagctgactgaagccatctcccgttagaagaagactccaaaaaattatctgagtattgacgctgatggtgaaccccagttgtaccagatctctgcccttgtcttcccataccgttcatactcttctcagaagaaaacccagctcaaatctcgaccgatccgaccctctctgagaatcttggatcggaaagccttaaactttctctctctttcactcaacaacaacaacaacaacgacaacaaatcgctctcagatattagcaatgcaacaaaaaatgtaaaatcagagagctaaggcctcactcagattgaagttgaacccatttcaaatcaaaaagcagtaatggaggctgagcttgatgattgagtaaacccaaagatataggaagattgaaagaaaaagaggaagagaagctttgaatttttgaagaaaagctttgcacgtgcgagattggatttgacacgtgcgagtgtgtggtttaaatggaaggaggaggaagagtctttaaacgacgacgtgtcgtatgggcccttcttagtctctattctctaatttatgtttccccaacgtctcacgtggtggggtccacattggatattgcctattcaaaaaatgtatatattatttattttttttttaattaattgggcgcttcgacttcatattcaaatttcgaacgccacgtgttccgattaggtgacttgaggagttgagttaatcggacggtggagtttgaacagtaccacaatctccttggccgaaccaagttgcgggacccaccactgccgcactacacttgttttttgtcttgggcaattctgttttggtgttaagatttgtcaaggaaatttacctctttgttgtattgttggagttgattatgttattattacaaggagtctttaaaagactaattagaatttttaccttttaaattttaatatatattaaatcatgtcctttaaattttttggtagttaaatttttttcttaaactattaagattgttaaatttaagtacttttatttaattccatttaattttattatttgagtgattatttatatactaaattatacttcccacactttgatatctaccaaattatgtctctcgaactttaatatgtactaaatcataccccctaaactttcattaatattatactttttttactaaattagacaaaagtctttaaatccaacaatctcaataattcaggagtatttttaacgaacttaaaagttcaagaaagatgatttggtacatgtcaaaatttaggagaaaaaaaaaacttaattagcctaattataatttcttagttaatttttatgctcaaaattacatgtcataatattttttttcaaatttttttatagtgatatttattatagttacaatatcattcttgtaaatttttaaa

SEQ ID NO: 21235 - DNA, 4899 bp, Cannabis sativa
  modified_base (839)..(841): a, c, t, g, unknown or other
aaaaaaaaaaaattatttagaagtgtaaaattggaaaaaaccctaaaaaaaatttaatttttatatttaattaatctatctaattaaaaaaaaaatattttacttttacaattatatatgagttgaagttattctaacgactgaaaaaaatagtaataaaaaaaaattcagcaaaaataataagttaagtttaatttaagtattttgtatataaatttagttataatacatacagtgtaaaaaaattattatttttttaatcaaatacaaaaatttaattttttttttttgaataatcaaaattttcttttattattcgttattagatcaaaatttaataatttaatatatttttaaaattaatacatcctttaaaggagcttatcaatatgcaatgtttcttaactacataatttctaaaagtatatcaacgactaacaacaactaatcaagtcttgagaattgtctatatttatatagaaagacaattacaagggaattagctagaactgtattggtatcaaaatggtacgttttatatttatcaactcgcaagtacataaatttttattgtagtgtaaaaattgtgaagaacgaaatcgaacccataaaaattgcgtaagatcaaagaaaatacttatttaatttaaattattaaaactctaacctagttttgaaaatggtgaggtttatatggtaataaaataaaataaagtgtttaattataaaaacgacagtgacaaatatttttagtagtatttaagaaaattattaaaatttcagaatacaacttaatgtatataaaaatatttatgtttatattgattctcataatttannnagtaatcaaactaattattttctaacaaaaaataaattttccttcactttaaaattataacttctaaacactaaatctgaaataatttaatgtaaatacataacatcgaagtgttaattttaataaaatgtacttcaaaggtgtgactagtgtattcagtttctcaacaagtcgtcaagcctatttctttggggcaattttcaagactcacgacatggaaagcaaggcccgactttgtgatatctcaattccatgcaaggaattagtggaggttgaagatcaagaattggttaccagttttgtagcagctgtagtgcctgctgtggagtaggatggtgtccctcctccacagtagccatgagaggtgttgcttagaattatagagggttggggcagacctctatatataattctggaacataaagccctagttcgggcgtgctcaccaaatttcatatttcttaccgagcttaatattgatgttgctaatgtgatacgtactctaaaaaaatctgaacttttatttcaatattgtggttcctacaaagggtgtgcaatgggtgttttactggcttagaaatcggcttttagctttgagaatatttgtatctctaaaaatcaaatttcgggtattatttatttagacccttgtaagtacccatggctcttatcttatgtttatgatctgtcttattcccatgagaaaaagaagttatggtcagacattgtggagatggtaagcaatttggtggtgcctggatgattctgggcgatgtcaattttataattaattcctcggatcgagttggctcaattgggagggaccaatttaggcctttcatctctaacctcttaaactaaaatagtttgattgacatgcttattaaaggaataatttaacctgggataatcattaagagggtttggtgcacatcaaatctgcacttgaccaatccattgtgaatgatagatggatccagttgttctcgaaagtcgttgtccaatctttacaaaaaagaaactcggatcatagacctttatgtgtgtattttggaggcctggaaaccaaatgcaagtgtcagtttaagttcgaagcttgctggacacgggatcctagaagttctttggtagtaaatcatgcttggggttccactaatcatagttgggcgcctgcaagagttttcaaaagagttagtgcgactagggttgcttttaggcattggaactgagaccgattcagaagacttgacaccgtgattagatcacttgaagctcaacttcaaaggatccaatctttgctagctggctctaaggagtggtcctaggagttagaggttcgcgaggccctgaataagaatcttaaacgtaaagtgttatattggcaataaagggcccaggtaaactagattaaagatggggataaatgctccaagtttttcttcatctcggccaccattaggaaccaaaggaatgccattgtcagtatcctggatatgaatgattgttgggttatttccagataggaaattgggagagtgtttacagagtacttgggtgagattttctctaacccgcctattggcccccctagaaagtctggagccttttattcaagatcacctctctcctctcgagcaagatgagttgagcaaaatcccagatcgtgaagggatccgtcaaacgctctttactatgagtagcttaaaagctccaggccttgatggaatgtcagtgctcttctttaagcactactgggacattgtaggagtgtgtttctgtgaggcggtgttggacttctttagaactagaaccatggacaagggcattaatgtgaccaatgtagttttaattccaaaggtccccaatccaaagaaggcttcccaattctggccgattttcctttgcaatgtggtttataaggtgatctttaaagtcattacaaataggattagacccatcctaccgagattgatttacccaactcaagcgacttttgtcccaggacagaatatacatgataataatgttctagttcaaagataatccattcttttaaaaataagaaaggaagagaaggccttttcacgttaaagattgatcatgttaaggcgtatgataaggtaagttggcaatttattgaccatgtccttcaaagtcttaagttgttggattgccttaagctatgggtttaaatgtatctccataacttcccttaatggtggaccactgaggaaaatcactccccaatgtggtattaaggcaaggggaccccctttccccttatcttttcatttgggtggcagatttattctcttgacttttggagaaggtcttagagaatggaagcattaaatgtattaatcttagtaggaatggccccgactttcacacctcctttttgttgatgatatcattctcatagggagagcaactgttgatgaggccaagggtttttgggattgccttgataaattttgtgattagtctggtcaaaaagtgaataaactcaaaacctcaatcttctttagtaataacactagtgaggggatgcagagaggaattaaagtagctttaggattataaggtgtggtgggaaacatcaattatttaggtctgcctctgttcagatctagacaaaaagatgtgcatttcaactttgtgatggacaatcttgagttaaaattttagggttggaaagttaagactctctctaaagggggaagagtcacgctgatcaagtcagttgggcttgcgttcccagtgtactcaatgcaaatgactaaactttctaatcgtatggcatctaaagtggatggtatggctagggatttttggcggggatgtgagaagggtaatggaggggtctgcttgaaagcgtgggataaactctatctccccaagtctcgtggtggtctagggtttcataagacattggaaatgaatcaggcgttcctgcgaaatggggttggttgatgcttatcgaaaaccaatctctatgttgtaaagttcttaaagctaagtatctgaaagataaaccttttatgcaatgttcttataaggatttagactcttagttttggaaaagtgtggtcaaagtaagagtatagttggaaaatgggttttgtaagatgatttctgatggtaaggataccaagatttgggatgactcgtggattattcagggtaagaagtttgtgcctactccagtgtctaatagtatagtgatacagtctgggttgcaaaccttcttctggattctggtgagtgggatatgtttaagctaaggagcctgcttgactcagagacgatcaatactattttgaaagggagaaaacctaggtcttggcaaagataagtggatttggacaaaagaaaactctagaaggttctctacgaagtcagcttacttagttcaagcgaccgtgctcctccttgtgagatggccccttccatgtggaacaagctttggaattgtaaatcctggaacatcacaaagtcttatggtggagtattttgtccaatgccctcccgacatgcgttgttattgccaagagattacaagttagtgaaatttgatgtcctatctgtgggatgggtgaggaaattatggaatacctctttttgtattgtagctttgcctcccacctttggagggcttccccttgggaccttattttggtaattgagtctggtgctcgaatgtgagactgggtgcgattcatttggggtctcaattctaggggtgcagttgtggaagaagtgtttctttttgcttctattgtgatggacaccatttggcaagctcgtaatgacaaggtacgcaataatagtctgaataacatcaaatattatattgattctatcactcactgttatgcagattatggatcatctttatttctgccttctcctgatgatgtctcacccctttggtcccctcctcttgatgattggatcaagattaattgtgatgtgaaagtggagagtgggtcgatgtgtgtcgtagcgttggctcgagaccatacaagatctgtttagtggattgcttccaagtcttt

SEQ ID NO: 21236 - DNA, 4880 bp, Cannabis sativa
ttaatcttttaatcttgatttatgtatagtttggtaatgcattgcagcatgtgagtctattctataattgacttcaaataatgggcactcctgcaatggtattaacagaacggccatttaggttcgaccactttaaagtctcaatgctgttccctataaaagaaacaaaaataaaaagacccctatcaggtatttgggcttcatgggcttttgaatcttaaacctgggcagtctgttgctgtttcactttcattgttttgagcaggctgcccagtgttaacaaccaaacgaaattgcatcaaaaataaaaatataaaaacaaaaagttttgcacgctttgagcaatcattaattcttgcaaaacatctttcttctgaagaaaaaaaagggctgcaaaaaaatgaagttctccttgcacggttttgctatattcagagcttaaaatccctaggtacaatatttttagttccgactttgagaactacaattgaacactttttgatcaccaaaagtggattgaaactaaattttctaatgagaagtgttagatcgaaacttaactccagcagggaagcaccgcgaaaccaactgtcgtcctaactcttgtagatcatcatcgtaaagtggttgatcttcatttggattgaagatcaagctcgtatgttcatttgacgattgtggatgataaaatggatccaattgcattgacattgagaagttagagttcaaaacaacgtcattgtatgatggtgacaagttctgaggttgaggctgtgtcgggggaaggcgttgcatggtcgaaagcttggcctgaacatacgccaactctgcctgcaagtttactacctataaccacaaagggcaattaatattaaactttgattgagcctaataatactcttgtcatattacacaggcagaagagaaagaggtctagttataaattataataaacagccactatagcctttccacaataaaggtaaccgagaatttgatttacaaattcattatcttttttttcaaaaagcgtctttcataattaaattagtatgtatagatgctcgatcattataagtagggaaagttaaaatattatttagtggtactcccttatccacaacccaaagagcaaaatgcgaatatctctttctctaaatctctatggactgatcataataaactactgtatacttttcccaatcatcaatcatgggcttatggaattgtgcctaattattataaaggtgttgcttattctccattcctctaacattaatgagatgtccaaatcaaagatgacactttaatcatcttcgtgatcttaattgaaatctctctagctagatctataggcatactacaaagaataatcgaaataccatgctacggcataggtatataaatgtactaatcatatatactacattttgttaagttctctttgcaaaaagtcactgaggatagtaaaaggtttttattataaaatcaagcaaaagattttgtgatcgacctcaatgatgaagctgaaaataacgtttttgtgtttatgtacattcaataaacactacaaaacaagactaaatatatatatataaattatatatttcaataaatattcttacaagaagctactccatgtgactaaacttaagtagtgtaagtaagattttggacatcataaattcatcacacgattatcaacataagtaggacccttttttatccatgaaaggaagcaattatctaaagtcaaatgtcaaaggttaataaatgcataatgagataaatatatataaatgttactaaatatgccaacgatgcgtgacatggttaattaagtcaaaactaggagatttgaatattgtaagagcttttcaactattttagcttggtagatccggcaagcaacaaaattcatccatagtcatatcatattcatggctgccacaccaaccccaccttctcaaaataaaattatataatgaagttttgaagggccaagttagcataaacttcataaaaatctcatgggaaaacgaagaatagtaattatttagctagcaataggaaaaaccctaataaattttctctagaaagttcaagtttttgcatggatttcaagcaagcacttaattaattaaaaagcttttaatatataacaaacattaattataatatacccccggaagttgaaatatttgaaagtactaaaccctttttgcctgaaacttgaccaagagtattttatagctttatatattatataaggccaggtaataagtaatttatattttataggaactacataaaaatagaactgtcttatctctcaaatgaaagaagaagaaaatgcactcctgacaaacttaatcgagctagggtttcatctacagtactcttttttgttaaatttaaaaatgataagaccattaataacataataacaacttcatgtcataattaattaatttccaaattactcaaaaagaaaccaagagatatatattatatatacaatacatacaagtacttatttaagagctaagtaaatgagtgtgtttgagagtagtagcacatagcaagttattaaataaaagaaaataattaataattagagaaattattattattattaattaacctggtgttgtaaagtgaagatgtgagaaacacagccataaacaggatctcgaagccgagcaagggcctcgtaacagagcgaaacgacggcgtctcggcgtttatgcggcggaatgcggaggagcaacttggaggcgttgctggctccgaacaccttatgtacggcagcgaagtgagccgtaccttgctccgagtcaaagtacggagcgaatatgcaccccttcacgcacttccgcctcagaaacttgcacgcaccacaaggcccaccaccaccaccgctgcctccgctacttcctccattgctactcatcgtgtgtttatatatatatatcactctactctctacttagagtagagaaagttgctaactgttgttattctctgaatatcgattaattctttcaatgatcggtttttgaagtttgtggggtctgaatatatgttatatatatagatggggatattatgttatatgtgtcttaggaggagagagagagaattaggggtttctgtaaattaatttgagttcgtgtcattttatatcatttttttcttttaataatcgcggttagcttttggtggtgggtcatttacaaaggaactggttgttacatattacaatattcaaattaatgccaatatatatatatatataaaaaaaaaatcattatatattataatcacaagtaaacagcgcgcgtaagcaacaatcatttatattgtctaagaatttgtgtactgtagatgtagggactattattttaagatattaataatctataatgtatgctgcaaaatatttatatgtataatgtatagaccaaaagtatgacaaatatgagaacatggcttcttaattataaatttatatatatgtttaataattaaaagaatctattacgtatactctggaacttgtatatatttggacatgtttaacttatgtctatcaataattgttaaatctagcaaaagattttatggcggtagatattatagtcatgatcggttaataattgcaaatttaaaagcttatgattttttttttgaatatgtataatattgtaggttataattcagacatattaattgtaattcacaagaaagatatgtgaaactaactaaaaatgtagcatcacatgtaaaattagtccgattacattctggtctgattgctgacataacagtactagaaagacatatttatatatattgttcaaacatatagttaattgaatataaattaataaatatatacagagagagagagagaaagtgaggggaggtgagagtgagtggggtgtatttggttcatatatactttaaagccacggcaaattaagaataattggaaaagaaagagaagagaaaatggaacagcttgcgtgaagcaaacagacatatatgcggtgatgacagtagcaacttccaaccgccgcagtttgagccacgtgcgactcctcacgtgggacaaacctctcaaatatcccatccatccatccatctatctatctattcttctaacaagtcatttttccagtactcaacaattctttctttctttctctctctcatataattcattcatatattaacttcaaaacactgttttggtgtacgttcggtttcggttgcactcaattattttgtctcagtaatttcttgctaggtttattatatatataccgatcgataaagggaaattaattgattgaggtttatattgactagctaataattgaatagatataattatcaagttattgatcatttagcagttgcacgtacggcggtaaagtaattattattcgagctaaatgacatattttattaagtcaatatttaatgtatataagtttaattttcttcacataaataaataaatttaattaattatttcgtataattttttttattaatatattaaattaatttttattttatatttaaaaattaatttaaatatactaataaacaataatacctaataattaattaaatttatttatttattttgtgaactaaaattatagtcgtggttgatagaagcaaccttttccactacctctcatttcaatcatctttgaagctctccatcattaggatatcgtggtaattatatggtaattttttaaaggctaattagtaatttttttccttgaactttggcatgtactaaatcgtgctccttgaatttttttagccgttaaacattccccctgaactattgagattgt

SEQ ID NO: 21237 - DNA, 2198 bp, Cannabis sativa
gaataaacaatttaaagtaaaaaaataaattgaatttacttaaacaaacttaaattattcttaaaaaaacataagctttattatgttaaaacacgtctattaataataaatcaaacaaaaattattaaaagtttaataaatcttttaaacaaactaagctattttcttttaaaccaaaaaataaattaaacatatttatatttaaaagctcacaatttaaaactaaaaataaaatatattaagaatctactaagaacttaaattatattaaaaatttagaaaattaaactaaaatagtattatatttacttaaaataaacctataaatttttgaagaaaaaaaaatagatttaagcgtgttcccataaaatcaaatttttacacaaattaaattttcaatatattattttataccggcgaaatatatatattatatttaaataatttttgaaataaaaaataattaatttttttaaatcatttaattagtttttaaaattttaaaagttctctactattattattgattttctaagtatttatataattaaaaaaatagtatactttaaaggatataatctagtagtatcataaatccaaggaccaaaaataccactttaaatatgatacaatattgataatttaataaaagtcaaacaaaacttattaaaaatccaataaatactttaaacaaattactaactaagactttggattaaaaacaaaaatcaaaattattatttgaaaactcaatatttttttctaaaaaaaatatgtgaataaataaaaatttaagaaaaaatatgcccttatgtgtgaaattttcacagtaaaaacacaatattgacctatatatataaatatattatatatcggtgatctaattatttgttatatttatcgattaattttaccaactagagtgaccaggtcttgaacgctgagatttatgttcttaaacttccttgtttgattaaacactgattcattaggaccaggcaaatccccagcctccgaagcaattgaaactcgtccatctctacgcccagtaggaacgttccaattaatccctttggtctataaaaaatatggaaaacacacttaattataacataagaaaaaaaaaacaaaacaaaacaaaaaatataaaatttctatgctgcgtaccacaactacagagtcgcgagcagcaagagcaataatatcagcgcaagaaacgacgccagggcaagcagcctcgagctgcttcttggcgtcgtctataacattatagccgggtatagcacggttaggtactgctgtcttctcggtgttggagccttcgatgaggatagaagcgtcgcaaccacgaacaaaacaatcgtggaagtgcatcctcagaatgcccggggcaatccgaggatttgttttgaaatgagactcaactgttgatctaacaatagactcggccttagggcactttgttgagtaatacccaactttggttccttggccatgtgccaatgtggatgtcaaaccaagaaataacaaaaatattctcgtaacaaatattaatttgttaacttccattttatttttgggatgtaataatatacttgtgagtgtttattttggctgtgaattttgagtggaaagtatatgtgaatttatagggaatatgcatgaaaggtaaagagagagattgagaattgagaaagtaagcaaaattggctcactttctaaatgtgaggaatagtaaaagggatagcgatagtccaataatatgacaagtacaggagagtatattagtggacctttgtttgtcattatattatttattttggaatattatatttataatactagtggaagaataggctgctacgtaattttgaatttttcttatcattttattaaataattatatataattcaatgtttttttttttttttcaattcaaggatatatgtattttttgattaatttttatgttatagattgtatagttccaataaataaaattttatagtcaatgattcttttggagtttaattttagagaaatattaaaatttacttatggtgcttaatatttttgtgaagtgcagtgtaactcatttttagattttacttattttattttaataaatattataaagaatcactaactaattataaatgaatacttcattatggtgctagacaccattagtgtctta

SEQ ID NO: 21238 - DNA, 2232 bp, Cannabis sativa
tgttgttttcggttatgtattgcagttggaaaggaaattgtagatctctgccttgaccgagtaaggaaattggctgataactgcactggactacaagggttcttggtgttcagcgctgtcggtggtggtactggctctggtttgggatctttgttgttagaacgcttgtctgtagattatggaaagaaatctaagcttggattcactatctacccttcaccacaggtacattttgctactaataagagtttcatgcctattacccgagaggggtagcttaaacggttaggcatgtggttttgctgccacaaggtcagatgttcgagtccctcttaggcacctatgttttagatctcccaaagaattttttatgtctgtcttatacatttgttctgttatttatgaacaagtcttttgctcttgattaaaggtttcgacagcagtggtggaaccttacaacagtgttctatctactcactcccttcttgaacacacagatgtggctgtgttgttggacaatgaagctatctatgacatctgcaggagatcactagacattgagaggccaacatacacgaatttgaaccgtttgatatcacaaatcatttcatcattgacaacctctttgaggtttgatggtgccattaatgttgacatcacagagtttcagactaaccttgtgccatacccccgaattcatttcatgctttcgtcgtatgcacctgttatctcggctgagaaagcataccatgaacagctatcagtacccgagatcacaaatgccgtgtttgagccttcaagcatgatggccaagtgtgaccctaggcatggaaaatacatggcttgctgtctaatgtacaggggagatgttgttcctaaggatgttaatgccgctgttgctactatcaaaactaagaggactgtacaattcgttgactggtaagtgaaactgtccattcattgcgcaaagctgtcttttactttgatttttcgaagagattcttattcggtttgattatacacaggtgcccaactggctttaaatgcggtatcaactaccagcctccaacagttgtaccgggcggtgatcttgccaaggtgcaacgcgcagtttgcatgatcagcaacaacacagccgtggccgaggtcttctcccgtattgaccacaaattcgatctcatgtacgccaagagagcctttgttcattggtacgtcggtgaaggtatggaagagggtgagttctcggaagctcgtgaagatcttgcagccctcgagaaagattacgaggaagttggtgctgaaggcgccgacgatgaagaggaaaatgaagactactgaagatcgtaataatgatatgaatatgatgttgttgatgtatttgtatcatggtcacctcacctctctcttatattttgcttttgcaagtgttttgtacgatcaaattttaaatctttgttttaatgcaatggaattgtaagaatttttatgtacttaagtcaaatcatatgtgttccctttttgatattaatgaaatgattctcttttgaatcataacttgcagataagaactctttctttgcttgtatttttttggttacaataaataatgacattttaaaagattattacatgttttaaaagaagaaaaaagagaaaatgcaatgcactatggaagaggatccgaattgtcatttaaaaaacataaagggttcgtttaataggccgtataaacgtcgtattattttaaataataaataatattatagttagataatataatatattgtattaattattacaatgaaaaaatttaatacaataataattatattatttaatatataacaaatggtttgtattaaattttattataatatttataaagatttgagatcaagcctgatcttcgacttggatctaaggacctagatcccaagttccaaaccagaccccgacctgagacccgacacaagacctagactcgagtgatgaaactctaacctggacccagatgttgaattggacccaaatctcgaacttgaactagacacgtagtcgatgttgggatcgagtttattgaaaatatattataattttacaccatattaatacaagtcaatatcaaacataacattgtattaaataatactaatgtaatataatacaacgtatcaaacgaggtcaaaaaatttaatcaataattttttgtaaaacacaaaaaaaaaaaaaaaa

SEQ ID NO: 21239 - DNA, 4460 bp, Cannabis sativa
  modified_base (4393)..(4411): a, c, t, g, unknown or other
aaccattttgttttttgtgtaaatagaggtaaagcgcacacatatatatatctatatatatatatttatatatatattttcttttttctgaaaagcaaaagacagatctttataaatttgaacactaaaagttgaaaattccactaaaagaacttctagtcagctgaatatgatatcttacaatatatggcgtattattaattatttagtaaatgtaaaagacttgtaaaaataattaagttatatatcactttcaatacatagtagagagtagggaccttccctttgatgctagtgaagttctggctttccactttctttttccttatctttaaaatgtttctctttcggtgaatatgaaatgagcattgttattgggtactagtgatgccaaacactttcttaaaacttattttttaagttatatgagactcgctatttaattacaatatgacagtaaggaaggtgctagacaccaatagtatcatttagcaagtctcatatgaaatgtatgttttcctttttaaataaataaatataagactaacaaatgtaattatttattatgcactaattaattaatcaatctatgttttaattaatcaaaacaaagaaaaatactaatctaattatagtaccatgtatattctcaaaaataaataaataaataagacagagatataataaatattaaacaagtctttatatgtaatataatattttattttattttatcacattacatgaaaagtagtacataactatatgttaaactacacaacaattaattttgctattttgtattccttgaaggttgataagcaataggaatcaagtgtagattattttttctttgaagggttccaccaaaagactcaatcatgtccaaatcttgatgtttcattccattaggaagtatccaatcaaaatggtataacaacaaagcaagagaaaattcaacactaataagaccaaaagacatgccaacacatattctccttccaccaccaaatggaataaattcaaagttgttacctttaaagtcaatagaattatctaagaacctctctggtttaaaaatctcaggttcagtccaatattcaggatctcttccaattgcccatacattaactaaggtttgagtttttgtaggtatctcataaccattaatctcacacttgacttgatttattcttggtaataacaaaggaaaagtaggatgtaatctcatggactctttaacaactgattttaagtacttcatttctccaagtccactctcatcaactattccttttctattaaacacttctctaacctcttcttgtgcctttttcattgttgttggatttttcatcatttctgacattgcccattcaacagttgtagatgatgtttcagttccagcagcaaagatgtcctaaaatttattatcattaattaattacacaaaattgaaaagatagaaaaaaacaaaaaaatgtgatgaaaaatatgcatgattctattatcttacattcattataaaatgacactagcatataaaaaacaattatatctttagtgataattttttagtcataatataaattttttgtggctaaatgtgacttttagtcacaataaaaaattacttgttactaaaatataatatttagatacgatttgttactaatttagttttagtcacaacaaatattgtaactaaaagtaataccttttagtgacaacataaaaataatgatttataattaatcacaacttttctactttaagttataagttgttgtgagtactaaaagtaatattttttgcagtgttgtaaaagaaaaaaaataaaaagactttcaaaattggaaattttattacaatcacaaaaatatgaataacaatttaaatattattcaatagcatgtaataattttttattgagtatgtaaatattgtttgtaaaattataacatatagtaacaaacatgaaaaacattagtcataaaattatatattatagatcaaaaatgcgatatttacaatcatacccttctgtatttttgtaaaaagaaaaattcatgtaccctatttttattttttttattttttttgcaaaatttaaagcaattttaaaattcccccaaaaaataatcatttagtaacaatctttagacaaaagataaattttgctaattaattgtcaaaacataataatgaaattttcctaactaaaaataagataattattatagtgaatgtgaaaatgtatgtaaatgaataataaaacgtaacacttacaaagattattgcataaagattttgacttgtcaaggaaaatccaagatcacaattattatgaaaccttagaagaacatcaacaaaatcttcatctattacttcaccatcacctttctctgttgtttttttctccatgtgttcttgaatgatttcttcaaatatcacggctgccctttgtttgagactctcgagcttaggcctagaacggctaatttggtgaaataatttaaccgaaggaaacaaatccgaaagtgtaaaccctaacgatatctgagtagcttccatcaacacggacaagaactctttgttgtgaattcttgtcctaccacacgctgcacgcgaaataataccatacatcaacatgttaagtctcttattgagattaataacacttccaacattagatgaaattgattctatgaaattaaacatctctttctctctaacgggtttgaaagactgaactcttgtagcgcttaaaagctcttgcgtgaaaatctttcgcaattgcctccaataatcaccatatggagcaaaagcaagatctgttgaatcatagaagattattttcgaaaaaagaatggagggtcttgatgcaaaagccatatcatggactctcatgacttgtttggcatattgtggtgatgagattactatggttggaatttctccaattcttaagtatatcaatggtccatgtttcttggctaaatcacttagtttttgataaactaaaggggtaaaaataagttggtgaatgtttcccaaaataggtaatttccatggtcctggagggagttttgaatgtgatgaggttatggtttgtgtgagtaattttgttaccataaacacaaagatgaaagagaagaaaaggaattggagagattgtagttggatctccatgtagaaattattaagtgattgttgagttgagtaagctatagctttgtcctttaaagtatattaaagctaatattttgtcatcttacttcaattatttttcccttttattaatgaaaaaagatgaatagatcaaagtagttggtagaaaaagaaagaaacgtgttcatcatagattgttggaaaatgatgtcattgattaagtaatcttaatattatttttgtgttgtattctaagtggcttaagtgtgagtaatttaaattttgggattctcactttcaaaaatattttaaaaaaatattaaaaagagaattgaactcacattattatggaatgtgtgatacattccaaccaactaaactataaatattcattgtctataatatacttaattttacttaaattaaagtttaatgaaatcttttattttttatttttggactttagaaagtgtgagccctagacacggacctagctcacctatgtctagagtcggtaaacccgattctaggttaaggcagactagagctaaagcagactaagcccgtacttagggcccactcaaacagaagtctaaattccttatatagtataagtcttactaccataatgacactagtaattagataactattactttagtatgatattaaacttattaagaagaaataaacttatatatgtgttttgttttatataatagtaagtattatacttaataataattaaacaaatatattttcgaatgcgctctataaatattttttttttccttgtaaaaaagaaagaaagagaatacaagaggaaatcactttataatgatttgtcttttctcttgtcatgttgtgcaagtggctcattttggtcaattaggggcatattcttcgatgctagaattaagtgttttacaaaactcaaaaatattatgtggatattgctattaaggcactaatattataataatatgacatggtgtaaatgattagtgattttttatattatttattaaattaaaataaataagatttaatattaaatgatatatgctatctcttgtggtgtgtacctttggcatttctaattaagcatttctcattatatatattgtgactaataggttgtattattttggaggactgtaccaatataaatttttaggaaaattatatagaaaaatattaggggaattatttcatatactannnnnnnnnnnnnnnnnnncaaatttacggtttgggtttctaacgtggttgcagcgctagttgcaata

SEQ ID NO: 21240 - DNA, 2353 bp, Cannabis sativa
atatcccaatgaagctgatgttacaaatttggtgatacaaaattgtaacataagtggtacttcaaatggagtgaggatcaaaacttgggctccttctcctccaagcaatgtttataatgttacatttcagaatattggcatgaataatgtggataatccaattattattgaccaacaatattgtccattcgaaaccaaaaaatgtggtaatggagcttcatctcaagttcaaataaggaaagtaaagttcaataatatttatgggacatcaaagggaaaagttgcagtggaattgaaatgcagcccaagtaaaccttgtgttgagttaagtttaaaaaacataaatctgaattttcctgggggtgctacttcatcttgttcaaatgcacatggaactgctacaggtcatgaacaacctcccccttgtattaattagatcgatcttatataattacttcatagaatcatttcatttttgttaatttaataattatgtatacaaatctctgggctactttcttagtgccatcgaccctttgtttcatcatgtataccttataattatataatacaaataaaacttttttttaactaatatgaactcttcttttttataaatttcaatcatactcgtatagcattgatttaattaccaaaacctgatgggattatgtttttgtagctacaagtataatataaatctcacaaattactcatttatgaacaacgtggtggtgggacaaacacacacaaatttttttttttttttgataaatttcaatcgaacttatagaattaattgatccaattacatcatcttcgatagaagatttgaaatttgtgctaaattatttataattgtgcttcaatgcacaagatgtaaaataagagaaaaaataatttattatattaataatggtcatttgatattttattgagaatataaaaaattattattctttattcttttgttatttaaagaattttttgcagctaaatcttctcaactatcattctacgtgtacttaactttctgagatcaaattttggtggtaataaattctccaaactattgaactgttagtaaatttatgttgccctttatttttcacaattaaatgtcaacttgaactatttatgtgtacactcttgtatgtgtgacaagtttatattagtacaaggtaataaattatataaaaaaaaatatatatgtttggaaggattaataaataaggtggaaaaataaatataggtggaaattatttattggagggaaatgactgagatagaaaaattggagacaggtaatttttttcttgatttaaatcgatcctaaccgtatgaatatgaatcattttattaatatagattcatcaaatacattattattttgggctaaatttagcacaataattagtggtattatcttataccaactttagcccaacttttagcatgtgacaaatttaatacactttttagagcactatcggtaaagtgtagttattcatgagtttagcctacaaaaaatcaatagttcaagcagtggaagaatggtacaagcaaatgcctatcatcattggctcatattttactgcggccatggttacaatcattaattgtgattaaatgtggcttttagttcattataaaacaattttttagtcacaatatcattttttgtgattaaatgtggcttttatagtcacaacaaaaagttgcttgaatatgttttctaaaaaaaaaaagaaaaagcttttgttgacagaagcatgttgaagttgattaattattgatcattgttattttttttgtgaccttgtcactcttggattttatgctccacacgtttttagtgtttgtcgagtaatttgtaagattcatattacactcacagctactaaatcataaccccataataaagttttaataattgaatcaatgctagctatgaattcgattgaaattatttataaagaagaagagttaataaaaaaaaaaattattttatttctattatattagatatacatgatgaaacaaagggtggatgaatttaagaaagtagcatagagatttgtatatagagagtaattataattaataaattaaccaaaaatgagatgattctgtgaagtattaattaagtaattatataagatcgatctaaatacaagcaggaggttgttcacgacctgtagcagttccatatgcattagaacaagatgaagtagctcccccagcaaaattcaaatttatgtttgttaaactcaactcacgacaaggtttacttgggctgcatttcaattccactgcaactttgttcttcgatgtcccataaatattattgaac

SEQ ID NO: 21241 - DNA, 2447 bp, Cannabis sativa
caatatctctcaatcttaattcttaacccacattttcactctcctctcttttacatttacaaaaatggcagtgaaaatgggtatgggtatttccttggctattgtgtacgctgtggccatggttatggctgtggaaggagccggctcttcacctcacgcgccagctccagcagtggactgctcgagtctaatactgaacatggctgactgtttgtccttcgtttctaatggtagcacggtgtctaagccggaaggaacttgctgtagtggactgaagactgttctcaaagccgacgccgattgcctatgtcaggcgttcaagagcagcgctcaactcggcgtcgttttgaatgttaccaaggcttctactcttcctcaagcttgcaaagtctccgctccatcagctactaactgcgattgtaagctttttttttcaccatttttgaaaaatatttgtagaacgacaaaatagcctgattttcgcactgttttaattttgtttttacatgctttttcttctgcaatggatattttggactgttgtagattcatacattgagatttgaaactgggttttcagtttgtcgaaaagttctgattttactttgtggaaatgttttttcttttgtgctttattttctttggatgtaatcgtttcttccttggataatgatttttttttttattttgcagtatccattactccggctggatctcctggtaagttcttttttaatatatgattttattatcttaaatgattttatcatttttagggaataattatcttctttagtgaggggtttttatatttttctttcctattttaatagattattaattttacaaaggggtattttacagaaattctagatttttatgcaaaaatttaaaatttgaatgtatacaagtgaaaaaaatgtagtatgtggtgtaaaaatttattcggctatttggtgcccggcatgttatttggatggccctaaaatttattgtgtgccatttttagtttttacaaattactcccacaatcaatacgggacaaaaaaaattcatatattttagtttaaaaatataattaaaaatttatatttgtgtggcatgcctagtaacattttctagatttgtcaaacttgagtttccctttgggtccctttatgtaagtggaattgtacgaatttaaatggtggaccaccgaaatttcagccaaaaatttgttgaaaatggcccatgtatcgttttaccacaattatttattgactaagttaagggtggaaaccactaaattactcaattgtccatcttaattgctgtgcctactcagttattgccattgggcgtttttttacttttcagtcttaccaattaccataacttgaaactcttgactcataaatcagcattaactgtcaattacatttttttacctgtttgtcaaaatccttgactgattccccctcaaatattcagtttctttttttatgaaaatgtgcatcaagtcaaaacttatattactattttggtgcgtgtaatgaatatgtgaatttatgttttcaatcaatcaaataatgccgtttcaaaaaaataaaaaaaaaatcaatcaaataatacattgtttaaaatttgaaaaaaaaaaaattacccataatattattttaaccttttttctttttaaaatttactgtagtttttgtgtgagttgagtttcgaatttctgtaaaaatgaaaaatctcaaaaaaaaaaaaataatataaatatttagttttgtttaaatttaatattgtactgttatttttggagtttgttgtagtcccatttgttatcacattgtctaattcttgtattgcaacagctctttcacctgaatcagaattgactcccacatcaactgcagcagcgcctgatgctggtgccatcaatgggcatgccccggcaccctcaccagggagttctggtgcggcgggtgccatgtctgcttcggctggagcattacttgttgggcttgcagttgcatcattctcttggttctgagcttggagtttgatcttttttgtgagagaatagactactgtggggggaatcattttgttattttgcttttgttattaacaccatttgaggttctctttgcatagtttcttcctccccttatattaggtaaaaacacattcatttcttagtacaatttccaaacctatggagatttggactccctctggctaatgtattaaattatcttctattatattgttactttaaattattttgtgatatctattctccttttctggttaatttaaagatattaaatcattcgattttgtaaacttcagaactgaatatcttggagcataatttttttttttttgatcaagaataataatctttctattaatcaaacatgccatttacaaccaaataaggactacacccacaaatttacatc

SEQ ID NO: 21242 - DNA, 2210 bp, Cannabis sativa
agaatgaagactcctcagcctgagtgttatagaaattggacccttctgaaacttctggacttgcatattcagaaggagcttcataagcataagagtcaccagaagcttcagaattttcgtaatcaggtgttttgttggattcataagcaacggagccctcctcagaaatttcatcgactttaacagtttgaagtagaaaatgtactccattaacaacatcatatgccatcagtcctattctacctccaacccaactgcctaaaatacttcccacaaggtaaccaaatctcccaaatctttgttccccaacgaatcctatggtataggtgccaaacaaagtgccagtgcctctgagaaaaccttcagtaattgtaccaccatagtatatagcttcgaaaaaatcccacccggaagagatgatggggcctataattcgcttggcttttcgtgttgctagctttgctgcttttgcaccctctagttgtgctcgtttggcagcatcttgagcagacatgccctgtgacaatgaatcaactaatgcaacttctattgcagcatgccttgctctctcgacatgagcagatctgatgttgtagaaatagagtttcactccctcttttacagtacatgctactgttccagaactcatgtcgaaacaattcaagaatgtaaactgcccactctgagatgaagcatcttctccaaccaactgtcgacatttttcagctaaggacccgaaaagaaaaacagaaattattagaaatagtagagaaaaagcatggtttgaagattgcatattttaacaaaattgtggctaagatatttgtatgacttgtaacagagtcagaagacatctcacttcatctgagatgttacatgtcaagatcaagagtttagcaacaactactaaaagtataaaaccacataacgtagctgtccataagcagtcatgaattacttaatgcccagttttagttcaaagaaatgaatgttaaaatgaggcaaagggagataaaaaaatttctttatttttcaagttcttttgggccaaagtaagctacacttccactatagggtaccttcactattagtaagcctcccattcaattggctggacctgttagaatttggaatgagatgaatggggttccatctcaaaactaactggcaatgagaggagtagctcattcatcttatatatgacaatttatttttatacattagcaatgtggaactaactctaataggacctaaagatctttcttattgattaaaggaaaagactagagaacaaaggcaggtgatacagagaatctcaaagcttgttacaacactacagactgtttggtagaggaagagagaaggatggagagggagagggatgaattctcttgtttggcaagagggaaggaaggaggaaggcagaggaaagatggagggagaccatcttcctccaaatacacaaatttaattccaccaaaattggaagaaaatagaaaaagacaaaaaaaaattaaacaaaatatcatttctaccatttaaaaaataaaatatatttgtattagtaattataatataataattttaatatttattttactctccatccttccaaatttactctaataccaatatatcctctctatttctcctactccccatcctttctaaactcttcatctcctactctatctccttcctaccaaacacagcctaaatagtttgtacacagccacccttttctaaaacaggtagataaaattaaattattctcttcatgaactaggatgaaaaaaggcaatgctcacacaaacactcttgttaacttagtttgaccacagagtatgatttaacaaaattcctattaatagtaaagcacaaccattaataagtattcaaaccaccttgacaagacataagataagattcatgccagacctcatgactcatgttagatcgagcagttcagttgttagttatgttagttattaaaataaagccaatcaaactttgttctctcaattatgttatagttttcagatctatgtatacctaccagtaccaactctttattgcattaagatattatgtagtaattttctcttcctcctagaaaaatgcaactaaattagataattcagtaagataaaaacttctcttttattcacccaaaaaatttcatccccttatagtatattttctcaaatcag

SEQ ID NO: 21243 - DNA, 1871 bp, Cannabis sativa
  modified_base (1838)..(1843): a, c, t, g, unknown or other
ataagtgatgaaaatacttctgtctctttattgataattaaatgataaagattacattgaaatagagttttatttatggcacaaagctcaacagaatgaggcgccattcaagccttcccgttagcagcagctccgctgtgacaaatctccataattgctggagcctgggccggagaagaagactgtggcccaagccgagacacaccatgattagcaacactcatcttactagaaaaacaatcaacatacctggacatagtcaccatccaaggccaatagataggaaagggatccccactaacgttctggataatgtcagaagaagaaagacttcaacccctccattgatgtcccaaacagccacaatgaaagcagaaaatgccaagtttctcatacttgtattggatccattttttagtaccatttgacaggttgatgaaatatccagaatacagaggcttctccacatcatgatctatacgcactcttagccattgagaccaactagcaggtttcttttcatccaaatccaccttcacaatcgaacctgctagaacacccaattcattaccattagccactgagaaatattcgtggggcaactgatggatttgaacccaaaaaaaaatcactccacacgccatggcacttgtagaactcggacctcattcatgtaggatcatattataaactttcacacaccacgagccattttccaacacccaccgcatgtcttcctctttcttaaagccaaacttatacattgttgattttgtagtgacatcaaggaaaatagttacagaggtaggtcttttccagacagagcgcacgaactccttgactgcagcttcctccacaagtttgggagttacaattttccccaaaaggcaaagggtggttaatgtttgaatagtagacgcacaaggggccaaggatacaataacatcaataaatgatatacatctccccattttggcagctttaacaacctccatacctaacaatagacacaaccaacgccaactaatcctacgactagaccaggaaaaagagcaatacaagaaatgaccaaacacctgggaccaacaagacaaaacagaagatacaccacaacaaggggagacacctacaaaaaggaagaaacggaaacagacgctaaacaaccaacaaaggaacacgaaggacggcggcacaaaaaaaaaaaaaaaaaaaagagctataatgaagcaaaaaggcaacaagaagaaaggagtgagataaaaaaactgagaagagagttagtagaagaccatccttttattgactttaccttactttttctcaaactgttatacttaatagtacatgatgatgatgatgtcaacacttactatgcatgtatgtaaaggaaaacaattaaaatacaaacgacatagcaaaatgttagtattttatatcaaattggacaacaagatgtatgtaaataaattgcgtgaatgtaaatttttcattttatttgaggaaattatattgtataccccttttactttacttgttttaatttttacctctatttttatatttttttttttaaatataaccacttttatagatgatgtccctattagaccccttaggttaatgcaaattatatgctagacttaagtagaaagtgagagtatattaggcaactcactcaaaaagtgggtatatcttaataaaaaaaataatatgagggtatttttgattaatgaatacaaaaaggaggtatttttcaatttatcccattttattttgtaggtaaaattgagtaatattgtaaaagaaaatagactaaattacactctataccctttttnnnnnntcctcttttatttttaccctctttttta

SEQ ID NO: 21244 - DNA, 4835 bp, Cannabis sativa
atggagcaatgttatgatcaccaaaagaagaagaagaagaagaagaaaagactccatcaataattatcaccacaaatagtttaacataaaattatctatatgaaatggaataagaaattattctggacattcaatcattgatagcattactcttctgaagtcaatattggtgactctatttacataaattaataaataatttttatatatgatattatatatattaataatttccatcactaaccatgacttttctaatttgaaattagtttatgcattaaacacgcaacacaattatttagttgacttcttaagtagaattaactattacttaattccctcaaaattacagcaatataatgtatatttgcggtattgtttattattaattaagatatcaaattatatattttaatttgaagaaatattaaagggcagtactcatggtatttcgcatcttaatttgtaatctctaatattgttactaggactaatatcaagtcttatttattttactttaataaatatttgaaaactgttaatcaattataaaataccacctcatagtaatactagacacctttcggatttaatatatagtcccgatgttatatgatggtcgtatgtttttatcggaaagggatgtcctttctgaactttatgctattcttttgagcgattagctgatcatgtttaaggaagatgaatttcatttaaaagaaaaaaaaacattaagatatcatattacatattttgtggacttctatgaaaatatatattttattggaaaaattcaaaagaaaaacaataaataaaaatatcatataagtatgtggcttacattactatatgtcttccccacaaaaataatttagaaccatttatgcataatttgccaagaagttatcatcttatttaattaattctcattcaaataattctgtggtcacagtcagttttgccgacttattattacattttcaattatccacacaaaactaatactaatttgactttacaactatatgtgaatagaatatcaaagtatcatttgattgaatatacataaatattaatatcaaatagcacatatgagtattattagctcataatcataatgagtatgttaacactaaagctcataatcatttcatattttcttataataacaattgagagtagaatagcaaaagcaaccacccaaaatgatgatgatggtgatgagtgcaaagaagctagatgtggtgagatggagccaccaatcaaattccctttcaggctcaaaggcaagcaaccaccccattgtggctctcctcggctcggtttcgatctctcatgtactaattccaacaaaaccatgcttgagctcccaaatcttcaattgaaattgtttgtaacacaaatgaactacaaatttcagtacatgaaagcctataatccctattgcatccaacaaaagaatttgaaattattactcaataatctttctactacttctcctcttcacttctttaatagtcaatatctgaggtctatgctattgaaatgctctaccaatcatacaaacaatggggttttggattctccaattccttgtttaactactattgactcatcatcatcatcttccaagtattttgtttatgccattgattataatttttatggatacaactattggggggatttagtttcatgtagcaagatgtttagcaatttgccagtcccaccagaaatattcaaacatgaaattttttccttggaatggtcaaaaccgaattgcgaaaattgtgaagctaaaggaaagaaatgcagattgaagaggcctcatgactcgaatgatgatcaaactgaatgttacaacccaatgaagaaaggtatgtagtaaaattaatttctctcttattattgatgcaaattaaaacaatttcgattgtgtattttttttatttatattctttcttttgttaattttacaggtgatcatgatcagttgaaatttgtattgatgactactggtgagtatttgtattataaatagtagaatgattttttataacacttttttttgtgtaatataattaatgttataaattcttataaatttaaatattcttgttttttctcatccttaaaatcaatatttatttgtatgtatataggtttcacaacaggttcatttgttattgtattggggtttcttgcaactttttatgtctaccataaagagaaacaaaagagagaaaatgggttaagacttgaaaagtttttggaggattacatagcattcaagccatcaagatatacctatgccgatgtgaaaaatatcacaaaaaagttcaaagataagttgggagaaggcgcgtatggaaccgttttaaaaggtaaactttccaacgacattctcgtcgcggtgaagattttgaatatctcaaagggaaatggagaagagttcatcaatgaggtaagtacaataggtcaaattcaccatgtcaatgtggttcgtttggtcggttattgtgctgatggatttagaagagccctagtttatgaatttttaccaaacgattcgctagagaaacacttatcaacaaaacagttgattggcaatgaaaaatgttctcttagttgggagaaattattcgacattgctttaggcatagctaagggaattgagtatctacatcaaggttgtgataaacgaattgttcattttgatattaagcctcataatatcctattagaccacaacttcaaaccaaagatttctgattttggtcttgcaaaattatgttcaaaagatcaaagcatagtgtcaatgaccaccgctagaggaaccatagggtatattgcacccgaagtattctctagaaactttggaaatgtatccgacaaatcagatgtctatagttttggaatgttattactcgaaattgtaggagggaggaaaaatgataacatgaatgaaatctactatccagaatggatttttaatcttttagaagaaggaaaagatattcgaatctatattgatgaaggcggagatggtaagattgcaaaaaagcttgcaatcgttggacttcggtgtattcaatggcacccattaaatcgtccgaatatgaaagttgtagttcaaatgttggaaggaaatgaagaattaagtattccgtccaatccattttcatcttcatcaagtgatccgtccaaaacaaatatcaatctgccaaaaaaatttatgaagtctttagaattagaaactataggtgaatgaacataatgtgtaattcatttcttatgaaattgcatgtcgttgtatatttttgtgtatttttatattcaatacatagtgaaagatctaaaatttttagttatcaagttctattaccgattgttactatgcttattataccaattcgattaaagtgtttgggctgtaaagaaataaagctaaaacagtataagacattcgattgttactatgcttattatcttggttggatttccccaaccaagataagtaacttttgatttgttactatgcttattgtttgacaagtggtttctggaattttaccaacttgtgtacagcttctcaaagctcatgtgcctatttcttcctatttgccctgtaatggccataaggaaacaatttttcatgttttggtagggtgttcttttgctcgagcatgctggaatcgattgttcagatatctctctgtaagttgttatggtttcttgggcaatttggaaggctcataatgaggtggtttggcaagataagacccctactacgtcattagttgttctttcaacatgttctcttctttgatcgatataattttgccatacacagatgaattcttctttgtccattgtttctgctggatgcatgaaacataatgtgcaatggagtacaccggcttctaatcagataaaggtatatgctgatggagcattatttaatgattttggtcatgtcggattaggttgtttggcaagaactaatgagggaagggtactggaggcctatactgtgaccaagatgggtgttgttctaccaaaaattacagaaataattggtatcaaggaggctctgagttcaaatgcattcatggtctaataatgtgatcttggagagtgacaatttggtttgtgttcaagctatccaaagtaatttatatatgccttatggcctcttagttaatgctattcaatttgttgaacgatttacaaacaaaatcgctcattatctggcgcgtaactcttgtttttcttcaaatcgtatttttagaaacatgatttatctcctgaaacctttgctattaatggatgaattttcactttaatgaaaatttattatttatttcaaaaaaaaattgtaactaaaaatgataatttgcttcatatcaatattgtttggcaagagattcttgtttctctacaggtcaatgcttcagttggaggattgttcctctgaagtgtgttttattgttttgaacgaatttattaattaatagattttatgattttttattcaaaaaaacaagatagatagataatttagtcatacgaaacttgcgatgcatatggtagactattacttactctacgtcacttaattccatatgtatcaatattgccaatgttcaagggtgaaaatagctaattaatggaatagaaatagaagataatcaccaatgaattagcttaagagaaatgttaaaatacactattaatatctaatactttctttattattgtgaataagtagcatctttcatataattttaaaaaatatcttctaaaaaattaatattactaattaatcgtaaaat

SEQ ID NO: 21245 - DNA, 4263 bp, Cannabis sativa
gcttacctgcatttttcgggaaccctccaggttacgaatggagacttcttccaactcggcggtaaagtaacaaatactttccaatcttcaagcataattctcaggtcatgaagcttgttctccaaacccaaacaacaatttgcatgcattgtacaaacttgattcaaatctttgctgggttcacaaagcccgccaaagttagccgtatccaaaaatctcatcttcagtccaagattaaagacgaaaggatcaaactttattatgttgaagacatcttgatcatggtatcccggataagtttcccgcgaagagtaccaaaatttgtagaattctttagtcctattattcgcctttacatatgtaaaccctccattgggcctgttgtgaagatttgaagagcttccaaagaaatggtcacatgcaatctgaaaatctgcgcgcgaataaaaataaggaaatggatccctgaaccacatgatatctgcatcctgcagtagaaaacaaccagaagggttcatatacacaaaggtatataactatattagcaaaagggttaatcatacttctttaaaatgtaacaagaaaactgactatatataaagttctcatgcttttgcagcctatagtgttattattttctaaattagcttcaaggctaaacctctcccaagaagcatttcagtcaccccagtaagtatatagattatttgacagacgacaaagagtgatataccgacgaaaagtattttcaatcaagaatgattcttacatttgtctaattcactcctacataaattctctacttgattcttttttatttcagtaattctttcccattgtaacggggaagtgattcagaatccaaagtagaaacaagctgagcaacataaaattttgttgcactaagacaattgagttctttgaatgaacaacaagtgagtgccattagttcaacaagtactttagagtttgtgttagatgaaaatgtaagcatagagagcaagaaattaccgtgaaaacaaagttgtatcccaactctaaaaccgagcggaggaaatcaatccttctccacatcatgttcaagtaatcttgagtcataaaatatgcctcctgatgaaaatcaaatccttcactaacaagagaaaaacaatatttatggagttccaaacatcgtgcgaatgctgttcgatccatagctataatcaccaaatggttcaacagcttaagggtaccatttccaatcctgaaactctcaagaaatagatcgatagtcgaatttggggcagcccaagcttcatttaatgttgttaaaattacagtattatcatccatagaagcatccttcaaaaccttctcaagtgtatattcttcaacaacctatcacagtgtcaattcataagtaccacactacttaattttgctaaaacaaaggtgagcttataaaccaaatcaaaaatgaaactttattcaagatagtaaattatgaaaaagccctgtaaaattttcatgcaatagagatgataccaattataaacaaaactaccaaatcctaactcttctgtgataaagctaccaatatatttgtatagcactatgttcaattatgaagatacattaactttgagtaaaatcataacttttcttaaattcttctgctcatatatctatgaaattaaatacagaaaaaaaaaaaatcccgaatttctaaacttcccgttatccaacaaaaaccttaaattcataataataaacccaaaatcccccacgaacacactccaatcaatttcaaaaaaaaaaaaaaatgcatcatattcgaagtagtaattaatcccacctttgaagtattgaaaaaactcagcaaaaaatctcaaatatccatgatgacgagagatataattatcactataaatagaaccataattagtaattaaggttaacataatagaaaaaaaaaaaaaaatctacactaatcaatatgaatataccctcactatctccaattcttaaaatctatattgttagaaaaaaaaaatactcataaaaacaccattttggaagatggccttaattaaataacaaaaaagggaaataatcaataacagtataggaaagaaagcgagtaagaaattgaatcattaaatagacactaaagtaataaggcattgtaatatctgtagagtgaaagaggactcacaggagagttatcggatacggcgaatggaaaagcagatgaagaagaagatgaggatgagaactctggtaggaagcggagagcgtcgaaacttctgaagaggaagaagcaaccgagcaaaagagtggcaaagaggatgacgtggcggaggagtagagccggggattccaaccggagaagcttggcggaggagaatttgacggcattgttggttggaagagacatgggaagatatcgcctccgctgtaatgagggcaggtggaatgaacgcatatagggatggatttggtacttgggtaggttagaatcggaatcggaatcgaacaagaagaagaagtaaagtgtgttgttgttgttgttgttgttaagggtaagggtggtagtgatggtgggtatccgccattgtcagagctcagtggaaatggtaatggaggtggaaccgacattaatggagctgatcataattcataataaatcactaatttaaataaaataaataaatagcttaatttatttttttactttaaatctttatttatttatttatttatttgttttaacagagtgaacagaaattctacctaaataaatgcttaaatttggactactaactattttacattttggtaattggatatgtattaaaaaaaacaaaaactattttccttattttttgttttttaaacaaacttttttttttcttcttctttaattagaaaaagttttctttgaaacataaaattagagtgtgtttggtaaaagaaattaaaaacaaaaaattataaaagtaaaaatgtgtttgaataaatatttttgttatttgtctttttattattatttaagggagttaaagtgagagaaagttatgtgaaaatgataagagagaattgaatatttgtaaaagttaatacaaaatagattaaaattaaaaaaaaaaattgtttaaatgattttgaaagtaatctattttggtttctaaaatttaatttattttttaaaagttaaaatattaaaaagaatattttctaaaattaacaagtttagagtataataactatactatatgttgtacattgtaaattgtaaagttattataccgtacaatacaccgcaatgcaagaatagatgtagacattgcaggcaaaaatcataggaagagatcagactcgtgtttagtgtccatcatgagtcccaacacaacgtcgcacgagtaattaggtaactaacgataacagacatcgtaatgatagtactaatattcctcgtaattgtgggggaatgctcaggtgaaaacaatttgaatggacttgatttgaatcagcctattcacgaccatgcacgtggcaaaagacctgctaatcctaactcgaaccaacgatctagtcggagggaagaaaggtcgcatgaagaggaggataacgaccggcgcaacctgcgcagtcgtgcccaaccacgtcccaagataaatgatcccgagactcagtttttatccccgagatttaataatcgtactcctaacatttataccatgttaggttctgtgtggataagggatggaggaatatatcacgtgcatagagggaatctacgagactgccttaatgaagtattccttgctcattcccagactatgataaattgcaatgtggaggaggaaccccatgatccccgtttggctgatcaaggtatcccccttggtggaccacccctacaaacgtgaacaacgcatcaaataccgccaatccaccactcgcacctactgtactcaacaatgtggtagtacctgagaacatagcagtagtagccaccccactgcctggtaaccaagtcgcactacccaacaatccaatcctgcaaggaggaattgatcaaaaaaaccaactgcaagctctgaaaatgatcgagcagtagataaagcctatttacaaattacacggaatgtcacccatcatggaggcggtgcggcaaacttagcttccaaagggcttaagactccccgagtcattaaaatacaaaagtgcaactaactcgattgattatcttgataaatttaatactattatggaagttga

SEQ ID NO: 21246 - DNA, 3296 bp, Cannabis sativa
  modified_base (459)..(481): a, c, t, g, unknown or other
atgaaaatcttattcaaaaaaaaaaaaaatttattatacgtacattgtacattgcacgtaatatcaacctagtatttatatatatcattatttatctctctttcatctcattttaccttcaataatcctagagcaaccactaataaatatttgcaataaaggtagatatatacaaatataacacaactaataatagttcttagattaattaatcatgcatgattataaatgtgtttttatatatatacactatttaatacgacataattcataattgaatgaaggtcttcatgagcacaaacacaattaatggtatatatcaatatttttgttaagaaaaacaaaatattcttaataaaaatatatgtcacactcatttatatgtttaatcaatacaattaacttatttatttataatttaaatcactcctacttagttgtttattattattattattnnnnnnnnnnnnnnnnnnnnnnntattattattattattttatattagagagagaaaatttaaatttgaaatctcatctttattaaaaaaaaaaatgtaaaactactaaaaatatacctataaccatttatatatataaaaaatattatatagtaaaattagtttattaaaatacaaaatatggtaatccttttatttttttgctcaacttattaattgtaatatatttgtattctcataatttcttttttttttctttttttgacaaaaccaaattaaatatatattattaatttttatttcaactcaagagtctctcttaataaaatcctaaaaaaccatattaagaatattgtgacttgaactaaattatcagtttcaaatcatctatatgagaattcttttatcattgacgatatcagagtaaaagatgtgagctaaagatatagttggagtctacattaacgcaagcaaaaagacaaaaattcaagacaaccaaaaaaggtagagactaaaaaaataaaattactaagaacaaaataaaatctctgataccaaatgttagagaaaaaaaaataaaaataaaaataattaataataaataacgttatatatatacatatactaagttagtatgtatgtgtaaaactaactaacagaattgtaactaattctaacactttatgctaataaatgttaacacggtatttaagaaaattacggttacaatataacacggagcgaatcacttctcttctttcgatgtcaacaaatgaatttaagtattaataagaacataattataacacgacataataaatacaataaacgtagatacgatcaataggagataataataaaaattatacttatattaatgtattatgagtatactaattaatattgtgataatatatgtgataagtggatattttgcgtgtaaactcaattcagttatattcttttctttttaaaatatacacttgaaccacaataaaatcaagttattaatttaactttaactgagatgataattgaaaaaaatgatttcctcataaaaatatcatctttattgtacatggtacacttcatacatctcattaaaattttctaaataattaagatatatatgatatttacttattatatatctctaatattaatatatatgtgttatctctataaacatatatatatatatatacatagatttttaattagttaatttttatcagtgaagtctttatagtgtgatgccaagtaaacaaatacttacacccatttttttttttaaaaaaaaaaacaaataaaaccatttaaaatagggttgaaaatctatttcattctacaaaaccaatatattcgtaacctacaaaattaatgattccaaaaatactccaaacgtattttccactattgaaaaaaaaaaaaatctcccccaaaaaaaccctatttaagtgagcccttcctacatcattttcctcaccccatttcatacttttcccatttagagagaaatcctaaatagaaaataactttattattcttcttcttctttcttgttcttatcaagaaaaaaacttttctttcttactagggcaaagaaaaaaaaacactataatatggggcgtcgtaagattgagatggttaaggttcaagaccgaagtgctcttcaagtgaccttctcaaagcgtcgaaatggccttttcaagaaggcgaacgagctagccaccctttgtgatgtagatatcgcgattattgtcttctctcccggtggaaaagtttactcatatggaaaacctaatgttacttccataatcgatcgtttcctgcacgagcaagagcatggagtttcgagtactaagaagagacgttccacctctcgtcgcaaaaccaaggagttggagaagctcagcgagcaagttaacaacggcgacatggagttggaaaaagagaaaaagaagagaaagaagagaaaatatgatgagaatgaggagatgaagaggttgaaagaagagttggaaattctcaaggaagaagtggatgatagaaagcatgtggtggaggcttcttcaaccttgatgatgatatctaatgatactttctaaacaattttaatttaattattactattattatcattatgttgctaataataaacataaattgatgaaagtaatatttttctagagatattactattcattaatttttatgttctatgttttatgtcatgtatgagtttgtgtaagtttggagtcatttttatgaaattttaatggtgtttttgttttagttaagagagatgaatatatgttttacaattattattattttattttattttatgttatatgcttagctggttttaagatgcaattatggtatatgagtaggagtgataatacatatttatttttgtgattctctttacaaagaaaaacaaagtaacggatatatttgtaagaagaaaactttgaaattatatatatattcatttgaaacgcatatatatagtaattaattaggtcaaactatgttttaattaagaaacaaacactatagacccttctcttgaaatttgaatagaacaaaaatgcatgcatgtgtgtgaattaatggtagaaaagcatgtagagaggaagaaagtaattaataagaatcaaacaatgtatgaacatcaatatatagctagctatattaattttagagagtttaaattgcttatgtataagagtaaacatagtcatgaaatatgttatatgtttaagagattataatatatatatatatataatagagaaatcacatatatatatatatagaacactttggtta

SEQ ID NO: 21247 - DNA, 4678 bp, Cannabis sativa
catcatcatcatcatttttcttatttataagactctcctcgttgaatctgcggatcttatcatctagatagcctttcaaaagagactcgaaaatgggtttgggagaatgatgttccccagtggggaaagttttacgaacattctgaattgcatctttgaatgcatttgcttgcgtgctcctaggaatgccagtagtgcagtagaaagcaaagcactcgcagttgttctccacaaagtcataccctccaaactctttattattctttagctcatcattggcgcgttgaatcaccacctcagccaagtcgggagaggcggcgctgcaagtacccgaccttttaaccatagcctcagttaccccaactttgtattcaaaccgaaagagtctgtggtgctttagaaagcagtccacacaggtcttcactatacctttctcctcaattcggttataaccgcattctccacacgacttatttctccccaaaacggtgcgtatggggttgtgtttcttctttgatttgcggaaatggataactcggtcatttcccacgtatattcctgcaataataatcataaaaatagtgtattaattaattacaatttaagtcattattaatattatttttaagtggtaattaattacacattaattattaccatggtgagagaacgtgtgagctttcctgtagcagtaaatgtgatcccctttcttgagctcgcttcgttcaatcctgtttgaaagtaaccccattattatagctaggatatatacctctcaataagatgaaacagatgatgaggaaagagtatttgagagaagaggcgaagacgaggacaaatatatatacatattggtttctctttggagatttgacttaatcaacataagttctgttttttttaaaagaaaaaaacatgacccatcatcatttatgagctttaattacaaaccgtggtaagcaaaacgtttttctctgtccatgggagggtgttggaatagtcaactctcgactcttgcttgcctttttcctcaccaattaagtacggtagttttgttttaatattttgtgagactcgatttgatccttgttcttgatagtatatttctttcaaccattgctatttatcatcatacacttaattattatttaaagtctaatcatattagtctaagacatgaatatgtgaacgagttgatttatatcaaagcggtaaacaataaaacacacataattacgtggttcggcaattcgcctacttcacaagcggcaactaatattattaatctgagtataaaatatacagaatacagaaacagattttttactaataatatctctcaagtgtttcgcaaagtgttttcccagactcattaaagtttttttttttttttgagagaaggaaattcattcattcaaagataaaatatttgggtatcacaattagggacccctccctaaactcgaaatcaagaaaataatcattatttctagcagattttgctaaggcatccgcctcaacattatccagtttatgtaagtgggcaaaattacaccaagaaaagccttctaacaaactccatatctgaaaggccacaacccttgttttccagcagggtggcatcagtcgatttccgagggccttgatcagcagaagagcatcagatgcaattacaatagaacggaagccagcttgaatccccaaccgaatggcccaaaggactgctagagcctcagcttccatagccgaaccagcggccgccttccttgcagaccacaaccacttgttgctccttctgtccagagttcccacagcaaggccagcaacaccctccttccatgatgcatccgtgaccataaacccctaggttaaattaggaaatcgccatacctcatccttggacttcatcaccatggtatcctcctgagttggaacattcagacttgagagtaagtcttccattctctgcaacatcttacatctaacacaaagaatatcaaccacctgaattttgaaaatgaccccgttccttgtagaccatacggtttcaaagagactccccacaaaggttaagaagcgccacctttcttccccaatgcaaagatcccccgaatcacgaacaatatctgttagactcatattcctgtcgatccctactcccactgggaaaggacccgagaaccataaaggctcgggccaatgggcaatcccaaaaaagatgtctcgttgattcaaccgcatcaccacaaaggacacaatctttttcagtgagaatgacaagcttctccctaacagatagactccctcccaacactctccagaggatcatagacacccttgggtgaactttactatcccagattaccttccaaattctgtctccttagtcttccccaaacttcatagcttccatgtaggcaccttttgttgagaatctcccatcattcgcacttttccatattaccatatcttcacaatcaacaggtaatcattttatcgtagcaaccatgtcaccaacttgttgtccaaacatttccttcaagagctcgatattccattcattgccattagttgataagtctgccacagttcgtaataagggaaagcgactcctagccccttggagaagactcctaaagtcggcatagctcaaccacgggatccaaggttgtgtccataagtcaatcaaatccccttttcctggtaaggcaagggaagccgatcttaggattgctctcgattggagaattgttttccacaaaatggaatcattaccgcggggttctgtactccagaagaaagttttgttacaatatttttcctttaaacattgaacccacaactagactcagtaaagtggttcccaagatttggatatacaaatgctctctctctaagatttcccattaaacccaattgtaccaattgttttacaccctgaattcttacacaccaaattgcctttacttcaaattactataatgctctttaaagagctttatatttatagaaggaaaacctcaactctcagccatatataataatgagatgtagttccaaccatatgtaacaaatgagagagcatataagtcaatagttattgcatagctttattgacaaatgtggcaaataataaggtccaacacacttaaaagttgaaccatatatttgtaacttcaagacaatttgacttttgagccaaacccaacaatctccaccttggtgaaaaaaatcaaaccaaaaaatactttctccacatgtgccacaggcactctaagtccaagagatgttgatcaagtttaaacagtgttgaacttgatccctgtaaccacctttcacaatgtatccagaaaaatttttgaaagctagaaagtcattaatgtttcatacagttatatggccttaagattgaattcttcattcgtaaaggcatcatatgcaggaacacccttataccacacttgactcaaatcatcaactagaggaattaagtgcacatcaatatcattaccaagttgtgaagggcctgatatcaatagtgtaagcatagtgaactttctcttcattacgaaccaaggcggtaaattatacatcacaagcaaaactgactagtaactatacttattgctaaaggtagtatgtgggataaaattgtcttctaaaaatttccaaccctatgtcgtcgattatttattactatgctgaaaaaaaaaaacgcctctaaaggcttgttttgtagtagtgataatttagtaaacctattacaattaaggtaaatagacttctcggcatcctctacaaaattttaaaattttaatggatcgacatttgattcaaattgttcatctcctatttttttaaaatgtgatcctcctcataatctaaattaacacctttaaccttcttagacttagacgttccctcacccagaactctaatttttctcgtggtgagaccaaacccttataactcttgtctattcaattcctaaataaatgctctattatcttagtaatactcatacgctgtatgttccatatttaagacaagaacaaagaactaatttagaatttttcgcattcttttgataaaagtccaagaaatggtcaacacttttcatatactctgctgataatctattcacactacatctaatttctattaattttgaaacttctaaaaaaataaaattatattcaattatttggttaaatgtgtagtaattaattagttaaattcaataccacacatagataattttaccctaatctaacacttttcttctaatatttatgtattttttgtgaaatttatcataattctatcaaaattttggcagcataacgactattatcgaacattctcaaaaattttaaacatgcaaaaaataataaacaatatcacaaaacaatacaaaacaaaacaaaataattaacaatacaaaaattatccaccctatccgatcgcaatatatgtatttacagaacctacttcactacagatgaatatttaagatattcaaactcatctaacatgcaattctatctatctaactgaagtacaattaattgcagaacctacttcactacggatgaagtacaattggttaagaggattggatggtaatgttgaggtgatgggttcgatccttctccttgtcactttttttttttttttt

SEQ ID NO: 21248 - DNA, 7881 bp, Cannabis sativa
gtcttagataggatgtgaagttggaagttggccaatgcaatatttaggcatgcccttcgggggttcgcctagaaaatggagcttttgggaaccaatattgaacaagtgtgctagaaggctagatggatggaaatgctcatttttatctaaaaggggtaggttgactcttattcagtcaattctatcttctctccccatctatttcctatccttatttaaagcgccaaattcaataactaaagcactggagaagatgatgggagacttcttttgggaaagcagcgagtcaacaggtggtgaacatttagtggcttgggatgaggtctgcaggcctcgaggagagggaggtctgggtattgggaacttggagatgaggaataaaggtttgcttatgaaatggctgtggagatttcctttagaaccaaactcgttgtggcacaagctagtgttgagtcgatatggtaaggctaataatttatgggacacaaaaaacgaatataccctatctcctaaaggcccgtggagagatatttcagatctatatgatgaatatcttggactggtacacttcaaaattggtagaggagacagtattcggtttcaggaagatgtttggcttggtgattcttccttaataagtgctttccctgacttaatagagatttctaagacaaggaatgtgactataaaggaactgattgtcgacaagggtttgccagttgggtgggtagagagttgggatttcaagtttagaaggaatttattggagcgggatgtcccaagcctttatgtcgttattgcaaaaggtggaacatgtcaaagtgcttaatatttcgagtgatagccgaattcggaaaccagatctgtcagggtttttttcttgtaaattagccttttgttagtttacattaaacccagatgttggtggaatgtatcggacgaggactttatggaaaagttgtgtaccattgaaagttaaagtatttggctgtcttgtgtcgttagagtaagtgaacgtccacgataaaatgcaaaagaggaagccttacctatacaattcccctggatggtgcgtctgctgcgaagtcagtggggaagatgttggacacctgttcttagaatgcaactttattcgacaattatggattaatttgattgaggaatttcagctaacatgggttatgccaagatctgtaccacaagtgatagtagattcattggcagtaagcgtaaaacaaagttatggagaacgacaattttagcaataatttgggctgtgtggttggaaagaaatgttagaattttcgaaggggctgaaagtttagaagaggatgtgtgggagaaaattagttctgaacaactacatgggtttttaaaaccaaactttttgaggagttgttctttttagatttatgaagagaatggaattcattgttgtagtggcagtactttcttagtctatcctattttgtttcagcactgtcgtgtgctaaatgttttaggcggactatttgtgtaaccaaggttttcctctgccaaaagtaaggttttaaaaaaagaaattaaattttttcttttagagaaaaagagaccaaggtcatgtcttagattgacctcctatagaggaaagccatagtagcaaaatgatacatgccatatagagttacacgttgatatcaatcacaaaagcaaaaactctaacatgtacccgtaaaccttatcaactaacaaagaaattagttagagttagagcgtgagtgggtaggtccacaattatattggggctgttgtgattgtgtaaagttggttagctttgaggagaggttttttaaatgagattttgcttagtcttgggagaaaggaggctctcgaattaactcaccattataattgttaggcttcggtacttgccaaatatgagttgaataatatagagaatttcaacagtgtgatttttgtgtgatttgttcagataagagagtaagaatcttatcacaaggttcaaagtaaatttgaataagagccaattgttgggtgtttgcttggaggaggaggtagtggctcaatgtgttgaccaaattgggtgtgtagtaggtaggtggcccatgacctatttgggaatgccacttggtggttcacctaggaagaaaactttttggatcccaggtttggacaaatgcgcgaaaaggttggatggtggaaatgttcgctcttatctagaggaggtagaatcactcttatccagtctgttctctcttccctaccaacttattatctttctctttttaaagctccaaagtgtggtcattatcgccttagaaaaaatgatgagagactttctttaggaagggggtgacttagcgggtggagatcacctagtggcatgggagaatgtgtgtagaccaaaaaatgagggtggtcttgccattggaagattagatgtgaggaacttgaggctgctcatgaaatggctatgaagattccctttagaacctaattcactatggcataaagttatcaaaagtcgttatggacaggcagacaatttttgggatacaaaaagaggggagagattgtccccaagagggccttggaaggatatttcaggtctctatgaagagtattggaaattggtgaagttcaaggtaggaaatggggtgagtattcgcttttgggatgatgttgggattggggaatcatctttgaagaaccgatttctggacttagctgtgatatctagagctaaaaatgagagtatccaggagctaattgaagatgtgggcgaagttggaaactgtatggcaagttggaatctaaagtttagaagaaacttgatggacagagaaataccaagtttattggagttgcttcaacagttggaacatgtcagactgcttaccattctagatgacagcaggctttggctacctggtgcggggggtatctttttgtgtaaatcagcatttggctggtttacatcaggtcatacttcaggtgagtatttttggacaaagaccttatggaaaagcttacttccatcgaaagttaaagttcttgggtggctggtggctctaggcaaaattaatgttcatgagaggttgcaaaaaaaaaggctgttcctttatttatcaccgggttggtgtgtttgttgtaagaagagtggggaagaggtggcacacttgttcctaaactgtagccttgctcaaaatctatggtttaagctgattttggaatttgaaattcaatgggtcatgccaaatgatagtgagtaagttgggagacagtaagtgcagtctcgttagtggagaacagcaatcttggctgtgttgtgggctgtttggttagaaagaaataacagagtatttgaaggttctgaaagccaagtagatgatttatgggaaagaattagattttggacagccacttgggtgttcaagactaaatactttgatcacatctcattcttagacttggctagagaatggagaaatttgatgtaacttccttttagaaatagcaaatactgttttttttttttgggagggtccgtttctgtttttgtgtgggttttagtatgtttttatgctaggactcttgtgaccaaggttttcctctgccacaagtgagggctttcagtatatatagggtagggaccagtctaagacaatggcctctctctttttcagaaaaaagagaatcttatcacaagactgcttccaattctttcttaatagtaaaattgaacatgcaattttcttgacaggtgcgggacatgcttggagatgggcgtttaataaaacgacgtatacaagatggaaaaggtatgggctggatttcatgttatgtgcaaatctgtggataatgtagatggttcattattcttctaaatcacatttctgtattatacacaagaacaaaatcagatatttgtcattgtactgtattttgttttataattagatatatgttgaccatttaggtgagttccctatggactgccctctccatgacagtttactacgtgtccattacaaaggcatgcttctaaatgaggaaaatagagtcttctatgatacaagaagtgataacaatggagagcccttggaattcagttcaggagaaggccttgtaagttgttgttgttgttgttgtttcaaaaggatgaaagtagttattctgtttttttgctttctcttcttttagacaaatcattttcttgaggacctgacaaatttacgaactgatattctgcaacatgcgtaaaatagttcttctgtaacacattcattagtctttcaattgttgctgtaaggctttcgtttactgtggtaggtacctgagggatttgaaatgtgtgtccgattaatgctgcctggagaggttgcacttgtcacatgtcctcccgattatgcatatgacaagtttcctaggttactttctaaattattttgccctttcacttgatgctatgtatctttacatgtcctgattgtgcatatgaaaagtttcctaggttactttatcaagttctgcatatcgtgaatgtaattttttgtatcgtgtcatactaatggtttttctttccttttattcccaatcttctaggcctgctaatgttcctgaaggggcccatattcagtgggagatagagcttcttggctttgagatgcctaaggtaaatttatttggcaataatgaaatttggtgaagcgctttgtgatttgtaattcttctaattttgtatacagttaggttatgtgaagacattctatttcttcattagtttttgtggcatatctcataaataattgttgagtaatataatggaattattaaaatcattgttgcaggactggactggtatgaattttcaaagtataatggatgatgcggaaaaaatcagaagtacggtatgtatttgttagaccctgtgatagaaccagtagggtacagcagtattagtaacacctaacatgtatatatagttaccccatttttccatttttggatatggggattgttgatatctgacagtacttttaattctagggtaacaggctcttcaaagaaggtaaatacgaacttgcaaaggccaagtatgacaaggtaatgtatattttcacttagcacacacgatatagttaatcatttgagggtagttgaccatttcttcataaacctttttatatcttagaatgcaatgcatcatgccataaatatgtttactagatttgcttagaaaatgtcttgtaaatggtaacattctggttctcttggcagttcctgttgataggtagctgattctcctatttataatgctcttggctgttcgtctttgtgcttcaatgctttaacttttttttttctactaattctcttattggtaaatattctgagaaatcagaaacttattttgtttggtttcattgttttttgttttttttttcagatgagtttttattgagcttgctgttattatttttaagttatctcatgctgaggtagttgctgtacaggttcttcgagaatttaatcatgtaaatccacaagatgatgaggaaggcaaagtgtttgtagatacacgtgtaagtacttttttatattgccgatcctctttgaaacttatttacttcatctttacaacttccatcaacctatttgggactgatttgctcgttatgtttgatgtttgaagaatttgctacatctgaacgtggctgcatgctatttgaagatgggagaatgcaaaaaatcaattgagacatgcaacaaggtatgccttttctcgtctgttacgttgagaaattttatcaatttagaagctattcggggaatgcatgcccaacaaaattatttttagggtgcgcagttccagttatcaaaacaaggaaataacatttaacatctattagaagcaaaaactacatctgttgtactctttaagtagtctcctgttttctgcatgtcctagctgagctttaatttgtggtggtgtgaacttgtctaaagagaagatgggatgattttccttattatatcattttggcctttgggggtgacaaaggatgggatgatttaaacgtcgtcaatattaacttgtattattattgttcatcagaagctatgaagactcacgtgatgtggtttaaatgagttaaaacttatatttcttgttgtaatatgaacttctaaattctttgggaacattattaacaagtcaagatgggtgggtctactagctattggtttatggcctaatgcttttaaaatgttttttgctgatggaatacaggtattggatgtaaacccagcacatgtcaaagctctttaccgtcgtggtatggcctatatggaaggcggagattttgaggaagcaaagagtgactttcaaaatgtttgtcttcttatcaagtcgtcaaatttgttattatttaagattcattcttgaatatgtataattttcttctggatttaatttttgcagatgataaaagcagacaagtcttcagagcctgatgcaagagctgctcttctaaaactgaagcaaaaggaacaggtaggaataaattagatatccaatgtatctcaactcacaaagagcattttctcttctttctctgttctttaatttttttcttctcgccaaatggtgagagcaggagacgaagcagaaagttcagaaacagtttagaggattatttgacaagaagccaggagaaattgcagatgttggagctgaagacataaaagataagactgtagcaaaagagccaaataagggtgaggaaggagagtcagatgacaataattctgaggattctaatgaagttgtcgaggatgtgcgtcaagcgaggtggttttcattttggcctagcgggagaaaactcttttcatcacttggcctggaaagatgtacaattttgtgatcaataaggggaataataatgacactttttggaattcaattcaaatttatatattagttatattggttctgttaaatttgttcaaagagagtaagataaaatataaacaacttagatcaaaggaagttacttagttcactaagatgtgcaaaatgcacgagtttgttaaactcttgttgctttgtatatacccaataagtagcttaatagttgactgaattctttgtatttttatttctatatctttttcattcttgcatgtttgcttaggtaggatttatcattaaaccagaacacaacttacaataggaaggttgagtccaaatcagcaataggagtagtaacataggccaaaaccccattgcaaatagccgatgctttacaatccaaagcatacttatcaagacaatgaatgagaaatgaaaaggttcacgtagaaactaaaactagtcgaatcaaaattacagctcaaatttttgatctctgtcaggaagagtacatgtcactgcagttcatactttcagaaattaataagatgggttgcattcaaaccagatttaatggagtggtaaaatttgtccaattaaaattagcaaaataatctttttttttaattacttttattctacacttaactcattttaaaaattaatttaatattaaacaaaattaattaaaacctcataaatactaaccctaattttttttttacagagaactcctctttctttttattcttcttctcctttttctcctcatcctctttcttcttgctaataagacgaaaaagaccatgaatggttacaagtgaatcattcttcttcttcttcttcttctcctcctcttctcgtcttctttcttcttcttgctggtaagaccaaaaaggctagccattactcatgaatggtggcaagtggtagcagccatagacaaaagaatttgagattcattctaa

SEQ ID NO: 21249 - DNA, 1876 bp, Cannabis sativa
taatctagataaagaaataggtggtttgagagatgagactgttcaaattgagaaagagattaacagagttggagattccatgtctagcaagatgaacattcttcaaaacaaggctgatgatattggaaatgtagcagggctttcattggaaaaacaaaaggaagttcttaaagggcaatctgaagctcttaatgggcttcagtcgctcactcaatttcagtctaaagctctagaagagagcaggtataacattatcactattcatttcatcaaatattgtttcttttactcttaaaatacataattgtttcataatgtaatctaaattgcagggcagttatgcagcagttggctaatttcggtcatgaacaacaggaagagcttcttcagcgacaggaaaagcttcaacaagcacatgatcatctggtcgagaattccaagtccatgttggctgctcaggtaaatattaaagaaaacaaagtaaagagatttaaaattttggctcacaaacttactctatttcattcttttctttatgggcaggaatcttttgaacagaaacaagcagccctttttgtagctctagataagctatttgcgttgcacaatgccttgttgcttgagtctaggctaatcaaggctttcttcatttattcaatttcaatgtttgttctctacttgttcactagtactaaacaaacatacacagtaagacaccggctttatcttggtaagaactttcattttatttcattctttttgcataaaggttttgttcaactattttttatattttttttattattatttataggtctttgcattacattcttgattgaatttgcaatacttcgatttacaacaaatggtattgagcagcaaacatggttgatcaatctagtgagaattctttttctgcttgttgctacggttcagatattacatgctattttcacatacaggtaaatatctaacgtaataattcatttattttggacaaatacagtcaattatactaaaccttgtgttatgacaatgtacagagattatgaaatgctgaactacggaatgctaaaacagctcacagaagaagttcgtagcctacgcaaaaatgcagagctgagttgggaatcagagagtgacattgactggtcaacgtgggttgaccatgaaataccagatgggatagataatattattcaggatccagattatatgattggatttgaagaacgagttggagagagttcccacgaggcttcttcaactggttctaagtataatctccgaagtcgtaggcgtcaatgaatggtttcattcaccaatattttgcagaggcttatttacaaatttattgtgtttctagaacctaatgtaattttcttttctctttcattttgtcataaacctaatgtaaagtttcgttggcaataaaactcgtaaaaaactttgatagacatcatactcattattaacatccttttcataaaataataataaaaaaaaagaatgcgaatgtatttgtaaatttattatttaatgcccgttggtgtactattcaaattatatattgttgcaaattcaaaacaacaacaacaagattcacaatatttcaacacaatcaattaatttaatggaaacaaattatcaaatacacaataaagttatataattagaacttaattcaaaagatatgaagacactaaatttattttggcttcgatactcgagatcatgatccttgaccattttctagttgaaaaatatcatcactattacaaaaagtattttttggctcggtcaacgcgtctcaccataatagttgaccgaagcaaaaaataatgagagattttttgctttagtttatgtctgaagc

SEQ ID NO: 21250 - DNA, 3826 bp, Cannabis sativa
tagagatgatcagatgacaagtttcttaccatctcccactgtaagaccttaaggacctgggtaatactgatgaatccaaattttcaaggccatgagtcatatgattggtagcactggtgttcacaaaccaccctgaatcatcacaaaaatcaggtatgaacgatgtggaaaaagcttgtggatcataatcaaactcatgttctgtgatgtaagctcgaggagagggattagttgcggctgttgattgaccagctgaaccaggtttgggtgtgacccaatttttgtcaaacctgtagtgacaagtaggtgttgtatggcaatatcgaatgcataattagcacaagggacgatttagttgaccacgaaagcctcctctacaaccattcttgaaaccctgtggaggacgatagggagtgtttcttgagcttgtgaaagctacattagcttggatcttcatcgtaagctctatcatggagttgtgatgttcaagacgactctcatgagatagtaacagtgcttgagcctcttcaaatgtgagaacatcacttcatgcggtcatccctgataccactggattgtattttggtccaagaacgtttaacaactgtaggatgagatcttgattagaaataggagagccagcaatagccagagagtcatttatcgactaaatcttgtcgacgtagtcagagacagtttgtccatatttgtgaattgtggagattgattcttgagttgaagtaatctagcttttgactaattagagaacttttgttcaagcgcataccatactaaatgaggagtaaaagctcacgatagaggcaagaacaccttctgtcatcgacgatctcaaccaggacaaaatcagttgatccttgtgcttcagggttgggttctccagtgatcaacgtggacggcggaggaatgccaataagaaagatctgatcaagattgtatccaatcactgtaggaattacttgagatttctaagacaacaaattagtgcgatctaatttgacaatcaaaacaggtgagagagctagagaatgggttccagttggagttcagctggtgtggtggtacagcagttgtcggcagtatgacagtgggagctggattcagatcgatggaagtggatttcatggatgaagttagtcgacggtatgaaattcaagaacaaagtaagacagagaaaataaagagagaattctgagagagaaaacataaaacccaaaaactgaatttgtttattgattcaattatgcttatatacactagaaagataataaagtggtaaaataaaatttgatacaacacacatagcacattctgttgtaaaacaattagactaactaactgtgataacaaaattaactacttacactaacagttattaaatcacatgcattttagcttaaaataaaatattacattttacttaaaatattgaaaagatgttacgatagagagtgacagtatgctcgccgttcaagccattcattctactcaacaaatgtcttctgtgtttggtttagttgttaatgattgcaaaaatttattattctctctttttaatgttcatttacgttttgttagacgatcagcaaatcgagctgcccactttgttgctaagcacactcaatccttatttggtcgtagcattctaggtacttctattcctactgatctctaaactattttgtacattcataatgctaaattaatgaagttgatatttagggtttatggtttatattatgtatttaattttatcacaatatatttaatctatacatattatattatttacaacaaataatataataaatcacataaattataaatcatttaactcattaatccttttgatatagaacctatatagctaatatatcttaagctaacacacatagtacactttttttattattttattataagttgataagataaataaagtttcttatgaagattaaagagacagaatatgagcacaactagtggaccatcatcaaggtgagggaaagtgggtgagaccgcgcccattattgttgccagattattggaaggtacttttaaattttaattgataaatctaatcttcttggttgtgcttacagtacgagtgccaccatatataatatatagatcaatagcatttatataaccctagcttagtgattttttatatatatatttatacatatatgtgtgcgtgtgacaatatctgtcagcctgtgaggctctaattacatataattaataagttatatataatatatagtatgtctcctctacccccagggacaaggccatcaaattaattacaaaattaaaggatattctaattagaagatcaaggaaatgtttgtttttaatattcatctttaattaggtttttttttttaattcttttgtagtatatttcgttttcacttgtacacgtaactaaacatacacatggcacaagagcttttgcagtgcgtaacctgtgtttattattattttttttatatatataattaatataatatatattttatttgcttaatgcagcaaattagaaaagcaaagaatgttaaataactaattaattatatggacatggtagatatatagctatatatagtattatcgatattgaatgcgtgtcacatatatcatatagaattaaattagctggttagtattaatgttttatatttagctaatgacgttttttttaaaacaaagctataatggtttgttgaaaacatagtttatttatttatatataatatatagacacctactttctataactggtaataataccatcgctctattaaataattgtacatctaaaaaaattgtaaactattaatcaatcagcgtgaatatttataatagtgagcttcatgcatggcacatgcatattgcaaaagaatctttttgagtgaagtaattaatatatattaatattatacatacacacagaggagttgttatgctggcaagatagaatctatatattataaccatagcgcgtatgtacgtacgtactataaataaagatgtataaagtttgttgttttgggtttcaattaataaaaaattaggtttattatatataataactaaatttgtcaagatgtatatccaccacggcaccacgtacatatatagacatatatacacaaattttttaagtgtatattatatacgtataagtatcgctacggcatatatattaataatataaatattataagaattattaaaagttattagtgattttcatatattttaatcaaataagtaatattaataattactaattatataaaatgctatctcatgtgatattgaatatgttataataactataaatatatatataaataataaactatgatcattatattagcatatatactatatatctatcaaattaaatatttgtttgggagtttttgagttggcagccaattcatttttcttatggtatagtgtatttcaattttttttagaaacctagagatgagaatataaatttttttttatatgacggtatatatatatgagaattttgaataatttatgacattaaataaaatttaaaataatcaattgcatgggtattaaaaaaattctaatgagcaccgcaatatatatatgctccaaaaattaaatataatgtgtatgttatgttttttttttaaaaaaaaaaaattatgatgagtttatcactagttaaaaaatattgtcatattgtcactactaaatgtaatagtttgtatatttttttgtgtgaaatatattgggcactaattatgttatcttatat

SEQ ID NO: 21251 - DNA, 5109 bp, Cannabis sativa
tagacaggaagcaggtttactcaatggaatttctatctctaggtctgctccttctatttcccatttgttttttgcggatgacaaccttattttttgtgctgccaattgaagctttcatgatgtctttaatatttactcaagggcttcgggtcaggctattaacttctcaaagtcctctatccttttttctcctaatactcagcaagacattcacactctttttttcaatactttcaatcttaaagattgacttttttatatgtaaatatttgggtcttcctcaatgtctttttagatctaagtatcatttatttacttttctgagagataaagttaattctgtggttaggggctggtctgctaagcgtttctctcaggctggtaaggaagtcttgctaaaggcagtcattcatgctattcttgcctatgctatggcttgttttaggttgccggttaagctgtgtaagggtattgaagctgcgatggccagattttgatggggatctactgggaattctaaaaaaaatccattagaaatcttggaaatatctgtgtcagtccaaatttttttgggggctgggttttcgttctctaaataattttagacaaactatgctagctaagcaagcttggaggatctttaaaaaccccacctctcttcttgctttagttctcaagaccagatattttccccgtacttcttttattaaggctaaccctggccataatccctctttcacttggagaagcattctatagggaaatgacttgttaagtttgggacttatatggaatgttagagatagaaaccatattagaactatgaaggatcattggcttcctaataatagagtcaagttctttaactctgatagtattccttcatcctcctttctctcttattttatcaataactttggggattgggaaatttctaaacttacaaattgctttgatgaaactttggttaatgatatccttaatgtccctgtttcgggcttgcaaggcaaggataaaattatttgggggcatgatagttctggggtgtttagtgttaaatctgcgtatcacttaactttctctaaataggatattccctcttcctcctcttcttccaattctaagaaagtttggccaaaaatctaaacttctaaaatacccccaaaagttaaagttttttgtggagaatgttatcaaatgccattcttgtagcttcttctcttcataaaaaatgtgttgttgactctcctttgtgtcctctctgtaaactttaccctaacactgtcaagcatgcactttagattgttccagatcgataaaagcttggaaatcatcaaagtttgctacatattattataaatttaagcatataagtttatatgatattttttcttagtactacttatgaattggataaagattatatttgtgtcttttactgttttttatgggctctttagaatcaaagaaataaaatctttcatcttcagcagtctcttcacccgcatgatatttttgattggagtgttaatttttctttaagtacttggatgtacagcaggttcctgcctcatcaagtgctcttatcacagatcagccgactctgcaagagactatttccgtggcttctttccaaatttttacttatgctcccattgatattaaccgcaagaaatacatcattggagctgttgtgttgaatcatttaaatcaggttatagctggctttgcaaagccctttacaggatgtgtgccccctgcggtggctgaggcaaaagcaattttacaagctttacagtgggcttcattgattcatctccctgtagatgttctcaaaacaaataataaatctattgtggataagttaaactcttgtaattggggctctagtcttttgaatgatctcctgttatgtattaagaacttattatctttctgtccaaatctgaatttggtccatgctagaagggagtctaattctttggctcataggattgctaagttgggtcttgggcttgataatgagttagtgtggaatggttctttaccttccctttagtcttgtgtgtattgtacaattttctttttaatgcacaagattttaattcaaaaaacaaaacttgaaataatagctcaatataaatattccctttttctttcttttttatttgagtggctatttagaatgaaatgataatatgaaatattactctccttattttgagggtttgcctttttttcaatagaaatattattccttaataatataactaatctttagaagggtaatgttgactcttaaaaaaaaaacggactttaatttgaatagcattattaaattaataatttaatttaaatagcaataatttaatttgagataggttttttattttattttttttttgtttttgaaattgagttacttttatgttattggccataatatatatatatatatatatatatgcatgttatatataagttttatacggatggtttgcataaataacatatcgaacaaaaataaatgatacagtgttaaaatatatgtgaatgttcatcttcattaataaaatatataatgagattttatatttactaattaatacatatataatattttacgaatactgattttatttttatgtataattaacattaaataaatataataaaaaattattttttactttatattaattttttaaaataatatataagatttttatgtccataatgttattaatttaattagaatatgattatatattatcttacataattagatacaatttatacgtttctttataattatattctatcaaattattttaaatacctcctaaccaaacacctcaaagtgtaaatactgattaccttactgttagtgaaagtagttaggtagttaggatttagttattttactatacatgttagttatttgccagctcactttttctaactgtattttgttagttgtattaagcttgttctttatatataaaaaacatcagagagtctatgatttaacacagctcatttcatcaatctcaagttggtatcagagcttcttggttttttttcctttctttgcttgattcaacaatttgagttcttgaagcttctttcatggcgtcttcctctggtcttaggcctgaaggttcctcctcttccgctcctaacaatactcaacagacttctatagtgtagataattcttaatcacatcgtgcctctcaaccttcggttggatcacaataattttttctactggagatcacaagttctatcgacagtgtgcgcatcagcttgaatgattcatcaatggcgatcatcttgggcctcctgccaccatcatcgatcctattaatgcaacaagatttcttccaaatccagaattggctgactggatgcgacttgatcagttcctcctgagctggctgttcaacttgatatccgaaggaatgtttggacatgtggcccattgtgaatatgcaccacaactttgggaagttcttcgccaacttttctcaaatacctctcgtgcacgtgttttgcaactcagaggtttgcttcaatcaacaaaaaaaggatctacacctattgatgaatatatcctcaaaatgaggtgtctcggtgatgctttaatggctgctggccacataatttccgatgacgagttgatcttgtatattcttgaaggattaggcagtgaatatgactctgctattgtcactctcacctctaaagaaacagtctcccttcaagaagttcaattcttgctacaaacacaagaacttcaaattgaacaaatggcatctattgctaccttggatccgcaaaatcctaatgctaactgtgctgcagcaaacaagaaaggacctccattgcatggttctacaaataccagtcgaggtctccgttatgttaggggcacaggaggtcaaaatccaaacaatcgtggacgcaattgccccatttgccatgtctgtggtcgatttggacacacaaccctgaaatgttatcataggtttgatttgagctatcaaggtgaaggaagctctaattctcaagattcacccctgaagaaccccaagctatgcttgccactgcctcaagtgtgaatgatccctaatggtacctggacagtggggcctctcaccatgtcaatgcacatgccactgctttgactgataaaattgactacaaaaggaaaggcaaattcacagtaggcaatggtgcttctctctctatttctgccagcggtactactttcctttcttcttcctctaaaatcttgatactaaagaatgtcttacatgttcccactatatacaaaaatcttattagcatttcttaattatgtgctgataacaatgttgtcattgaatttgacactaaccattgctttgtcattgacaagatcaagaagcaagtccttcttcaaggaactcttagtcaaggactatacaagttgtctctcccatcatcatccactacttccaatcatgtcaatctctttgtgtattctcctactatgtctttaaatacctcaaataaatttgcttgtactgtttctggttcatgtacaacttctgaatgtattgctacactttggcacaatagacttggccatccttcttctattattcttacaaaagttcttcaagaaataaatacaaagttgcctaaatttgatttacaattttgtgatgcttgttaatttggtaaaaatcaattaatgcattttaatagctcttccttaaaaactactcaacccttacaacttgttcactcagatgtctggggtccctccccaaaccctactgctgaagggtataagtattatatattatttgttgatgattttacaaaatacagttggatttatcctatgaagagtaaaactgatgctcttcctatctttctaacatttagaacctttgtggaaaaacaacttgatcataatataaaaagtttacaaacaaattggggtggggaataaaaaaaaattgcaacctctcttacaaagactaggcatcttgtttagacatccttgtcctcatactcaccaacaacaaggtagagtagaaagaaaacataggcatgt

SEQ ID NO: 21252 - DNA, 1948 bp, Cannabis sativa
ataacaagcgtaaaaatgctccaaacacaattaaaactcaattaaaaaaaatactaaacttaatctaaaattaatactaaaaataacctaacaaaagcctcaagcacatcctagaagttcatcgatgcctgcctcaaaacccagcaacctcggtggccttgaagaagcaatggtgagggcttgggtggtgtgtctagttgcagccttaatcgaatgcgaagcagaacacaaagaatttcgtttatgatatcgaacattcaccagtaaagtttggggatttcttctctctttaggtatttttcctctttggaaatttttaactcagaaattcaaaatggaaaaaatggtgattggtcgatcatcactctatttataaaccaggtggtgatcttaaaaaaatgcaaaagagatctaacggtatgggaatacgaaagtgttgcatttaatgtcgtgtgtgtgatcttacatttaatgatgatatttgcctcaaaaattccactgacatgaatcgtcatcatttcacatctccaggcttcacccgctttttcaaggcacgtagtgtgcatggagtaaaagattcatgacacatgtactttgttctctattccaagaagacaaaaggattgcaagcctctgccacttactgctttggaatcccaagaggttgctttcgttcatagttctgcatccaacaatgaatctgggagtaggttgcaagcctccatgactcttgacccccgaaggcttggggagtaactattattcgcatttctagattaatgatgtgtgcattttccaaagcccaacattagccaaagcaggcccattctaggcccaatcaagtcaataagtcaacccacttacaaagtcaggctacgggctctggatccggatgtaagtccagctggcagacactacaaggttagaccactttagtacgagaaagggtgtttagtttagaaggcgaagggtccatcaagatctacccggattccctcatagggtaatccagacacgagcaattgaagagacatccaaaagcctctgaatatcattctacgtggtgtcctccaaacatagggtcccacaatgttaggagtttgtctcctacatcaggcccatggagtgcacgcacaacgaaaaggcaaccaccttttcatctaacgtcatattctctgacattctcgttaccaacacatagcagtgcatgacacgtggcatcatagtcagtccacactcatacaaacgactgttatctcgtgaattgggcctcacccaattggcccaacatcaatatatattttattttaccccatcagtaggcctaattgacacctcaaaatcctactgggtctggatttacccatactcggatctagcttataaatagaacacgatcccttaacgtaaagtgattggttgggaaatcaattctgagaaaaaggttaagaattagggttcatctgctatgacaaaaacatttgtgtaaagttactatgaagcttttctagctcaacaatattgaattgttgactaaggctcatttacgcctgaaccacgtaaaatcttggttgttctcttctttaaatcatttctttcttaagcttaattattttataatcagtttccaaaattttcattaaacaaactattaataaactataaataacaaaaaacaaccagaaaaataatttcatgaaattataatacaattataaataaactataaaataataaaaaaaataatttattgtttttattggagagatatttttctaaataaaaaagctgaaagcctagagatgaaatttttctatctttgtaatttttttaaagaaaaattggttaattataaaaatcttaaatatatagggtgattatacaatgcacctccttaaaaatgatatattgatgcacccttaatttgtttcggtatccagaagaattt

SEQ ID NO: 21253 - DNA, 14400 bp, Cannabis sativa
ttgcaataggagtttctatataaaattccgtaaaaatgcaaaaaaaaaaaataataataataaaaaaactattttgaaatataaaaataaaaaagccccaatatactaagtaaattttataaagattgttatttttagacccaactcgtttaaaataaaatgcgagcttgttatatttttacttattatgtctccactatgtggaatacagtagtgagtattgttatttgccaccttaacgtgcttaatactatactgatttagtgtgtcataattaattagtgattttttatattatttgttaaatcaaaatgtataagactaaaaatgcacctttaccatctcttatagtgcttaataccttaaaatacctattacctcaaggtttagaacaagtcattaatgttttcaatttgttggacatatattctaaatcttattcatttttacatttagcaattggtttgacaaatatggagaaaagcacttgtaaaattcattcattagtttactgcactgcacatacaaacaatatggtcatcctaggaaccgttcctaagatgatccaaactggggttattgtgttttttttactttgttttaggtaaccccaggaataaaataaaacagaataactaataacaaatcactcaataaacatacaccacctcatttcccggtgccaataacccgttaaaaggccggggaccggggccgccgaaaactctccctacctaagtcttaaggacccaaaaattgtaggaccttaagaaatgtacaaacttttttcttgaaaaaaaaaaaagaaaagaaaacaacctattctctaaagggtaggtagctcattatccaacataaatcaacaactaattgcctttggcagtaaaaacactctcagaaacttaaacaaagctatggcaagttccatctaactaaattatgtttggttcattccaatcttcattgattctctctctctctctctttctgtactaatcttctatgttgtcaagtagtaatagtagtagtagtagtcacagcaaggcattctcttgtgtgcttaattaccccctccaactgttggtgcacaaacagcttcgactgtcagacgcttcaacacgttcggacatggatcgtgcccaaagttactattggatatggttactgcacatctttgtttccctatgcatttctgtgaaaaaaatgaagaatgaaaatgattcaattttcggttctaaggaaagcaatgtaatttaaagtttaaccattttgttaccctttctatgacagaatatgaagcaggtgaatggcatgttccttgttggtaacttccacaggttcccaaaggagtaccgaagctagcgaatttgatagaagcgatagattggtcttgattacaacgcagatgaacctttggactgtggaactcttcggattttccatagctttctatgtgccagttctttattgttgggtggtactcggcgacctcagcgcatacacttgaaactgaccttttcacaagagaaattcttgaaggattacctccaagctcctcgaaaagaaccaatagattctgtgttggcctcaaccaagaccgaggaacatggtacctgaaaaatgaaagtattggcgatggtgattaaaggtagtctcactaattgttttatgttaacatgagatttttcgatttcaatcataccattgttgagttggttgtccacaaccgagctgacacttgggaggtttaaaacctccagcgtaatggcattcgttgcagttaccattagcataagcagtccagtatcttccaatactctggccattaatccatatctgtccttttcccattccttccatgtccaaggcaagcggctcgtctccttcaggcgcattaaaataagtctgcaaagttgaaagagacaaagtttttttaagtatttggatagagtgttcacaacaggaaaaaagatcgcatctttttttcggttgcatagcattaccttgtgccatgtcaatggttgtggtctttgttgagctaatgatccactcatccattcaacagccgaaaattggtttggagagacaagatccatagcttctcctttcagaccagtctgtataaattaaaagcaatgagctttcatcgaacagttcatatcaattttgatgtcaaagtaagtaaatgcattaacctgataggtccacttttgccaggataagtcccactttccttggttgagtccttccagcgcaactggaccaaggattccggtgctccatgtttcatagtgtcctcccacattcttcaaaaaataaatgtgattttcgatcagagaataatcaaataaaatgctatacttttatcaattatggaaaaaaaactaaccggtaatccaacagcgacgctcaaaagtgcaattttgtttattccagcatgtagattgaccttgccattatatgtaaatctcctgcttcgtctcgttccaaaggccgaacctttttacaaagaaaacaaagaagaatgtttttaaatctccatactgactaaataacagaaaatgcatgcaaagtgaatcgaaattttacctgttagctgtccgttaatgaagacatgaacggcatgacctgttgattgaacaatgagagtgggaagttcccctccgtgcaagaacgattcagatgcactgatatcaacactgtttttttgcaaatttgagaaacaaaagagttgcattaatatctacaaacgcaataaagagttttatatctcaaccatgtaaagcattagcactttaagtctcacctagttatgtaccacaagtaatcactagtgtctctcgtgacattaatctgttccaagagacctggagctgtgaatgttgatctgtcatctatagaagaaacatcttcattgtaactctcccatgagaacagttctgaactagttggcaacatttccatcttcgatgtttgaacaccgatctgaagacaaaaaaaagcagcaaattggtatgacattttcttaaagccttttgggggaaagctctcggttttatttcatagcttaatatacctttgcagtgttgaaaactacattccgacaatcggggaggatgctgatggaccaaggaggcaagttataatgcatgttattgaacaacactcttgcagctgactcggtatcataattcgagagaaaagctgcacagtctccattttccgcagtgtatacatgagactagaattccaaacatagcccgaagtcagtaaaagctatataattaactaaacagtgtgaatcttgtagtaaaagatttgaagctaagaacctgttggaaactccccagagaagtaatgataggatcagccgaaactagaggtttttcgcacatcttaatagctttatgaagctccttaagatgaccatacttgggttgcctaatcaaacctatcagaaatagcagcacagcaatttttagccatgcaaaagctcaactcttacaatgtactatcataacagcaggaaatcacttgcagaattaagctcagatatcatttctcaccatattcatctaatggggcatcatagtcatagctggtagtgatgaaagggccaccagctgtacgtccgaaattcgtacctccatgatactgtttcacattgaggaaaacaaagaacaaataagacttgcattatttattttagtaaaatttttgtttccaaaacatgttatagagaaaaatctaaccatgtagtagttaataaatgaccctcctctctgaatgaatcgagcaaccgcaaatgccaaatcttgaactggtctatgatgaattggaccaccaaactctgtaaaccttcatatattttttataaacaaacaaaagatgagttgatttctcatttactaagaatacactgagaagaattgcatagtacaattacacataccagccactccaagcctctgtccaaactagaggtttataaggtttattgggagtgaaagtgtcacagtagaaaccattgcatgtgtttatctgtcaaatgttaattacaacaaattttcagaaatccctcgtcaaaagtacaaaagttgaaagatcatgttttgccaaatcactaataaaataaaataaaataaatatgaagcatgtgacaagtctaagatcagttgagtagagagattatttagagtagttaccactggatctggggcatcttcttccttgcacataacccaaggcactccagtgtccattccaacagccatttttgcagcccaattcatgtagttccgggcaggagggccaaatagcttactttgtactccatattcattctcaatctgaaaataataataaaaaaacaaacttttattgcaaattgacacttatcaatagttttagtgccagtagagctgaacttaactgagatttctccacttattttattctattgaaaaactacacaaagttctaaacttcatacctgagagagtatgatggggcctccttgagactcaaataaatgttcactcttcattaacccaacaatcttttcagtaaacccttgcattgcattctgaaaacaccatataagaagacattttagtataaaatatgtaattttgaaactggggttgcaataaaaattagtgaaggaaaccttaaaaggctcattgtctgttctgaagctgataccaggaacatactttagccaaacaggaaaacctctgtgaaaaaattaagtgttaaaatggtgaattaaactcaattatgaaaattcaaagatgaacaaacatagtcaaagttatgaagatctagctagaaaaagaggagtgagtacccaaaattccattctgcacaaacatatggtccaatacgaaggtgagcatagagaccagctttctgaatggtttttacaaaccttaccaaatcatacctcccttcaaaattgtactgcaaaaaacccaccaagaaaaatacaaagttaggaggaatcttctaagaaaacaaagccaaaaacactgtacggacagtaataatagttgaaatgagtatgaagagaagaggacaagtacattgccgggagaaggctcatgcacattccaaaacacataagtttcaaccacatcaagaccaccatctttagccttctgtatcagatcttcccacatctaaaacacaccccattttcccaagaaaattaggaacaaaaaaaaaacacataaaagaaaacaacaaaaaaaagtagagaaaggatttttggtacctcaggagtgcttctggggtaatgtattgaaccagaaataagaattcttctttgcccattaatcacaatggctttcctatcataagtaacactacattgaatcaattctaaactcaaaacacaaaccaaacccattaaaaaacacagcttggaacaaatgtttatccccattttctctcttatcttcgtctgatacccaattgggtagagtataaaatgaaaatggtcaaaagagtagaggaagaagaaaaaagagaggtaataaagaaaagggtgtctcagactcagagaggaagagataaagttcccatttttcttcttcttcttcttcaactctctcttcactaaatatggtctgagactctgagcagaagggctgtatgtataataagtaatatatatacacacaaaggcaccagctttcactcattcacagtccacaagtgtcgtgggtcgttacacagcgtggctacgaattaagaaaaataaataaataaaaatgaaaactttgtaaaaaccgaatgaaaagtttaataaaaaacagtaagagttaataattataattaataaaaatcaaagctttatacagttcattcattggttaatgaagatttattaactgagttgttaacatgcgttttacagaatcctgtaaagtgtacttttgaggctatttccttataacttgtcagtattccttttgctttagcgccaaattttcttcctaatgtgctttagactaatacttaataaactatacataatgtacatgatgtgacagctttcaatacaaagttttttgtgtaatactaccagtaatttacaaaaattaaaatgtattatattaaaatggtatatttatggaaattaaactaacccaattcatcaaattttcattttcttttttgtttaaatgttttccatcttgattaaaaccacattttgaccaatcgcatgttgccacacgactctagaaatgttattatcgagtcctaatgtaagattggataatagtaatatttcctatcataactcttttgtatttattttagtttttgggacatttttcaattgaaatgaccaaaataaccttgctgtagtaatgacacaaggaaggtgagtgtggctacaccaaaccaaagcatatgtcttcatatcacatttttgctgcgtctgtcaaatagttggctttccacaaagggcatgacataccgtaccatttccatgtgaacaacaaaaccccttttattttcttttcatttaattattttgggggctattctttcatgttcacatgaaaaaagaaaaatatgtgtatatgtatggaatagaactccctccattcctatctttctttcatcttcatatttttttctttgtcactatctttctttgcttttcttcctaacttttttattgtctcaatttaaactcatatcatcatatctatatgtcaatcttcaaccttccatggatctgttatgctatctctgcctaagatcctcatcaaagaccagctgtcaattcatgctacagattacaataatactaatatttttgttctcttaccaatttttattcaattgtgataattctgactcacttttctatgcactactaacatagaaaattttgttagtatcccaataccctcatacacttgtatcataatgtgggtccgaattttttgttattttttttccttcttaaaattaaaaataatgtgtacattgtttacaatctctaatctaacaaagcctattgtataagatatagtatattataatacattctctagaaaaataaaaaagttgaaccctcttcacaatgatagggtaaaagcaccactaaatggatggaacactcatccttggttacaaagttagatagtttttttcggtatcatacagcataattaagtattgagtttcatataattttaaaaaataacttttagagaatatcgctaactaatcatgggacgaaacctataaaaagtattaaacactgctagtacccaataacaatattcttattaaatcaatagtagaattttatcgtacagttattaattattaaaagtttaaaaatactgaattaagatccacacgatgaattataaattaaggctaattaagattattcattttcgaattttggtatgcaaaatcgtatcttttgaatttttgaagtcgataaaaattcacctcaaattattaaaattattgaattcagtgacttctggttaattttacaaatggactcctaacatgatgattgctcatgtaacgattgtgtccttcaaactttagttatatacttaaattgtgcttatgctctttaatatgtaccaaatcgtgtttcatgagctttaatttacgtcatgcgtctggacgaaagtccttaaatctcacaatcttaatagttcaaacaaaaaattctaatatatctgaaaattttagaatactcaattcaatatatgtcatcaattttatagatacctaattagctttaaataaaatatatacaaagtctataatacataaaaagatgtattcttttttctttttattttatataatttggaaaaaaaatccagccataataatattattaaaagtaaattaataaagtgaaaaaaataatttattgggtaccagtagtgaccaacacttttaatagatgatgcattatgattggttagcaatattttttaaaagctattttcttaagttatatgagactgatatttaattacactaataacgtataacaccgatgaaagtactaagcaccagtaatatcttttaacaattctaaaaaaaaatattactcttgccattagtatataatatacacctagttaatataaccaaaaataaatgtaaagtgttacaagtactaatagataaactatagagtatttgcctaatgtatgaaactaaagtcataaaaaggcccaatgaaaatttattaatgttaacatgtatttcaaccaaaaaactatagttagtataaactgaaatatattggtatgaatttcacaccctttcaagaaaaattataattactttggataatacttttgtttgcctttaggtattatcaattatttttaatttgatttttattattagacctacaaaaacaaaaatgggacattggaagcataactttgactgtaaaagtttataagcatgatgtgttgactgatacataacaagtaatactatccaatcaaaacatgccacttcagcaatatcatgtactccctctattatatacctttctttatagcttttaagaatttcttgattggtggtagcagattggctccttactttatgattaatttccttttctcaatatttttcttcttatataattgaaacaaagctaacctaaataaataataaaatgatatgaatgagcttgttacattattaaaatgaataatgtattaattaataaataataacatgcacaaccccctatgcacttcatcattattattatataaaatattaattactacttaataaaaataaaaaatcatatagtccaccaaaaacaaagtcaactagatatatatacacatatattcatggtgggttggttagtcttcttctctttatctttttattaattattataagtaataaactaaaactaaaagggtttgtctctaatctttgttcctttgctaatatatcactttggctttatttttggctctctagcactacttcttatatatacaaagatatatataatctcatatatatatacacatttttttttctttttctttttttcacataaaaattattattcctcggcgtgaagagtggagaaactagggaaattttgttagcaaaacaaaaggcatgaatgagtggggaccttataataatattagtccactcaagccctaattaatttgattactatcatcaacttttgcgcacattacgcacttcgtttaatttagccacccactcaataagatatatgatcttaccccataaatataaatttgattattaatatatatgttacaacttatggtatatatcatatcactaattaataaacatgtatacataaatatgtttgattcatgattaaatgtttcaaactagttctttgtgggacaacaaagcaataagttttttttttttaatgttatattaaaaaggaagttgtgtagggttagtggtgagaataataaggacatacaactcccatacctaaaatctttgtccttataatatatatcacagccccccaaaaaagagaataaaattaaagagaataaaatgtgtatataattaatgaaagtgcaacccacattataattacaatggaattaattgagcagagcacatacaacataagctgcatataaaccctacctagataattacttattggttttatttattatcacttttgattaatgtaatatccttgcttagtgtaatagtaataatatgtggattagggttagacatgtcgtgatcattaattgagttgaaaatggtgatgtattcctttctaattaaaatgtaataaactctttactcatgtatttaattaagttgatgatatttaattcgctatgtatataataagaatgagaatatgataaggaaaatgaaaatggaattcttatagtattaatggaatgttattatgatgtttgttttattttttataataataatgaaaataagtgtgttgtattaataaaaataattccatttcgaattctttcattaaataaagattaaaaagttatgaaattataattttacacaaaagtggtcttgccaaaagtcgaaaaacctaaatctttagccattgatttatgaaataaaatttgagacctttagacattgatttgtggaacaaaattcaaattctgcatgaagaaataatgttctatttatatattagaatcgggttgagggtaaactccgacctgctttgaatgtatcaattaggctcactaatagtgtaaaatacaatttatattaactttgggtcggttagataagactcgtattatgagctaacggtcgtccgtacggatgaggaccacatgatggtgacagggtgttgctcgctgctaactgtgtacagttaatgttgtggtgcgcgcacacttccaagtttgacgtataggtaggatgttgtgtcactaggatgccacataggatgatttccaaatgtgtctttggatgtctctttagttgctcattctgaattaccccacgagggtatatatctaactacgctttgatggacattttattttttggaaaaattgtttttcccaaaccaatacggtttgactttattgcgtctgtaagttagactcgtgttcaaatctaaaactgtgactcgactcttctgttgtagattgattcacgtattatttattcaaaaacatagataacaaaagggtataaaagtctttttacttttatatagatgtaatactaataataattatatgaggtcgtaatacttataatgtaatggtaattacattataaatcaaacaaaatataataataataattttattagaattacttaatccaaattgctttattcaatggaattagctcttattaaaaagaaaacatgatttatcatcataaatatattaggccaaaccacctaggcactaggtccaacacaagtaactgaaaagaaaatggagagtttactgaaattaattggcactgaaaactttcaaattaaacacaattagatcccctttttgttttccttacgtaatatgtactgtgtatttatttggcttacttgcaaagaagaatatataccatgtaaattttgtatttatatatatatagctataaatgttgtaggtatttgtgtttaaagcaagcaatataccatccaataaattgaattgatttcaatagtactgaagtagaaacacacacacacatatacatataataataatatatataatacctctatgtggctcttgttcacttatcatttatataagaggatagtattgttattaagtattagtggtgctcagtactttttataagtttcaccttatgatcataattatattaatattatacttaggagagtactaaacactaataataccccacataacagttctctttatataaatatttatgtctttctgtgccattaatgatcacataatgtgacagattgacaaaataacttattgagctacatgtacagctactcaaacgtgttactaacgtcattacatttacatttacacttccataacaaaagtataaaaaagatgacaattcaattcaaactacttaattaccttgtctttctttgctccaaaatcaaatttatttacttcatttttctcccaaaatttaattgccaaatctcttacatacacacactattcaagactggtcctaagttgtttggggccaaaacaaaataaaattttggccctttataaatattgttctcatcaatactaaatattgtgatatagtttgatgtaatattttttattttaatatatttagttttatgattttctttatattatccagcacattccaccaaaaattgtctggaccaaggtagcacctcatttaggacacagaaagctagaatgaattagactcaataacatttctcaatggtctaggatatattatagttacgacatgcattttattaattttttaaaattttgaataatctattatgaaaaaaaaaaaaaaaaaacaacattcaaaatcaatagacaattgcgtgttcttataaaaaaaataaaacaaaagtatctatgtgtatcgtaaataatttaggtgtattatatattataacactaaaaatagtgctgccacttaattagtccccaataaataatatataatagatcatggagtttgtatttactcataattttatatcattatggaaatagtagaataatatatatatatagggatatgattttgttccgtgatgtactctcattccgtggtacattagataggtctcagggtacattaaatgagtgtacgggtacgtttctactttttaaccctaattacccctagatcaatctcagccgtcagatcaaataattctcttatctgacggctgccgtacatcacggattacaatccgtgaaagtacaataataggacaaaatcatatccctacatatataatatttgatctaatggatacaaaagttactttaaaatattaaaagttatataattgtgtaaaatactaaattaatgttcaaaattaaaagtctcttcctaatttatcaccacaaatgagagtcaattcgaagttttgtcgagcagcacccttgaaatcataagtacaagcatgtgtttcaggcaagcgatgacaaccgcagtagagatttccacaacgacatgtaaaccccgttaatccaactttcttattgcaatatttgcatctatttgttgtaacttttaaactcttaaattgatcacaaagagaattagtaatagcatcattctcatcagtagtagaaatcggagcaataatactagtagtattactactcaagtgaatgttagatagagattcacatattatttcttccaaaataaagtctttaaagcacttagaacacatgtttccattatcagtccttccataaaatccacaccctctaacacaaaaagtccatacatcgtccatagtatgatcacctttgatttaatctcactcttaactttaatgatcgactaatctcttcactaagctaattacttacgttcttggaaatgtttaattttgttgtgtataatatgtatatttatagaggttttgagctaattaatgatctattttgaataggactaattaatacgtgtgaaataatcctacttcgattagaattataagatattgctaattattaaaaaatcaagtgcatgaattaaattttaattggtattatataaattatgtttgaattggtattatatttctattaatattacacgtgatgaaatcatttttaaattaaaaaagatatattataaaaatatgagtacatattatatcgccttatttatagtttattttcacaaaaaaaaaaaaaaaaatcattcgtgttttaatattatttataaatgtagttaaggatttgaatttaaatttgaaattgattagatatttaatttattatcatttttatatcctattttgatctaatttatgattatgaaaatttgaatataaatattattttttttataatttttatttaaaaaatatgtaatttaaattcaaatttaattaatatgtatttgattatgataattgttttattttttataccaaaatattattaatagtgtatatttattcaaataatttatatatttttatttaaaccaaatatataattctcatttactaaatttttaattaataattattaaaaaaacttttatatttttttatttcagatatctataataataatctatctaattatttctattatttttaacttttttgacaaattacaggatctaaaagctaattttaaaaaagtaatttacaataaatatttaaatttaattttcaatagcaaataaatatttaaatttaattttttacgataataataatacttaagttatagtttaggaacgttcgtaggtacatagccattaagtatcaaatcattatccatatgtcattttttttattggtatatttaaattaattttaaaataaaaaataaaaatttaataacatcgaccaaattattacgtggtcattgacttgacacttaacgattaggtatttacggaagtttcagaaatataacttaagtattgtcgcaaaaaaaaaatacttaagtatttatctgcaactaagagttaaacttaggtatttatgccacaaattactttttttttttaaaaaaaaaaaaaaaattatttatcatatttaaaactttacccaataataatgagaaatttgattttctatacttaaaaaactaaaatattttattcttaaaccaatacattttaaactaacaaaaatatgacactttt

SEQ ID NO: 21254 - DNA, 3013 bp, Cannabis sativa
cccccaattagggttttcagttcttggtcttccttgctcttttgacctccgataaaaaatcaacaaaacccttctccttgatccgatcatatcaccatgacagggaaggcgaagcccaagaagcacacagcgaaggagattgctgccaagattgatgcggcaaccaccaaccgcggcggcggaaaggctggcatggctgatcgcaccggcatcgagaaaggtggtcacgcaaaatacgagtgtccgcactgcaagacgaccgcacctgatttgaaatcgatgcagattcatcacgaggctcgacacccgaagcttccatacgaagaggacaagcttataaatcgtcacgcggcccttgccgtcgagacttctaagggtcgccctggtattcgtggtagcctcaagaagtaaatttgactgtattgggtttatctataatcatgatattatgtcaacaaaagggtattcaatatatgggtatgagtaccgtggggtttagttgtttgggctattgggtttctctttgtttgtttctctggtatctctctttagctgttactagtaattgttaagaacaaagtccaaaaaggggtttggttaaatctttcccctttttgcaatttatggtcatctttcatgtatattataatcattatccttttctatgaatatgacgatgactttgcagccgccggctcatcttatgccatatctggtgtttatttgtttatatagttcagtgtgtttcttatgatgctgctgttatattttctctttcaaaatcactgaattgcgttttatcaagagagtagttttcttattgctttaaatgtatgactgtgttaactttgataattggtcaagttgtcatgtagtaacttgtgtttttggctcttcgagtctttcttagaataagattttcagatccatgtttatggtttagctacttgtgcgatcatggtcttacgtggttattttggattttcagatgtttcggaaggcctttgaatttgaaactgcaaatcctatgtgattatttttctagagaatcgtataatgttagcataagccttgcatgaataacctataattggggagctagttgagtattaaactattatatttaactaatatatgctctcattgtttgctataaggtaggaaacatcactggatcaaagaaacagcaaaatccagccaggaaatccctcgtatactaatgtttctgtttatgaaattggtatacttcataatataattatatagatatttgtatacatgcattgaatatattgcaaggtaaaaggctaggagaggggagagagagagttagaggaaggaataaggatgatgagttaaaagagaagagagtagaatgacaattgacaaccactttaggatcgttattcaaaattgtgaagtaaaattgttagtttacagattgaagaggctaatatgatggtatcgaaacttgtattgcattgtttagaatgttatgttagttcaggttttacaatagattgacatgtaaagatcttaaggtggcgtttggttggaggtaatgaaataaaatagaaaagaaaagaaaaactttcattcctctcttttgtttggttgtatattaaagtgaatgtcattccaatggagtgacctttctattattttggtggaaagacaattccattttaaaatggaaaaaagaccattccaatacataatgaaaaaaaatttaataatttttttatcaattttattttttttgcattttaaattttattccattcttattttcattcccattcttgtgatttcattcttcccaaccaaactctacctaatatctaactaaatctatcatcgttttagtatagtattgaagttaaaattttcattcaatggggagccaaggaattgttattccgccaattttctaataattcaaaggaaactgttagcaatggtattattgaaatctctttcagtttttttttttttgtcaattacgtgtgaacttgtaatatgtgaaatatgttgaagatagaaaaattattactcacttcaattgctgtttggagtagagaaaagacaccttagtgaattcttatcagagagcagcagctttagcatcaaggacagaaaagattggaactacatcaaaggaaaaatcccaaactgaatctgttgcgaacaaaaccacctgatgtttatactatgtttggaagaaaggagtcggagtgttcattagagcacattcaagtttttagatctattacatccaatccaattatatattaaatgttaggttttatcatccgatctcatctcattaattaatttcagttatctattaaatgtatttcatgtatatatctttcagaattagtttggatttattacatgttttagatagagttttttggatgggatccatctaatgttttaaatcgaattggatttatttatacacttctcggaagagtgatgagtgggtggaaaagggtggagggagaggtagaatttattgtttagtatgagggagaaagagagtgagtagagttctccctccaaatcttaaaagttaaattcctctattaagtatttgtggcataaatattttatgttttttaatttatacacttatatactatatctttttttaacacattaaatactttaagttgttttcttttatttctgttactactattctgttaaatatatcagaaattaaatatttgtatcacatgttactctattattggtccacatctcaaactttttttttttaaaaaaattattaattcattttaaaaattaaaagtgaattatatatatagggtaatattatggtaggacttagcaaaaattccctacggtagggaattttttttttttactgttgattttagattttgtgaatattatgatgtaaggtatatactcttactataggactgcttgtatacaattaaaactttatacatattataataatatttattttaaaaaataa

SEQ ID NO: 21255 - DNA, 4694 bp, Cannabis sativa
agtgcccaacaacgtcgtccactcactgtaccataacctacctaatcttctcatgctatatttatttttttttttttgaattatgtaggttagattttttcactgattttgtctatatctttttgacaggtcttttgagttttaatcaaggatggttgttctttctcactctacgacattttgttcaggtatatacatcttgttttcccccttttagcatttctcctgagcttacttttccttagtaactgattcagttcgtctcctttttcacaggcttcattcatcattccataaagcccacactgctattccagggcaatatcagttgttacaatggcatcaaagtggtacaatctagatgggtaatttcgcaggagcaatatttggtacgtatgtgtttagttatcatcccaatataataccggtataaaattatttgtggcaggctcaaaggggaagtgattatgttcaaaaatccaaattgggctcaacctgtgttgtgcacatggcaagaagagaaccttatcaatctagcttcgaggataacttgctccacgaaccttttcttttaaccattgctaaagaagctgtgtggtactattcttaaatttaagacattttaataggcctctaataactcttaagcagaacccagttgatgaaattgcatccaattataacaaatttatttgttgattaacacttaattattgctggtgatatttgaattgctaataggtggatgagatctctgttcatttttttaagtgagcagcctggtcaactgatgtatatagaatggccgagcttccctagcacagtatgtatagctagctcagtccaaagacaccgcctttttttattattcctttttacctctatgtgaaacaagctcaatacaagcatgttaattttactaaattttttaggtccttgaactatttcatgaattttaatgggttgaaatcaaatggtgttgtgatttatgtcttacacatcctagaactgtgaatattttagatggtacatagttcaactcacttgtttcgttccttttatgcagctgaagacagctactctgactcttgttctggtagcgttgctaattgtagcactttcctcagtagactctgctctcagctatctcttggctgtccttacaaggagagctccataatcaactgtgaggtgaaccgaagttttggctttagcattttaaattttatgaatctcttgctgttagttagtatatggtaggagaagtaggtcataaagttgtgtcacattgcttaaacagaatattcttgtcctctaattctaggaaaaatttcccatttgttaaaatattgggattttttatggcaaaatttatgtttataattttttgtctgttcaaagtgaaatgaatggacaagatgttttgagtctttatgcatgctctgcatgtgtttttatttgggaaggattctggcattagatttactaaatttctctctatttggatggagatgtgtgtgcctgcaatgtgattgtagttttgatctcattttaacagatatgcgaagaattaaaaaagttttggtttgattatttttattattgttcatagtcgccagtggccaccacactaaggttgccatcccttgtgaaactaaagccaaccatcgaagaaagcctcgatcaaggccacttatccagcaagccttcatgaacattggaatttgcaggaatagaagtagacaagatgacatcaaagctggagattaaacattaataatatggtagaaaatagagaggggggttcataagattctttgcctcgactactgctatggcagatgaattacagaattaggagtaggattctcatggtagcttcataagcttagtgggtttaagaaatatagtttcttatgttttctgcttggatcgttggagaaggaggtcaatgtggatcctgaggattcattgttccgttaccgtatgaattcttgaggccagaagaaggtttgtagaattacttttccaaattgttgttggggtcatagccatcattatcatgattcatgaaggttttctcacatacatctaaagttaatttatctacacaaattatcatgcaaatcatctatggtttacattcctattaaaaaataatttctagtgcctggaaaatcattagttttcttttttgtttctcttataatgttaaatttttaatttctgtgtatgttctagtagacaaactgtcacttgaaattctattatatgtattatttgatcttttaagtacatctcctggaatggtttgtgcttcatgttgtttccttagtagaagagtattactcatttgaactacgaatgtagttatcgtctatttggttcatttgaagttatggatggattttggtgttttgcatctcatcaaaacacatcctcaaatgttagtaagaggtgagattgtccttgtactaatgcagaaatcatagattttttcagtaatgaaatgataaaaggatttatttagccttttaggccataaggcttgcttgtttaacatctcaagtctttggccatcactaaaccagcttttatggcagtaactttatcaactttcgcaattgccaatggcaatgaatctctgtatatgttaagaaaggaatgacaccactccaactgaactccaagatatgatggacttgggtggacgcaccaatgataatgattccaaccatctctaatgtgccaagtttgccacgccaccacgcagaaaaattcaaacttctctttatccaccacaccacccgtatattgcaccaaagcaatcgagtccaactgttttttaattttcctaaacaaaatttaaatcatgttgaaggtcaatactcattgtttttctaattgaattttgaacatggaactaagaacaactaaacttcatattgaaagcattttatataattttttaaataaaataaaaattttgaacatggaatcatggtgacattcctttcttatacgcaactgtatgttataatggaatcgggtccaactgtatgttattcgtgttttcggataggtgcatgtgcaattttgttagtaactacaatgtaaatatttcaggtccaacagcgggtccaaatgaaatattgggtcgaatccataagcaatcagtccttccagataagtaggagacttgtctaggcgagatattcatctagcatggcatacgttcggaagatattaagcagcgcatccaaaagaagtatggtattgattttcatacaattgtttactaaattttgaaaaaggagaaagtagtggagcctacacaaattagggagaaaataaagggaaaggttctcccccaatttttatagggaatacctttctctttcctaacttaacttaatttgtttttattttaattttattaattaaaaataaaaaagataaatatgtcctttaaaaatctataaacagaaaataattacatgttctaataatgtaaattttgtcaaattaaagcattctgattacttttcctagttatataaataaaataatatgattctggttttctttccgaatagtttagtaaacagcataataaaatattgtttccgattattttttattttaaactgattcatttctctcattgattattctgattccaattatagtttagtaaacgcacattagatgtctagtaccaatttctatttatttattactagatcccacaatatcaagaattcattcccaatgatcttgtccgtaagatcatatcttactaaatatagaaagatggtaattaataattaagcatttaatgtgtatttattctccacgaatataggacaaagttttaggcaactaacaacatgatgtggcatccacatcagcatacatcaagtgcctcatgggtcaggcttcaccagataagtccaagttaatatgttacttgtagtcaccccatcagtgggtaaaggctaataagcaaaaaccctaaacactataaatatacgaagaacccttcatgcaaggagttagaaactcattccttaattgctcgggcaaaatatagagttcatatatttttgtaaaccttaaggctttccaattttaaagtaatattattgacccatggactaaggctcgttaaggcctcaactcaaccatgtaaaaatcctcattgttattttcattatagttgatcaatttctttaactttcacatatagtaaatttatttttgaaattttcggtaaatattttggtatttttattgagagctgaagaaagtggtgatatcatcaaaggttatatatgatgaaatgttatgccctaaataaaatctatttcaatataattagatttacaaaataataaaatatcataaattattttatgttacatggttcacattattactttcatgattatatgtttgatgtataaattctattaaatcttgaacatatagttattcgtgattatagtgttgcttacacagtgaaaaataatcatgattatatgcttcaaagtatttagccttatgatttatcagtgcactgaatttacactaacgtgatatcagcgataaagtttacttacacagtcttatgtggaatgtcttttctagggtattagtaaagtatacaagtatcggatgtatggggtatacat

SEQ ID NO: 21256 - DNA, 1522 bp, Cannabis sativa
atataatacaataaaatacaatacaatacgacttaatacgacgttccaaacaagctaatttcttgtttagcattctatctcgtaagaagtgtaaattcacttcaatgtgcttaatgcgagcatggaatactggattgattgcaagagaagaggtgttgatgttgtcacaccataaaacaggagtgtgagtaagagtgtatgccaatctctttgaagatggatttaatctaagaaaacacaacatcctgatgtggaacgacgagtccagtcagcattagattaggcaactatgtccaatgaggagttggagttgaaatcaagaccaaaggattgagtatcagttagataatgtagaactctcttgtgggctgcccaatagtcaattgtaggggcttttagaaactgagatagcttgttcacaacaaaagagatgtccagcctagtcattgtcaaatattgtagagctccaattatacttctatagatggagggatctgataaaggagtaccttctaatgagagctttacaccttggcacattggagtgggagtagaagaagcaaccatcattagttttgtttaagagatctttgatgtacttgacttatgtaaggtaaattcctgttgagtcttgaaataccttaaaacccaaaaaaatagttgattggtccaagtttttcaaggaaaattgatgatgtaggtctatgactgagttctgaaggccccaagcgagcaatgaatgcttaagattagtaaaccagacacaaggggcttgttttaaaccatagatggccttatgaagtttgtaagcatgagtagggtacttaggatctttaaagtctgctggttgtgctatgaagacagtttctttgagttcaccattgagaaagacattattaatatcaacttgttgaatttgccaattttgagaggttgcaagagtgaatattatacgaattgtcgatgtcttgacaacatggctataggtttcaaagtaatcaatgcctgaagttttttgaaagcttttggcaactaaacgcgccttgtgcctttctatacttccatctgccttatatttgatttgaaagatccacttgttagacaccactgccatattaggtgagtaaggaactagaacccatgttttgttcttgatgagagaaatgcgttcagtatccatagcagccctccattttggatgtgtcaatgcttgctgcaatgtaagaggctcagaaaaatcattagtactaatagtatgtgctggtaacactctaggtttgaaggaaatggttttggatctggttaccattgggtgagtggacactgcagtaggagggggattagatggtgggaaggctggtggatctggagcagtaggtgaaatggagtgagaggcttgagctgacacagatgaactggtgggaaatgggggatatactggtagaggaaaaccaggaggtggggagtttgttggagaaatatcagtaggtgagacaggtataggtgtaattgtgggtgtggg

SEQ ID NO: 21257 - DNA, 3065 bp, Cannabis sativa
  modified_base (2178)..(2182): a, c, t, g, unknown or other
aggagcaatactctattacttgagaaaactacctggggaaacttgcgaagaaccagtcccaaatttcttatgacgaacagatcaactgttacagtctcaagaacgaagggcctttgcactttaacagccaccaaatcaccattttctttcaaccggcccttgtacacttgtccaagggatgctgccatagaacacacactatgagcttaaagagttctatgctttgttgataacaattgcaacatctatttatactcagaaatctaccagcagcaatgggggaaggtgagagttcagaatatatctcctgccatggacgaccaagctcctcttcgataagagccatagcgacatcatctgggaatgaaggcaccttcaaatatcatcaaacagaaaaatcagctacagaaatcaaatgagaaaatcataaacatgaagtactttcatcagctttttttttttttggtatgaatcaaaaacccctcaatagaatctgatcatttgcttgggagattatgcaagagcaataaatagaagttttgaatttcaattggttagttgaatacagaaaggaaataatccaaataactctaccttatcacagagtttttgaagctcagtcatcgcacttggtgaaagtatatcaggcctaatgctcaatgcttgcccaagtttgatataagctggacccaaagaggttacaatctcccttagctcaatggctctagcaacttcattctggtgcatcgaagagtaagaagattataaagcatagataataaaaagttcatctttcataaccataatagaagggtggaacctaaattatgtcggacaaagtaatgaattttcgcaatcattcatgaagtctgttatgatgctgaaggaggtgacaaatgtaattattatgttcctattgcttgaccatgagttcttatgttaagtccacagtgatgtaaaccagaatttccgtaaaaaaaaagtcaaagttcaaattgatttgagtgttaaaaaaatgggcatgcatcatgagtgaactgaacgttgatgttatgtatacttgatggcaatgaaatgacttaattttatcacttgtctcagacaatatctccagctcagaaacaaaagaatgggcacacatattacctctttgacctttttgtttatgacatctaatgcaatacgtgaaagaaacccccctgcaacagacattaattggacaatgcgtgtagcaacagcacgtggacgttttccccaataagcagagatgctagcaggatcatataccaaaggcagaaattcactgctttcgtctacctacataagcagaaataacacaaaaaccaccaaccaatataaataatacctttatagaaagttgcacatttagcttactagtgctatacatttgaaaactgaataattataacacagaagcataataactgaattgcaacttggattggatattcactaattagtctcaccctcttcacataaaagctttaatttcaatcatgaattctattccagtattctcaacataatgaggtgtttcaatgggagaaagaactcaaattcaactgaataatgagtaaaagtaattatacctcaacaaggcgaagctcaacattatcctcagcaaactgagaatctcttaaatttgttccacgaagacctctcatcagtatcgccaattcttcgttttcttccatctgtgccctcactcttttaatttccttcgacatatctccaatcctctgcaaatttcaaaaccagtaaagtacaaatactaaataaaactacataaagcacaaattaaactcatctcagttcaacttcactaaccaatcaagcaaaatgaaagcaaaatctcacacaataaataacaacaatcacaaatattaactcaccgaggaaactccattaacagattttgccggcggaggaggtttcgacgatcctgtcggaggtggtttaggttcggtagcgaccgcaagaactcgactggtagtccgtttggggatccgaattcttccgtacgaagaggatctacgggtcgggaaggttcgacgcagaggctcgataccgtagcaaacgaggtgagaagctgcgtccatggcggacgccggaactgtgggaagtaacaaccactgttttagagagagagagagagannnnnagagagagagagagagaaattgaatggagtgaattcagtagtcacagacgtgattttgttgtatgtttattttattttgtagtgggaaacccaagaactggcgggtgatgatggaacacgtggcaccatatggaacaatgctaattggtaagtcagagtcttttttttaataattattattattattattattttttaataaattattttaattaataaataaaatatgttacttggtggggaaaattagggatcgttagttgatttggattatttagaggacgtgacgtgtcgttcttttcaagaaaaatgaacaaatagaagtgtcatttcatttcaatcctataatgttttttacatcaaatcattattagcattcctatgccatctttaatggtaaaatttaaagtggtgttaaatcaatactaacattaaattttttttaaccctcaagtggcatatgtgagtgtctgtcttggaggtcttgattcgagtcttaagtaaaatataattgtaatatataaacatttaaataaaaaaaacattaattttttttttcaattacaacactaaaaattacactaaattttatattatttattattctattattttattaatataataatatatacataattatttagtttttccttaaaaatattatttaattattaaaaataaaaaaaaatagtgtgatcaaaattaataataagtataattttagtgtcctattgaagaaaacagggccgaccattaacccttgcaaggagtgctaatgcacagggcccacaaattaaaaaggcctaatatgattttttaggaattttttaactcaatcttccactaatttgttattccaaataaaaaaaaaaaggttttt

SEQ ID NO: 21258 - DNA, 6726 bp, Cannabis sativa
  modified_base (471)..(475): a, c, t, g, unknown or other
ttaaagattgtcaagttattttatcttctttaagtaatgtttttattggtcatgttaaacggtctgctaacaaagtcgcgcactgtatggcatgtggtgtttgttattggtcatgtcgtcttgtttcggagagtgatattcctcttactcttcagtcttctgtattagcggatgtttctatctaataaaatttattttcattcaaaaaaaagtaaataaataacttaagttaattttttaaaatcatttttaatattttttataaatttcattttcatgttatttttatccaatattaatagttagttttattttatttttatatttttttaaattatataattttttctaataaaattatttataattttgggacttttttagttttacacttcaaaatagtttttttgttttgcatttttacggaattctacatagaaattcctattacaactagcgctgcaacctaannnnnaacaaaaaatcgtatagaaacctatattgcaactagcgcagcaaccactctagaaacccaaattgtaaatttgaaaaaaaaaatgttaaaaaaacagtatatggggtaatttcccataatttttttgctttaatatttaaaatatatttatttttattttataggtatattttttttagaatatgacaagaaaaaaataaaaaataataaaaaattagtacgaataaaagatatatattttatataaaataaaaaatttaaaatgaagtctatttataattttatgggataaaaaaaaattctcatttattaaatatttttatttctattataattattaaatttcgatatatattgagtattttttttcaattatataattaaggattaaaaatgatgcaacttttacttattctaaaaaatagtgcattgttattacacactatgatgtccaatattattataaggtgacaccttaggaatgattagtagttctctataattattattactataaaataagtgatattggcggtaaaattacccgaatttatattttttaacttaaccataaaaattgatttttcgggggcaaaactacctaaactctcattacgttttactttttacccctctgtctaaaaatctcagctaattgtcatgtggacagttgaagtgtatactaatgtatacgtgacacatttttagtagtccacataatattaattattaaaatattataaaaattattcaaaaatataaaaataatttaaaaccctagagttcttggctgaggtaggttttgttccgaccacctcttggtcggcgttaatgacgataactccatcgccagaggaggccttggggtcaatcttctgcgccttgctcgaactttccctgcctgaaattccgcccaacttcctcttgaaggttgattttagcctaatcgacatttctgcacaaacaagagaaaaaagttaaaattgacggccaagttaataaaaacatgagttatcaataataggcctactctgaatgtttggaggagcatcctcccggacaagaattgaagagatgtcatcatcaaaagatttctcttcaacttcctcaacaaatggctttccccttcccctcgataggctgcacgactttgacgagtaggtacctcttcagtgtccatgattgaatgggttcctcgataggcgaaggtccgaccctattggccttggttttcttcttcttcttcttccgggcagcagatggatttgtcagctcataaggcttctcagagaacgaactctaaggcgtcggataaagtccctgagacccaacgtaaaagtaggccatatgtacatcttggcccgttgaaaagtaatggagttggttggcatctttgtgaccatgtaatagtctcaaaggaagctaccaatctttttgacacacttctcattagtatcgatcagccacgagcattcatacttcgagaagtagaagtaccccgagcagtcactgtgcaggggagattttaatttgaaaaaccatttaatatcatgcgcagaaggttcacccccacccttactgtgcatataatacaaacatggtggccaggtatttgattcccttcggcgtgaattgcgtcggggaaattttgtagtaattcaccatcttcacaaagtatgagtgaagtggtaggagggaaccatgattggcatgtgggtcgtaccatgcacacatcccctcacctaggttgtatgaaagttgtcccttgaaaggaagaaaaacatgtacgtccctaagaagaccatccttgtctaaatttcagagatgcctctcagtgagcttggacggtggaaaaatccacattggacccttaggctcttggtgttcaaacgactcagcctcatcaaattcttggtccgtataatcaacacccaagactaagaggcgtccacatgaatcatacagttcgtcatcctccgaccaccaaccaacccctacaaaaggcataagggcatacctatgattgtcaacctggtcttcgatctcttggacttcaggatcctctgtggggagatttccctcactcttagagtctggctcgtcctattcgtgatgcatagccattatttgaatgaactctttgttgtacgagcctatcttacgaacagtttgctttgtgcgagccacgtttcttgaataatgaataactctctaaaggatggtctttgacgacaactgcaatctctgcctcaacctttgggtggaaagaaggttcagggtccacttttggcaaagtgtttggagtgtttggtcaaacaatgatgtccagttggacgacaagtatttcctccagccaaaattgtattccctaataaacatgtcatacacgtctccaacaatctagtctggataggagaaattttggaaaaccaatatctgttgtaaacatcacctataaatagtggagtcactccattgtgaaggggaccaaaatcagttgcttgagtgagatattacgctgctcattttctctgtaaagctttcgagagaaatcaaactttttttgcttctccactcacaagttaaatacaataaaaaggggagtaagctattaccagaataatggggctgaacctttataacatatcgtgttcttagttttacttactattgattatattctctttaaatcttattgatttcttgttgctttgaaaggttcagtgtcgttggttaaaagtgaaatcaacaacatgaacattagttcatgattactcaggattcatggtaatctatttttgatcaccattgtgatatgaattaggtatttatagcaaatgatatgtttgataaagataacttaattacatatcggtccatatcatatataatctctattatatacaacatcttcacttagatgtcgtactatatcaacgattcgaatcgagattgcttgcactgaataacgagcatcagtgaaccgtactaacaaccattgattaaaaattctatagttttaatatttgcggactatattattcatgactaagtgatattaattcttcgtataatgcaagtcacaatctcatatatgaataagaattttttttaatatttatatataaattattcaatataaaatattaataatttaacatttaagtatatatcaaaatatttaactactatttataattaaaattatttttacaagctttttaagacatgaacctttacatatatgcccaatgacaactatagacaattatttgtaagagtagaagacatacatgtcaactccagctaccagggacccacttatgaaaaaaaaaatagaattatgaggcacactcttattcctactctattttttatttaggaaaagaattctccttaggagtttttatctgatccaatttgttattttgctcatagtacatttaatctgcactagatgtgaatttcatattttagatccaatccaatctatataataattcaaattcaatccaatctaatccgcaaaagtacaatttgaatcgattattttttaatatttaaaaatattttttcacataactaacaacagaataaaataattatcgttgttttatgtctccaacaataaattaaaataaaaaattcaaagcaagaaaaaaaattgtacgtataaagaaaaaattaatttaattttaaattatattttccttataaataagaatgaaatataaatttgatctattatattttgaaatatatttatatcgcatgtattagattttttaaattactatttttttatattgaaatattagttgtatatatattttaaaatatatctaaatatgtgtatttgattgaatcagttactttgacatatcaatcaatatttaatccgcacaagtgtgaattttaaattttctaatctaatccaatccgcacaaataagaatacctgaattttgtatattgaattaaattagatcgtgcaaattagatttgattgagtattttatgaacatctctaattcccgctccattaagagtgttattccaagaaaaagtcaccctacttttgaaggatggattagcctaacccaaaaacatggcacactaataggctcagaatgggcataggcatatatggtgcaactcaagtccaagtacttgctataaaaactcaccactaacattcaacattaaataataatttaactttaaatacaaacctaatttattcaccaaatttaaagtatgaaaaagtgtatttgtcttgtagtatacatttaccatgattctttattaataaattttgagttatatctcattaatttacacctagcttagctaagtagctagatacttccacgcctaatttttgtatgttttgagctaaattacatttttacaattttttttgggtgggataggttcgtgtttagtattcattagacttttatttaagtaaaattaaatatattataagtaacaaatatttataacttaattaattagagtgtatgatacattatgatggtatggattcaagttccattcatgacccaacccaattctatgcttaaaaaattattgaaattaattttctttctatttttttatgaaaaatttctctttttaaatttaaaattcgttttaacaactttttattttttatttcgtccctttatgtaataagctctatcattttgttttctatgatccacaaccacatatatttaacatgagaaaaaaattttaatcaaatcatctaaatatatttaataataataataatatatattttactttctgtaaatataatttgatttaaaatttttagttaaaatcttaaaaatagttttaattatatgttaaatttataagtaaaaacgagtattgtatgagggtctcaaaatttaaatttaaatcgttctagatttatagattctcgtgttaaaccctaatatgtacatgcatttgtcgtttatataaatatttaaagtgttatttggatgtgtcatatcaatattagcacaatttaatattgaattctatttattttactttaataataaccataaaaaattactaactagttataggaacatcatctcggggtatattaaaaatacaattacttttttatttgtcatccttgtttatttatatttttcttatgtccccacacttttaataatattaaatattatcaaaaataaaatttagtctttttaaaaatcttgctaaaatattacaaaaacactagaaatatgtaaaataaataagtttagtaagggcatagagtatcattcccattcatctctttgttgtttcctttcccatataggctgagaatccccaaaggcttgtccatatttgccatttcttgccaatttctgaacaaaaattttaatcacctaaattaaaaaaaatcacatcattaaatacaaattactgctctccgaaaaaaaaatcgagaaaaaatatatatattttaattaattagaacatatttgtaatgaaatgagacacattaagtactttatgtgtgagcaccacacttaaaagttgctgaaaaaaattaggagtgctaatcactctcttttgcactctccatatattctaatgacaagtgtcattttttaggtaatgcttatacctaataattagtcttaattagaaatgtatatgaaatagagttggggatgtaatctaagtccgagccaagatttgtggcccgagaccgaagataggttctgagtccaacgtcagggtaccaaaccaaccctaaaagggtaagatgcatgcataacccttggtaagaaactttcatgtcaatgtctgtgccaattaagtgaggaatcttagttgttcaaacaccttttaatgagtttcatttggtcagcaaagttaacaactgtcttgtcgaatgacatggttggtctgttctgattattccgtttgtactggtttgtttgtcaaagtttaaatcttttagtttggtatttggtggctctttgttttcacagtttggtgaatctggaattacatggttggcctgttctgaattaatttttagtgtggtgacttcggtattacttgatcaacatggaagagcaatatgaggcatttacaatacatgatgatgatgaggaggggcttattttcgaagcaggggcggatggcttagcggagattgatgatcggtggctcttggtcggtcgttttctcactaatcgggctatcgac

SEQ ID NO: 21259 - DNA, 1304 bp, Cannabis sativa
aaaaaaaaacagtataaatgttgtttccagcgtggcacagtataaatgaaataaaatggaaaaaatcagtagtgggtgtaaatttcccattaatttatacataattaactctgtattatgatcacttatcttttaattagtagccatttcaattctcttttgcatttatgttattaattatcaaaaaaggagaggagagagggcttagtgttgaaagttttgatttttaaatataagaatatttgcaatatatatattttatattttttttatttcatacaattatatatattttttatagattaaatactttaaataatattttcgttacttctatcactaaatacctaatatataaccgagggtatttgcatataaataattaatattttagattgcatatacttgtataacatatatttttttctagcagattaaatatttaatattacatttattatttcatcattaccagttcgttaaatcctattaaaacagaataagttaacacgtgtcaatatatatattaaacgcccactcatattttcaataaaaacagacattaaataatgttaaaatttgtaatatgtagacaactcacaataaatataactgtattgttttaaaatatgaaatttgttcttctattacacacaaaaataaatacaatttactacttaatacttattcatacaaagccaacaatagctaagctgctaaagcaaaccaaaaaaaaaaaaaaaaaaagcaaagaaagcgcagaagaagctctgcatgaaactgtgttatttcttgaaatagataaagtggaggtgtggtctgcatgagggtgtttgtgggctaagtttggcaactacagctgcatccttttgttttatatacttaattgtctctctattaagtaattggttttcttggagagaggactgctagtgtagtgtgtagtgtctgaaagttttgatttttaaggtacaaagaataagtctctgtcataccaaataaaagaacccaattagaagatacacatcataatcacatgcattttgctctacttttttttctttcataacaaacccatttatttattctttactactactctataccctctcttctccttcatttccctagtatacaaaaacccacatttctctcatcttcttcacacacctgaagaaaaaatatcaaaggagaaaacatctccaaccctccaatccaagtttagtttatagtgtgctttgaaaggtaatgttttaattcttttaaagtttaaaccttttttttcccttctctctctctctctc

SEQ ID NO: 21260 - DNA, 3018 bp, Cannabis sativa
agagcaggagccatctttttatttctctataaaaaaatatatatggcaatataagctcgatgcgaaaaccaaaagcattttaaatttttgaaacacttaacattattttgagaataagttaggttattttactgagaaagtttcctctttgagtccatatagccctacaaaataaaatatattaacaaattatcatgaattatgtgtcaaaacttatatttaaaacattaatttagaaagttgaacataaattaaaaataataataattataacacatccattgcattcattataaaatatcattcattatatatatcatttttccatctataattatttcaagataatgttgaatatatatatatatatatcttatttaaataaagaaaatcttattagttatatttgaattttatttagattaaagtatttgagtcttacacgtggcgcaaaatcagcctcaaggagctcctacactgtgatccacctccttggaccttggagaacaaggcacgaacttccatgaattctcttcagatcagatgacaaaattttaatctttattccaaaccaacaacaacaacaacaacccatcacaatgttccttctcaaagtaatcatcttttttcttaaattttcagtattatttatgatgcccacttattcatttcttcaattttcttcttcagacatggagatcaaccgcatttgggttatatgggtatctcaacttcaccaaatctggtttcatgtaagcctctttccaatccaactctacttaatgttttcaattatgctctttatatgcttgtaaaaatgtctaatttgtatttgggttatgatttgttatttttgtttaatggagttttgactcaatttgtagtgaacattcaaagaatttcaaggcagaggacatccaaattagaatagatggcaaaaactgcatagttacaggagctaattctgggattggttttgccactgcacaaggccttgcttcacggttattttcttatttatccaaaccattatttgaactcaaattatagtattaaagcaaggatctttactttctttcttttgacaatttttgttattagtggggcaactgtgtatttggtttgtcgaaataaagagaggggagaagctgctttatcttatattaagtcttcaacaggaaacaaaaatgttcatttagaggtaactttttttcattctttctttaatttaaattgattgtatatgttccttataagagcttttattataacaaaggtaaatagtgacttaactattcaaaaattttagtttgtaagcgcaccttaatgttagtaaaactgtaactttcgtccagttttgtaagtacatactctattagagtcttaaacttgtaacatggcttagttttaaaatttattgaaagaagatagatactacatgtatcttgtgatttagaagttgagctttatgtgtgttctaagacactaacaaaatctgcactgataaaaatgaacgaaaattacattttattaatattggttacttaaaataattcggtttatgtcggttacttttgagtacttatgctgcaattttttcttataattactaatcaaagcttttttttaatggtaactaactaaaatgaccccaacaattgttatttgatgttaaggtttgtgatctttcctctattagtgatatcaagtcatttgcatcaagatttgctttgaagaatgaaccacttcatgtattggtaatttactttcacttaactcacattatgtttgatcaataatcatagaattctaacaagaaagcgaaatctaactcggataaaatctatggcttttaggtcaacaatgctggtgtgcttgaaaataaccgagttattacctcagaagggtgtgtagagattcctttattggttacaatttttttcacttttgaaaatctgatcctttcaaatttcgcaggcacgagatgaactttgccgtgaatgtattaggtacttatgccatgactgaactgctgctgccatctctagagaaagcggttcctgatgcacgggttattactgttgcttctggtggaatgtacactgcacctttgacaaaagatctacaagtaactttcctcatgaaccattctgttttactaaattgatttgaacacgacgatactaataacattttccattaaattttgctcttgcagtttagtgatggaaactttaatggcgtggagcagtatgctcgaaacaagcgtgttcaggtttgatgaactaaacatagaatttcagtttggtactctttagctatttggttgtgcttgaagtatttattttggttaaaacaaatggaaatttcgatcagtagataattataggacgaatgtgtttcgagttaaggataaagccagatctctcaatagtttgtgttcctatacagtatgcatattgtgtcaacaattaaacttctcatgatgtaaagggggtgtgaagatgaaactgtcattgtcttctcaaccgaaaagtcaagagagtagtaaagaatcttgtgctggtgttttgtatgggaacaaagacaaactgaccatgtgaatttcggttatgacattttgaaaaacaaactctttctttggccatgaatgtagttttactcattcgagtccaacctgtaacttacatagcaatcgttatagttttctttaatgtaatacttatttcttttctaataccattttctttttattaggtagcattaacagagaaatgggctgaaatgtacaaaaacaaagagattggattctactcaatgcatccgggttgggccgaaacaccaggagttaccaagagcttacccgacttctcaaaatcgtaactaacttattcacttttcatttttcttttcacactcgtgtgcacacaattcatacatgaattttatctctgttcttgttgcagattttctggaaagcttagaacaagtgaggaaggtgcagatacagtgatctgg

SEQ ID NO: 21261 - DNA, 1739 bp, Cannabis sativa
taggattatatatagatatagattttgagaaaagtaaagatattattgagggacattaaatacagaatttatttgcaacaacttgaaaaaaaggaaaaagaaaataaaagaattattttggcaatgttgtgtaataattaaaaaaagtgttacaaagttatataacagaaagttctctcatgtattattagaaaaagtgatattgagattatttgtaaaaattgtagggtgatttgaatggataaacttattgtaatggtgagcctaaataatatttttcatctactcttacttaggcctaacgttataacccaattaaaatcttttcattttaaagcaaatgtttttgatatttgtcgataaggccaaatattgtatgcttattgataattgtattgtggagataatggattgatttcacgaatgtatattatgtgcgaatagtttttgtcatttgcaaattatattttccatttcaaggttgaatgttaaagttgagtaattggagcaatcaaattaaaaatctatttttataagtgttgaatcttgtgagtagttgtggtatggtgtgaaataaagtaaggcttactttgtgtttgtctgtctttattttagttccaatatctagtcgagggcgagtaaaggttaagtttaggggagttatggtgaactaaactttttcttgtttatttttttttctttattagttatatgttagtatctttcttgattaagtaagccttagtgattgaagaaataccatttgtttctatttattggatttaacttataaatactgtgtgcttgatttgatttttttgtgcttaaatttagggttttttgtaaaagttgagtacaattggtaaattttactagtaggattttgttatacatgcttgatcggttagaggattggtaagttggatttgatagaacttgcattaattgacttttgaggagatatctttgatgatgtgtgcttttaaaaatgatttaggaattttttttaaatgtcttttcctttcaagaaaccatttttagtttttatcctagtttactttttgagcttttacttgttattctttatttttacgcataccttgagctaaaaaaatgaattgtctaccattgtttctaactatacaataagtatggggggattgtaatgggagaaagtatgttttgttttgtgaaaaataaagatattatttacagacattcaatacataaattatttgcaaaaacttgaaaaaaaaaaaagaaaaaaaaagggaaaaattttggcaatgccgtgtcataaaaaagtattacaaagttatcaaagtaaagtttctctcatgtatttagaaaaaaaaggatattgggatcattttgttaaaattttagagtgatttaaataggtgagcctaaatgacgattttcatctacccttacctaagcataactttataacccaattatgtcattttgatattaaagcacgtgttgttaaaattagtagataagactaagtattgcattgttattgataatcgagttgtggagatgatagatttatttcgagcatgcatattaagttctcatagtttttgtcatttgcaaattatatttttgttttcaagtttgaattttaaagttgagtattgagagcaattagattaaaaatcttgttttataatagttgaatcttgtaagtagtgatggtgtggtgtggcgtgaaatgaagtaagacttgcttt

SEQ ID NO: 21262 - DNA, 2183 bp, Cannabis sativa
catacataaagaagaagcattattaatatatttcatgccaagttcaagaccaccatgcatgcctcacagctcattattatcactttttcctttcttttcttcctttctttctttctttcttgtaaagtaataaatgagtttaggtgcatttttcaacacgtttgtttgtcccttccatgagttgcataccatttgttccaacagtgagagagttaatatccagaataagaaggctctaacttcagtcaacataatcatccaccgatacttgtggggacagtgacaactcaggtggtcttggtctagttcaatgttttcagacaatgccctttcaaaccaaattctctatttcatttcaagctcactggtcataaaatttgaccaaattaaataacatttataaggctactactagctcagctcttagactgccggccggttcaagttgtctaaattttcggggtatctctcccctccctatctcatgtgggtcacaatgttgaccgagtatatgcctttagagtttagactaaacaacgagattagttcgatgaaatcttttcgatggcttggcggccatttccagtcgtatttaatggggttcgttatcaccctaaatcagcattatttattgcccagaaacttgggaagaaaaaatgatttaactaaactgtccccattttgtatagcaacaaaggataaaaagtaaatgattaactaaattgtcttcttgcatttcatgaaatatcattattaccttttaagaggtagagcttttctaactataatttgaggcagacaagggtggttaaaccattcagatagtagtggtgtcggtctgaaatgtgtatccagcttcagcaaaatgagacttcacttgtgcaagtgccctgaaacggtgtgatattttgttcttttcttcctttggcatttcagcataactacaaacagaacacaataaattcaaacgtgatttactgagtttggaccactgagacaaacagaatatttcaataagaagatgaatgaacctacgtttgttcatatccgtcaggctggaaaataggatcccatccgaaatcagtaggtcccctcggtggaacaatcttaccctgataagatcagataggatgttagtgctattgataagactgtcagttatcctgcagtaaactatcttctaaaccagacattcttcatcgctcgaaatattcacagatactaaaggtaatccaatgacagaaaaagagccaaaataacatagataaaattatataagagaagggacttgtgcaccaagagttttgttttccttttctctaacaatgttgtacatgaaatcaaggacacaaaatcatgcatagacaattgggtgtataggagaagggactctttatattgtctacaattatcttgaaaagaagaatcgtgtcgattataacttataactgaacatggacacatgttgtagtgtttatgaacatgtatactggctgggatatgggacattgtctatctcttttgattctgtcactttcagaaaagtttcccgattttcttcaatagaataatatggtttcaactaggagaaaagtaatgaactctttcaatatatctttattgtgttactgttttagttcacacaaaacaaaagactgcatataacataacatgtgttccttccaggtgagctaaagtttctcttcaatgtagggaaagttatgagaccataaaacaagttggctaacattagcagaagttgcaaactaatatgtttttttgtatgttcctcaaaatttctatatctaaccaaacaaaaaaattgaaaataacaatccaacatgaaggatttctttaaaaaggatgtattttattttaaaaggatgaatcggtaaaccaaaattacataaactggcttattacaactgtacttcgttgtaatcaattgtctatgttgaaggtttcaatacgaaaaagttgaaagaaaaaggaagggaagaactaacaaaatcaatccaccaatgcctattttaactagaaaaaagaattgtaagccacctaccggagttttacccagaaatgtaataggttcagcttttggtccaagagcaagagaaaaaacacacaacgcataagctgatttatcctcgtatgccatcagcatattgttgagacctagaaag

SEQ ID NO: 21263 - DNA, 3141 bp, Cannabis sativa
ttgataactaatcagattctaaagagttttatttagggcataaaacccaacaaattttacctggtgaatagacccaagggcctgttcactggcgctcaccacactgggcacggtgttcttaggagactttgcagactcaatggtgagttggattgaagattgttttttattagcattggtttttgttcttttcgcagtctccttggttgaacctgatgcttcatttgttgaagttgctcacttcttggatttcttgttagtaagaatagggctattaagcatatcctccaaatcaagatccatgtctgcgagaaaagaaataagtcagcatttatccaaaataaaaaatcaaaaggtggggagtaaactcccacttagagaaatttaccatagttatcaaacgatgtggaagaaagattataataactactaaactccctagagtcagtgatcatatatatgtcatagggtttattggagatatgtcccaatctaaatcaagatggctcgccctatctgtattagtaccgtattgctcgacaattctgaagaaggaactattgcaataaagttagacatgaaacttaggataccaattatcaaatctacgtgttatgcgatcaataaaaaaattatcccaagtataaaagttatactggctatcttgaaacttacctagcgaggtacactcggtcctaagcacagttggagaccatccacaattattaccttggggtgcttcttcttcagcttcccgaggggccactttattaaggtagtggatgcgagccacataatctctatcttcctcatgtggtggaattaggatttgttgccacttggaaaattttgggttcttataatcgcaggtggattgcttagtgcggacagtcttcaaattggtttcgttcagtagaaaatctactgatcgccctttatgtcgttctaccatctagggagtcgaaattttccttctcgtgatcgctgtcaatacaataagcaaaataaaagcatttaattaataaatcaaaaactcaaaaccaaggttttgagaaaagatgatagttacgtataaggcaaaatgctattgtattgatgagggagagacctgatgtccagaagaattcatccttgaattctattttattaggcaacctcataatgatcctgcggtcgtttgtgtgggtaccgaggtgataaaaaccttatgatcctcacttccttgcgggaaaaacttttacagaataaaagtacacaatttcaaggggagttggacactcccatcccataatgtggtatatgacctttaaataggccacaattttgtaagaactcagaattaactaaaaaggggcaattttgagataattacaaaattccataaagtactctctcagggggaatactactccagcactgatgtgctcgaggcttcaagcgcctattccaggcgagccactagtactagtcccacattcttctcgaattactctttttggtgggaaacagctaaactcccctaggatgacgggcctaacgcgacatcctctctcgtatttgatgccacaagcctttaatatattacccacaaagggagctatagatctaacctcgaattcaatcaattctacctcgaaggtaactgttggatcttgaggggtcattgatttacgagcttgaggagtcacgatttcaaaatttaagtcatctacttaaaagcaacagtgactcaaggtaaaaataaaggtctcgctagaggaatagaagataaaggttggggttaaggccaagctgcgtctcgaagataacgacatttacccttagttatttcttataaaaattgtctgtagcgattgaaaattttagcttgattggtttttattaaataatccctaatcttggcatcgtttatctcaagtatggcttcacgtatgtgagttttggattcaaatggaagggctaaatttttaggatatgcagtttctaggaattccagggttgaaattttaaagataaattgtgtcatatatgcaaacaagaataatcccaatttttggaagaaataaattcaacctaacccagaaatctatgaacctaaaaggcctaaaaattttccttaaccctaaaattatccaggcaaacaaaacgaaaattacctaaaataaccaaacacagaagataaatgaagcaatacattactaagacaagactacaattgtagaaaagaaaaatgttaggaacaagagaatgagccacttactgttttgaagaagatttctgagcattggaaaactttgcgattgggttttctacaactgaaacgatgaattttgagattctttaagaatggagatgtaatcaaatgaaatacgcaagaaataagttaaagacagtgagggcatgcaagtttaaagggaattgatcgcaagttacaggagaaatttagaggtttaaaatttgaaaaatggcaaaatagactgataattttgatatttataccctattgagcaacgccgttagatcaaaaaagactaattaataaatagaaacactacagattggatgagacagaacatttaatgctaataatgtgcctcgaagttctgaaccgccaaaacccaaagcatgcaatttttcaaaattgggctaagataaaaatacacttataatcatttaaaaagtactttttgaggagcaattgttatacccaaaatttggctacacttcagaggttgacatgtgttcgatatcattaaatgcatattaaataacacgtttactaattaaaggttaaatagagaatattcaaaactcattgattttatagtcaatagtgagacaagaatattaactattgatctgagattaacaagacatatgcatgcctcggaatataaggataaaaaggatcattcatccatccgagtggagtgagtatatcaacataagatgcctcgcatttcatacagcaagaagataacctcgcattacaaatatcacaaagagaatgcaacgagatgggaaccttcccaacacttagaaaattttcttatcaagatggacaaggaagataactcaaatcagagaagatataaccttccacgtcagcaataaccatctaaaaggataaaatcaaagaac

SEQ ID NO: 21264 - DNA, 4911 bp, Cannabis sativa
tatattttatattatttattttaatttgttatttgtgacataaaatgataataatttattttattttgttagtagttatgtgattttttaataaatattaaataatttaatatgaaaaaataatcaattcaaaataaccgttctaatccgcattagattgaattgaatccaaaatataaaataagaaatttggcttagcaattagcatacttaaatgtaaagcattgtcttttagtatactacccaattagaaatagggtatctatacttttaatatctttttctcttaaaaatactcttacatttcaaaaataaaaaactctctctaactctctcaccctaactaagtcttgccgtctccaccacgaagtcccaatatccacgagctcaaccaccctgaaatctctacccatcgctcgttttctacattttttttttctaattttctaatttttgcgataaatgtatttgcaatgataggccaaatcttaagttatggatgaagtttagcgatattttgcgtatttagcgatgtatttgtaatatgagactaaaaaatgcatagcacatcgctaatcattgtgaaaacttaagtgtaatttagcgacatttaatgatgtttagcaatatttagcgacatcgagaaaactagaaaaaaagacgtagaaaacaagagatgggttgagaactccgacgatggctggggatttttggggttttggggtggttgagctcgtggattcagggcttcggggtagagaggcgagacttagttagagtgagagaatgagatagttagagagagaggtctttttgaaatataaaggtattttatttcattcctattccggtttttattctcattcatttttctaaattttcattacttccaactaaatatcaccttagtgcggatcgaatgcaatataaacaaaataatacggaacgaattagatcaacaccctaagttaaagtatctccaaaaaaaaataaaaaaataaaaacacgaccttcctaaagtcacctttgttccttgatttgttgaattttgaactgttgggattatcatgacttcatgattggttgacttttttttcattcaactgaggatttgactttttggattctcttcatctcattctaatatataaagcgcagcagcatatattttgtttaatatcaaaaactagaattattacaaagatcaaatcccaagtccaaactttcaaaaaccaattctctcactcacactttctcacaatggatgaagattttagtcataattgtgtatgtttgttgtctatattagcttcaactatagtctttgtcattatcttgaagctaagccaaaacaggaacaagaagaaattacctccagggaacatgggatttccttggataggtgaaacttgggagttttacaaagcacaaagagtaaaccacttgtttgaggagttcattcaaccccgaattgcgaaacatggaaaaatcttcaaaactcatctgatgggatctccaacagtgatagttaatggagccaatgcaaataaatttgttttgtccaatgaattcaagatggtgataagctcgtggccttcgtcctcggttcaactcatgggaaagaattcgatcatggaaaaacaaggcgaaaggcatcgttgcctcagaggcctaataagcactacctttggcaatgcagggcttgagactcttgtccctaagatctgcagctctgttttgttacatttagaccgaaaatggagtgaaaaagaagatattagcctataccgatcaacgaaaatcatgactttcaccattgtttttgagtgcttgttggggatcagtgtgaagcctggaatgttggagacttttgagagagttttggaaggtgtttttgctttacctgttcaatttcctggctctaagttttctagagcaactaaagcaaggtcagagatagagaaaatgattgttgaagaagtaagggagaaaaggattcaaatggaatcaagaggaggagaagaaggacaggaaggagggatgttgctgtctcgattagtcgctggaatgattcgcggcgagatcagcgaagaagaggttgtcgataatgttgttctgctggtttttgcagctcatgatactacttcttttgccattaccatgacattcaagatgctttcacagcacccaaattgtcatgccctcttactccaaggtaaaaaaaaaatataacatggtttcttcaaaaagaataatcatgagactttaacattttatgttttatgtttgttcttacagaacatcttgatctaacaaaagacaaaagaccaggagagagtctaacattagatgacataaagaaaatgaagtatacatggcaagttgctagagaaagcatgagacttttccctccaatatttggttctttcagaaaagcaattgttgatattgaatatcaaggtttcacaatccctaaaggatggaaggtaaccaaacatcctgatcatttaggtgaagatattcattaaattttcaagaaaaatcaatcccaccccacctttttttttctctttttctccaggtattgtggacagcatatggaacacattacaatgcagagtgttttcaagatccttcgagtttcaatccgagtcggttcgatgagccagtaccaccttatgtttttcttccatttggaggagggccaagagtttgtgcaggataccaactggctaagttgatcatcctcatctttgttcattttgtggtgaaacgttatgactggtctttactctatccagatgagactatcaccatggaccctcttccattcccttctcatggaatgcccatcaaaatttcgcctaaggatttaaagaagtgataaaacacacagatagatgatatactaataaaatgttagatatataacaattctttaatttggtacctggtaccagcattcttttgtaatctgatatagtcctaaatattcaatgattttttaacacatgtttgtaatgcttccatgttgatcttttcaagctaaaaaaaataaataaactttaatgtcaactttcaagtttgatgttagtctaatgtcattgatttaggtgagttttgaagaagaaaaagaaacatttggaactttaacattttactatagctaaagctataattggttttctttttctatctaaacttctcccaagattggaaccagattggattttggttaagagtttacatgagtcaaatggatagaatgagaagaaaaaaaatagataccttcatatcctgtcctttcctagaattaaagaataaacactaaacaatttcctctaatggctacaaaaaattggcctctagaaagcaatattatccaacaaaatcattcttaaacatttggtggatctattacacacagagtggtgtctggcaatagcctgtgactggttgtgttcaaacctttccttgaccaacatttcaccaaggatgtttctagtttcctcacctgtaataattaacagtcaaataagcaagactttcaaaatagagctttcactatctgaatatttattcaaataatcatatgtgatatgacaaaataatctttgaagatcttaatttgcaattacaccctgaattcacaaatatttgttattaattccatgtggttgaaaatacagtgtgatttcaagaataaacatatgaaattgttacaagttcaagaactatattacaaatctataatagacccaaacaattaatgccaaatcaataactttcctcttgtatttgacattagagagggaattcgaacatagtttatctttgcaagaaccgaagtgtactccgacaaagtaggctatgcctatgaccacattacaaatatcaaaatcatacacaaacttaacacacttatgtggcaagtgatcttaactaatcattttcatttaagatagatccctctcactttttaaaattggcttgccacataatcgtgcgtccagtttatatgaaatttatgtgtgcacatatcattactcttacaagtataatattgcacgcctgtttggtatatatattgaactaattacaaaagcaaaccaacaaatcaatgacaatttggtcattcatgaaaaatttaaaaagaaaatgtacccaaccgcactagccaaaaaaccatgtaccacacaaaaggaaaataagctgattccaaataccattcactcatgcaccatcttcacataataatgcaaaattaacttattcctaaaaacatgatgtagttgcttaatttgcaaacattattctgacaccaaccatatctaaagattgaccagcataagttctttccctccttttcttctcaaaataaagtaaataccttttcaggcattcacccacaagagaaaccttcatttaggaagtttctttaacaatgatagcaagtcaagcataaacaacaattgttgaagctaggtgttaactaaagtcaagtcttttccaacaatgtccatcaactttgtttcttctaaataaaataaaacttagtctagaaaatcacaaactaaagaaattatcaacaaaacaagaaagatcaatgagtgattccagataacacatattatcaaggaaaaaacgactaacggtgtgaacaggagatccaagagatggaatgaaacattattaagttactaactagaccaaccagagataaaaggagaacaaagttaagtaagcataaaagagaaccaacctgcctaacaatgaatggctcctctgtcagactcaaaggctctgttagaattgttaggaaaccattcatattgccataaacaatgtcagttaagggacgatcacccacctgccacaaacataagtatggtattagtccaatccaaaaca

SEQ ID NO: 21265 - DNA, 2365 bp, Cannabis sativa
tttttatggtgcacgtttggtgaatgtataacttatttaattcaaattgatgggtttttctttgttatacattacacaaaaaagtagtggttagtgttccctctaggcattatttagttctcccgtattatctcctcatacaaattcccttcgtaacaaatctcccttaatgccatcagctcttcaacaatcttaaactaaagaattattacaatatataaatatttcaaaacatacataccaaaaactactcttaaaccattaaaccaagatatacatagagttcttatccttttaacatttcaacatggatatcatgagaaatatcactatggtgatagtgaaatccttctctacagtcacatcaaacctacataacatcatcacaaataaagctccacaactactaatcataatctctcaactactcggccattaccatttcccacaatcagtcttattagcaacaacaacaattttactcatctcgcttatgataatactttatttctcgacaaaacacaaacccatttatctcgtagattttgcctgctaccgccctccagactcgctacgagttacgcactcgaatttcaccgagcacttagaaaggagtggtcgtttcacccaagaaagtgtagattttcaagacaaggtgttgaaaaaatcaggcatcagcagccaaacatgtatgccactttcactccatcaagttaaccccaatctttcaatacgtgcaagcaaagcagagatcgaacaaatcctttttcctattgtgaaacaacttctttcaaaaacaagaaacaacaacataaagataaaccctagagacattgatattttggtcaccaactgcagcctcttttgccctactccctctatttcgtccatggtaataaacaagttcgggttcagaagcaatatcaagagctttagtcttagtggaatggggtgtagtgctgggattttggctataagtttggctaaagatttgcttaaagttcacaaaaactccatagcttttgttcttagcatggaagttgtgactcaaaatggttacgaaggcaacgtgaagtccatgcttttgtccaatgttttgttcagaatgggtggcgcagccattcttctttcaaatcgaaaaatcgacaagcctgccgctaagtacgagcttcaacatcttgttcgaacaaataccagttcagatgataatgcttaccaatctgttttccaacaaccggatgataatgggttgcaaggggtatccatttcaagatcacttattcctgttgcggccaaaaccttaactatcaatgtgtcaaggttaggccctttagtgcttccctattctgagcagtttcggtatggattgtctgcagtgttgcggcgagtgtggcagtcgtcgtcgtcgccctcttcatccgccggtaagatttcaatttacgtgcctaattttaagaaagcttttgagcatttttgcatacatgctgggggaagagctgtgattgatgctcttgaagatagtctaaagttgaataaggaagatgtagaggcttcaagaatgacactatatagatttggtaatacttcttcttcttcggtttggtatgagcttagttatttggaggcgaaaggaagagttaagaaaggagaccgtgtttggcaaattgcatttggaagtggttttaagtgtaatagtgcggtttggaaatgtatttcagaatcaagtgatgtaaatgcttggtcagatagaattaatatgtatcctattgaagtaccaagcatgttcgattaattgttacatgatcgatctaacaaagttgggtgttctcttatatataatgttgtatacttaatattaaaggaatctaattatcttctgttgtgttgggtatgaatcattgtatcaaatcatatatataaatttactaataaaaatacacctcataaaatatataaaatttaatttccacatgaattggtaatattaaataaaagagaataatacttatttaaatgttgactttgccatatataacatattggagggtctcttccaatcttaaattttaggccctaataaaaaaatttattttattataataattgttatttatttcattacaactttaagtaagtatcaatcttctatttaaacaaggtcattcttcgcacactttttgaagcgaattcatcaaccatctcttcataatttacagtctctaaaatatcattttcaatcgcaatcaatgctaatccattaagtctttcttatggtagaccgtaggtaggacttcaacaacttcaattttgaaaaacctctttatgcagaagcaactgtcataggaatagttaataaaattatgta

SEQ ID NO: 21266 - DNA, 3868 bp, Cannabis sativa
  modified_base (1104)..(1111): a, c, t, g, unknown or other
agtaatggtactcaggacttgaatggacaatatcagatgcattctagtgccctctctatccacaaatatacgtattttcgtacatggagagaatcctatgtaaccatatataagttaataatgaagtaattattgagtaatgacccaatatacaagacataaaagaaacttaagaatttcaaagattcagctggccctctttcatcaatttatctgaattaaaacatattttctgttgacttaagtttcactactttagactagttttttaaaataaatgaatagataaatcaataaaatcatgttaaatatatgtatgttgattaaattatcaacatatacaaacctgtagaagtagcacaacattgtctccttcgtatgtacaggcaggaacataaactgcaaatagctcaggaagcccactgctagacaggtaaccatggccaccacataattttctgcattcttcaataccatcctgaaaacaaacatacagtcaaaataagaaacccttgagtcagatgtttgtttatttagggcctggaatgaaatacaagaaaaacatcaaagctactcatgaatcacacaatcccagcacatgccaaaggatgtcaatatttaaatcaactgtaagcctttgatatttgaaacaattactagcttcgccacttcaaaaaacattttaaaacatgaacgtgataaaaacactgatgcatagcttatagagctaaaaagaatatcgggatacacaagcatgggtaaacaaacaagtgcaagataatctctcagcaaacatttctttcagaccatatacaagagatctaatcaactttaaagtgaacaaaagatacacattaggaatttctgatgggaccacttacagcagtggcagaagtagtcaatgacttcaaccccgcagtgcatgcatgagcctcaggcaatgtagagaaatctttggcttgcaacctttgggtcacgtccgtatatagccagcttaaccattcaccaacaaatctgaaagcataagcagaggccaatagagggaagagcctatgttgctgtgttttgtaatcaatcacctataggagagagagagagagagannnnnnnngagagagagagagagaaccaaaagattggtagttaataacgtccttaaacatattgttgaaaacacacaagaacaagactttagaagaacataaagaatacaataatttaacattgtgcaaaaccaatattatgccaatggtagagcacaagaaagctttcactaacattttttttgtaatagttttcacttccccaaaaacccaagccaactcttgctctctcaatccttgtttgctgggaaacccatatagctccccagacaaagtttacagagaaatataccacttccttatctctcttcttgctcgcgctcaagctatctgacctatatggccacacaatgaaccacatacatacaatatacaaaagctacagtcctatttttggaatgattacaccatatgtaacatctccattacagaagtcctatgtcagtttctatatctgatccaaaataatctgatttgatgttacagtcctagttgatacaaatatgtcatcgcaccttgagcaagattatcctaggagtaatatcaatcttcaaaggatagcaattacaaggaaagtatgcttagaattgccaagaggaagagaaaagtctttacaattggagccttaataatttgagtggaattatttatgcactatcctacaaacattttatacgatccactcaaaccattcatacatttttatgacctatgtttcaaattctacaaaatcatatctacttgaaaactcttcaaggcaatcctaaaatttggcaaaatttgcttctctttggtgagtttgagctgactagactaaaattgagcaattataatattaaaataataatcaatctccccgaacatctactgacaactttttacccaaaataataactcaacatacaacagtttatgtgacgtctctctctctctttattagagtagaaatggcataacagtctcaaacaaaataaaacatttaaaaacatacctgggtctcaacaccatccttttgtgagccaaattgtctacgaacagcactgtatcttgtagctatacaaactgcccgtgacagagcacatgaagcatcaagtacaatagctttccgcacaaataccatagtaccataaactagctgccgcggaacattggattgcatatatttcccttctcttgtcacctgtgaaaccctgaaacatttgaaattgaatgaattttagtctgctgatcctagttaagtatccttgacaacatatatatggacatctgaattggaatgttaattcttaaaaaatctccaaaaggttcccttttctttcacaaaccagatgaaattaactcgggatattttaatccactgcagatacgtgttcataattcatctaaaacaaatttaagggcatgtcattggaccaattatttctatataaaaaaaaaagtatggataatctagtttgtcccagaaaaaggaaaaaaaaaagaaaaaaagaaattgcatccaatttgcataaattgtacaacaggacagcccaaagacaattcaaaatgttacaagatttcaaatcaagttagttagacaatatagcactcagtgagaagcataataaaatggaaaagaaaatgatgattaataagaaatgaaagtaaacctgacaaagagcatgtgactacttatgtatgtactagctattacagggtaaacaaaactattcacattgtatagacataaatacaaagaggagatccgagctagagaagcacaaacctcatcaacatttgatcccttgggatgcgcacatgatcaaatctcaataccccattatccatactattgtatgctccactaccaaatttcattccaatatcaccaacagttatgcctggaagaggcaaatgatcttccaaacttctaagttggacaatgaaacctacaaaatggaagcattaaacaattaatatcaagtaaagcattcctcctgcaataagattcaactaattaactcagttcttaccatgcactccatggtcctgaccatcagtaataagacgtgcataaacaacagcatgtgtagatattttgcccaatcctccaggccaccactacacatcacaatcaagggagaaagaaaatataaagtttgagttcatcatagtttttcaatttttgttcttacaaaacgaatattataaagtttattatgagtcttattactcaccttgcttgaagtaagtgttggactattgataatgaactcatccgcttggggatcaaaagtggcagtagtttcaagtccttgaacattagaaccgtgaccaagttcagtctgagcataacaaccaattatttgcatcttatatgccaaaggtaaccatttagcctgctgctcgtcagtgccttgtccttgaatagcaggtacaaacattccctgaattttattcatatgttacttcatgtaaaaagctttatgagaaaatttatttaatgaaataatgtttttaattattattatattatgaggtatttacagtgatacttgagtagcggggtaatggcttatttaattagtacccagaaagataataagatggtgtgcatgtttacacgttgggattttttctaagtgagaatgtcgatagctctatataaagagctgagcttgaggctgtacgaaactaggtgtgaaaaagttcgtcccatctttcttcagtgtttcttttatctatcaaagctaaagcctaggcatcaatctttcatcaattcaagc

SEQ ID NO: 21267 - DNA, 4033 bp, Cannabis sativa
taaaaatgccatatttttctaactttgttatgaaatcccatatttcatgtaattttcccttagtataatagggttagtgaggtgtgaattaaaggattcatgggcttagaaagaaaattaataagattttgaaaaaaaccatttgggccactttttggacgaatattaggagtctttttattataacttcaatcaaatattttttttgttaaaaaagaaataaattttataattattttcttactaaatcataattaatttatagttaatatgtattaaaaaattgataaaatatagaggagtcacggccaccttgaccccctttgtctccgtttacgatgacatgatcaataaactaattaagtataaatattaatgttaattatgaattaataaattaacaatagaaatagtttaaaaaaataaaaataaaaatatagttgtgagtaaaatttaattttgatattttgttaaaaccatgatgattcatgactcactcaaataaagcaaattgatattattcattgttacttaaaacaaccaaaaggaaaattgattatgttgtatgttacttagtcaaatgaaatgaatggcatctcacaaaaatgtaatgatgttcttttgatatttatttgtaggaaaagtacattttaggctgccagtcacagccacagtcagcagtagtaccaataacctagaatggaacaagtcttcaaagtttcattatcattcaataaaaatcttctttttgttcttgtaaacatattaattaaaattattataataataaaaaacacatacatccaaaccttatttgttgacgccgactctaccatttgaaaaacacaacaacaacgttcaaatttatcagtttgacttgattatccatcatacataatccatgaataaactctttcacttagtattactactaactaatattgctttcatggcactattgctttcaattctttgagaaaatctataaaaaagatatacccaaaatttggaaaaagatactaattcttatttgatttttcttcccggacaagtggcattatcttgtggtataattttgattttgatctcatatataataattgtaacattttacttcaaaaaaatctgaataatattttttcttctgcaaagtacccgttactgaatgtttgattattacattggtggactttacatatatatatattttttttttttttgattgcatttagaaattacactttctaaaaaaaaattattttggtagacttttatctatttagacatttttttttttaaaaaaaaaagtctatttttgtttcaagaatatgtatattataattatttagaaccacttattaaatttttatttttttaaactaatttataattttaaaaataattttcaaatattttattacaaaagtgacataatctaaatcaaatttttgacatgaaattttcttgtagccttctttgtataacaagaaattaaatattaaaatttaaaatttttcttttacacgtagtaagtaaatcttttaatcttatttttatcactgtagactatttaaaatttttaaaaaatttacaagcaattctaataattacaacatacagaattatgaagaaaaaaaattacaaaattttcttgaatatcaaaacagataagaggtctaccaaaaaactcatttaaggggtggatgcattactattttttcttaaaattattcagcaacactttattataaattcattattggttatgttaacatcatttactttatattttgtttttatgacacatactgaaatttctcactttttttattttttattgtgggggtagaattttttaaaaaaacacaatgttagccacattttagtaaacattctattattttagttttaacttcgtaaaaaatttatattagttgcagaggtttaaaagttagccacatttcatggactttattgggaaaagagtaatgatatgtgtaaatataaatcacacctaaagaatgtgacacacttttatgtagcaaattagttgggtctattgggaaaaaggctggattaagatgtcttttgtaaagttaaaataagatttggttgctcccaaatcccaaatgagctgaacaagccaaactcatttattgaaatgatgaaatctccctcgtgccaaaatattaaactaactttcaccattagagatggtcaaagttaaataataattaaataataattaaataataattttgtaatatttttgtattaatttttattgttacgttctaatacataattataaatctcatataatagttaattaaaaatataaaataataataattattcaaaaataaatataaaatttaataataaaataataataattataaaaattatttaataataaaatattaaaaataacataatgataaatataaaattatatcatttattgtgattaaaattttgcattatattatattgtgatctaaatttagatcacttttttgttatgtgagttatttatatcaagatttagcacactattaaaatacacttttgaaaagaaagctatattttacatttaaatcacttattttatttacatctccattagaggagattgtagctgccaaacaagaccagcctggtccaacgagacaatgtgattcacggtaagaaataaagataatataaaggacaatatattttggcgtgtaaaacgagcatattgaaaagtgaaaactccttttgcatgaaacctttcttttttgcaaatagtgactcagaaatatgaagcattttgaatctttgattatgcaagaattagcatagaaataactttaagtgatgtactgaaacattaatatgctatactgctattactttgtaaaggggttacaattataattagactaatttgtttttgaaaattttcctacttgttgaggcaaaatcccatatgaaattgaaggctgtaattcacatttgggaaagggagttttcttgctttcttaggctgcaaaaaaaattacatttgcagcagaagtaaaactcacccattgttttttttttttcatctaaactttcttctaatctaaccctaaaagttaaatcatcatatgaactgtcctaatgggattaccaccacgctaatatcatcaattgagccttttttcactgatagctcaactagctttttacaagcagaaagtggctccggcttgtctacaccaatgcataaaggacgaactatatctacagcttcttgattagtaatctgcaaagagaaaacaattatagtatatttagaaacgagagccttttaaacacaacaatgattacacaatgaaaaataaggtaatttgttaccttgtcccacaatccatctgagcctaagatcaaaaactcgcattcaggcttaatctccaagactttggtttctggttcagctataacccattctttaagatgcctatctccaattcctcttgacacagcaagtgaaccttgaattctccaaacaccattgcagcaatcaacataaccaccctgcaaaaacaaaacaatgcaatatagcttataagaaatgaaactatacatgaagaactttacaaattccacttgacttggttgagtacttgagtttaatgaatggttaccagattttcaattcgatccttttcgtcttttctggaaggcctgtgatcggttgtaagggcctcagcaacccctcctctgctcataacagcacgacaatcaccagcatttgagaccaccaggttatgcttttgtattaatgcagtgacacaacaagtaccaccattcacaccttcctttagaaaatccttatctgtagtgagatatccacctttgacagcttccccaatatcatcttcactgcaattcttcaaatggtttactatatttgagtctaagttctttgctacaaattctgctgcactcacccctccatgcccatcaaatacaccaaaaaatgcctgtagttgcagaagataaa

SEQ ID NO: 21268 - DNA, 2683 bp, Cannabis sativa
ggttgggttgggttgggttgggtctaccatggacgataaccacatgtacagagtagtgtacagtggatgtgggctttcctttttgaaaggttctggttggttgtcgggaaagccaaggaaaagaacaaaacataaggaatcttatactctttttttcttagctaccaaagaattattgaacagctcaaaagtaagacctttaaaataaaagtatatgactttttctttcgttttttttttagattaatcacactattcttttatccaattaccaaaatcctgtttcaaaatacacttaagatttttttttatgccctttataaaacttggttaaaaagtcaataatagtggaaaaaaccaaattaataaaaatttaacaaagctgtttactagtgctaaccactaatagtggagcaaatttttgaatttcagggcacaagttgtgggttggccacccgtgagatcgttcagaaagaacatcatttcagcacaaaagaacacagaggaatcttcaaaggcaggcacaggcaacagtgcagcatttgtaaaagttagcatggacggtgcaccctacttacgtaaagtggacctcaaattgtaccaaagttaccaagaactttctgatgctttaggcaaaatgttcagctctttcaccattggtaagaaacaagaataataaaatctagactgcccatcatggattttgatgttaaagttatacttttgggttgataataataatattgcaaaagggtactaatagaaagttgtaaatctcttttgctttggttataggtaactgtggttcacaaggcatgaaggatttcatgaacgagagcaaattgatagatcttttaaatggttctgactatgtaccaacctatgaggacaaagatggagactggatgcttgttggtgatgttccatgggagtaagttctttcatcttattataaatatgatacataatttgtataaatctttcttatagaagattctaatgggagctctcttgattttgcagaatgtttgttgactcatgcaaacgattgaggataatgaagggatctgaggccatcggacttggttagtagacaactaatacttttgagcttaacttagttaattatttaagctaaacgaaacatatttataataagttacttatcaaaaagtactgtttttgtggttttgatttttgcttaacataatgaaatttactcttttatacagcaccaagagcagtggagaagtgcaagaacagagcttgaaactattttttcatgttgaactcaatccaatcctaagtccaacacgatcaaatggaatcaaaccggctcgaatgggatcgagcacggagtttgaatgcgtcttaattgtaccatgtttttttttcttctttctttctttctgttttttgaagcttaaaatgttcaaattatatgagagaaatgtttcggaagtttcttagagacaaggagtaataatatagaagatgttcatattaccttgctcttgatcatgtgtaattttcttcttcttctttcttttttactttatttttttttttttggtatggatttgtctaataataattgtcaatgtgttagttgtcattgggtgctttttgttccccataaattcttttatatggtatgtattattttatgtggtgtatattatatggatgagattctttgtatcgtgcatatatttttatacatagaaataatttgaattcaatttaattgtctgtctggttggttggttgagaggaaaatataactaagattccaaacaaagagacaggatgatacttggccatgtgagctttgtttgaagcatttattcatttctaaataatttaactgcaatgatttagctagtgacacagctagccatgcaccataaattgtccctactggaaacaataaaataagttttataaaatgcattgattataatgcatggtttctatcagaaattaattatgttaaaaactaaaaataaattatttattaaataaactttacatattttgagaaatatatttatagcagactactgcaacttgctaggagttgaagatttatatatgaacatgtacaggaaaatgcatgtgacagtgcttatagcatagacataaaactggggatttgagaaacatttttggcctttctttttcaaagattcttaaaattcattaaagtatataataaacattacagttttaaaaaatgaaaaaaaataattgggagagaaaatcttgtactgatctgcatcataaaatgagggatttgcaagatctctttcaatgtagatcaacagcattaaaataacttgggatttgcaaactttgtcctttcctttttttgagattctttaaagcatttacagtattggagaatatattatgcttaccttttctagtaagcaaatcaataattgtttaacaatgtctattatattcaaggttgtggtggatcatgatgaagagtgaagactatactcttattttctaattggtcaaataattgggatgataaaattaaaattatggatgtgaaatcattaaatggacaatatatccttcaaaacaattttccccctttatttttacttatattcttttttatttttggtatattatgtggatgtataattattgggaaaaaaacagaaaa

SEQ ID NO: 21269 - DNA, 3693 bp, Cannabis sativa
ttgtgacatttcaatatttactcacactggaatatcttacatttgtgtaaaatgttactaaaacaataaatgtcacctaatgtaggaattagttacattttctaatgtcatttatgctcatttttggtgtaactgtctaaataacaaaagacttccatattgattttgctcaaagcagttgaaattcctcaaaataattgcaaagttatgcttgaagtatatatttctgtttataaaaatgatgagtcttttaaagtcaaacacattacatacactttactataatttttacaggtagaatagtacacagtagtaagcaaatactctcatggatgaagcgtattttgatgtcgataaaaatctcaaactccttgataaagtcagttttatcgtttgttattttaaattaaaaaaacaatatcaatataatagtatataatggtatgttcaacaatttattttaatttcatacaccccactaccaattaaaactaaaacaaaatgttctcacaagtgagagtaaaagtagtgttctcacctaagaaaaatcctatatatatataaaaaatatttcaataattacattttgattgtaaatatatatatactatcacctcctcataattcctttatataaatttattataaatactatatatagttataatttcttagttcacatttttattttttattttttattttaaaaagaaactcccaacacaactaattattaattgaaacacaagtgatcacaataaaatatgaattattaatttgacatataatattacaaattatttaataataatattaagaattgcagtcagtattatataatattatttaggttaaatcaaataataaaagtgaactaccgtgtaaggaaaattatcaatcttaagatttacatctttccattttcaaaaaaacaaagaaaaaaaaatgatagatttataattttctaatttatttattggttaatgtaaataaatttatagtaacatttattcctggtatagtaatataataattaagtttcaaaataaattatttttcttccaatatgaatggttcaagtatggagaatttttttttcttcatatatgcttctgttaatctctataagcctcacgaatctcattcaacttttggtgatccaatatttttagattttttacttcaactcatcaagatataacatcgtgaataacaatttaatcaagaatataaaaaaaaaatagaaatataatgagtcaagtgtataaataaaaaattataaaatgaattttatcaatataccatctaaaacacttggtttactctttttgggatactggattctttactatttgacaactatatctgtacgagtcaagaagtaacaataattgttaatccattaattaatgacaacattgataatgttgattcttgagtactaccatgacaaaaaaataaaaattaaaatttgtgataataaagggaaaaataattaaaaattataaataagatattagtacaaagaaaaaaagggaggtatgatgataatgaaaaatgaataagatcctataggcatagcaaatgtcacataattaaattagaagagaaaggaaaagtctctacagttagttaattaattattgaaaaatgaataaaaacatagcaaatgtcacatatcaaattggaagagaaaagaaaagtaataaactaatcattattattattgttactaattatctttttaaagaaaagtaataaactaatcaactaagccacatccataatcaccacttatgcaattgtatattatggaaatagcattaaataattaggaaaaattctcatttatttctaaataggcatcaatgaaactaagttaaggaaatatgcatgcttatgttgttggtgctgcttttagttaaaactcatcacatgccaagcttaagggtatttttaaaaataactttcaagtttccttccatgacacttattatgggcatcaaacgcatgttgatgtggcatatggacctaaggtaataatttttctctttaaatttttgcttcacattggggacatgtgaaattttagtttggtggaggagacttattattttagtctatttgtttgttttgttttattactttgtatgtttattttctagttttctttatttattttgttgttaattaagccaatgatataatgcattgattttgttgttattgttatttacgggatggattgaaaattgtgaactgtgtgcttgattctttgactctctggattaatttagatgcttgttagaaattatatatcgatgtatattgtaaatatttgaattgtatcataaatgttctactttggtttgcgaaatgattgcttgaataggatatatagaacttgcataatttattctcttgaggcgaaattcttggcaatgcttgtttcgaatatcattaagacaatttttttgaaccgtttgagcctttcaagcctacccttattctatcatctctagtttaccaagtttgagcttgatcctgttctaatatttatggccacttaataaagcctaaaatgtgtctattcatttttctttctcttgcaccttaaattatgtcatcagcttaggaataaatttgggagagcgaaatatttgtgagtgatacttttagaaaagtgagtgattgagaagatattgtaaaatgtatagtgttttgcattactaaaaaaagtattaaaaaataaatgaaagagaatattttttgggaaaaaaacaggaaaattccaaaaagggaaaaatattacaaaattactatgggccggcccattcaacatttatacagcccagaatgaaaaaattacaaaaataccacctggtcataccttaagcggcacagaatgaacggagaagatgaagatacctccatcgatcaaatctgcaacgtaaccagaatgaaaccaaaatgagggtaatacaaccataaattctggcgaaaatgattggaaaagaagaaatccactgatctaaacagaaaattacgaaaaaaacaagaaaactgggaagaaactgaaattaaacatttgattttagttttaatcgttcaaaataactcactccaaaatcgaaaatctagattcaagcaatgtagatctgtattaaacagatctggagctccccctctaatccaaaataaggtatgatatgaaatttttttcaaaaataaatctacgtcatatacagttgcattctagttgattcgttgtttacaataggccattcagattcttaaaaacaataaacaagatctgattcaaattaaggaacgatatgttaagtataagcctgtttttattttttttgcattaccttacagttgcaatatcgttttaaaatagtttacaaattatgaagaaatttcacatgacaggaacctaaaaaatagcagatatacaaggtacgtacgatttatgtaaatggttgcaaattagttttataatagttggaaattgatctaattcaaataaaactgatgaaaaagcacaatgaccacaactatgttaaattgggttaattgttgtggtttttgaagttgttttacagttgcatcatcattttataatatagtttaattcaattttttgtaggaatttattttggaaataagaaaaggagaaaacactttgag

SEQ ID NO: 21270 - DNA, 4302 bp, Cannabis sativa
agaaaatggtttcttttctagtttcattgtgaagaaatgaaaggttaaaaaagaaaactataaagggtattaaggtaaataatcaaaatatgcaaacatgaaagtgaagatgttgactttttttgtaaacactgaaattttgtgatttctttcaagtacaatttgaattcttctttttttacattgaacttgaaattttgaagacttttcaagtactcaagaagataatatgccatttcaagtactctcaaatgcatgattttctatgtccatacataataggaaatataacatatcatgatatgaattcaaggattgtattaagactaattgatcataaatctaaatcaacaagtaaaactatgagctataaccagttatatgattttatcttatctttgtttggtttaattatagtagctgtacttaacaacagtttcattgattgcaagagtgttcaaatcataaacactagtacgaattcgtaacataaacctcagatcagatcacttgcaattattctagaatctggatcctatctccctacttgaatcatgaaaaagtaggagatttttcaattcaattgtgcttcatactttcataaaggatagtcacaacgacaatcgaaagaatatggagcagagcagagcacaatatgttttttttcttttgcacattagaaacaagtagtgcaatttaaaatttgcaaaagagagatagtatatagtaccacatttgatagaagacaataggggacaaaagacttttttcttaacgagggctgctagtgctaagaacatccacagaaaaacgattcaatggaggcaatctcatctgctgatcttgagttctgctccttttaaaccgaggctcaggtgatcgagggggaaccaatgcaccaatagcccatgattcattcgagttatcagagctaaacgacgcatcaataactccaactgggcttcctggtaccgatccatgcttgcgtttgtagctttgttttttattgaatccaaggctgactgatgtttctaccatgagttcatagcactggttcactctctcctgtatcattacaaattcacaatatttaagtttaagaaacaagaagcaaaagcatgaatagtaatagttcaaacataacaaataaaagtcatgtgattagattgtgtacctcattgatttttagtacattcaaaagctggttatggtactccactgtattaaatggttcaatctcattgattacgtgcagcattgttgcagtagctaatactgaaggaagatagcccacaaaccttgaatctaatatcaaagtaaaaaagaaaccaactttaacattagtaaaggatagaaccattttggcattaggtaaaagattagatctttggtttacttaccaggaatgacagagagaagaagacgctcacacctccataaaaactcccaatgcaaatgggtctttaaaccaagcctcctaacaatgtgactgaagaatgaaattggggtcactggatgcatcttccacttaagagttgataacaccaaaagctccattctttgaatagtcttagcttcaaataaaaaccttgactcttccacctaaatcacaataaaataagacaagcattatcaaatgaggcatttcatcaaacagatagatagccaaagagaaaaaagtcaatgcatttatatacatacttgcaggtctaaaagaagagggacatcagtctcttccactttagcagccaaagagagacaagccacagcagtgagttgactcatccatggcttatctttctgaaacttaaagcctgaagtgaacctatcaaagtaattaacagcaagaacaacagtcaaagcagagaacccataatgtgctttcacagtaaaaaaccaatgaactgcttctttcctaactgccattaatgattcatctgagcttagatcactgtaacagaaatggttttgttcctctttagttatcaaagaagaaagttcatcactttcccaaaataaatcattttctagcaaaaccaaagggaaagattgttgctttttctcagacccattatcacagttctcactctcttcttcttcttcttcttcctcaaactcatcttcaaaaccttcttcctcacagaacaaggtatcaagaaccattggagggttttgtaggtcttgaacctcatcaaataaggccattttttcttcttcaaagaagaatagactagaataaaaacccaaactttactctttactagtatgccattaaactgaaaatttaaagctttaaaagcctaaaccccaaatacccatattctatatctatatatgtatcagctgagccttagctttgctttctctctctataatctgatgagaaagtgagagagagagacagagagagaaataagccaatgctagaagcaaacgaaagggtttttaatctgagagaggtcttttcacgcctgtgctctttttctttttctttttcttttatattttattttatttgctttctaacccttttcatctctatatttctcttacttgcccatcttttgtttttttttccctctaactacctaacctattctaggcacaccttagtaattttttagttatatttaggttgtttttgaataattgggtaattacacactctaataattatatataaatttttaatatattatttcgtaaaatacttagtaattatactaaaaaataatattttttagtaattaatgtttaatatgaatttttttaagtaattataaagtacaattacactcaattaattgaagaatgtaattggaacccttaattacctattacacaattttataaggtcagacaaatatgtcaaattgtataatcacctctaattatacataaatacaattatatcgtagctttctaaacgcacccttagtatatcacttgtaaatttttaaaaaaattatgtatagtttataatattaaaaataaagttcaaacagttatttaccacgcgtataagaaaaaacagtcgtgtgtgtgcaacaaatatttaaaatatatttttaatattgcaaattatttaaaattttcttaaaatttataaataaccttatataaatacaacaaacacaatcataaaataaataaaaaaaaaaaaacactaaaaaactttcttaaatatcaaactagatagatggtctattagaacctcccattcgggaagtattataaattttccctttaatatttaggctatgtttggtgagaaggtggaagagtatgatgaatagaaatattagagaaaacgggaagtaaaggggataaagaggattgttaatcttatttgtattagtaatagttagtaattacacaaataataattagtaattacatataaatttataatgtcttgtttgataaaatgattaatagttcaaatgatttattttagtaattatttagtataattgcacttatttattacaaaaagtgatatgacaattgaagagtgtaactaaaatctctataattttattgtcataataatcattgaaaattaaataattattgtgaattacaattcacgactgactttacaaatatgacaaatattaaagagtactcatggtgtatataacactactataaagtgatatcaggatcagtcttaagttaaggtgagttagtccacacatgggccaaaggaaagattttttttttttttttttgaagaaaatacacatattcttaagaaatctttaaaaaaaaaatctatttttataaatacacatagtcttatctactattataataaggtccaaaaaaaaattagtttcataagatccaatacaaatgtgatatggttacgggcagggttggccctggtataggcgggctaggtccgcgcctatggctcacttattttaggggctcaaataaaaaaatttccactatttatctttatagtaagggttcaattttttttttttttttgcctatagtctatttcaactcaaggtcggtcctggttacatgtgcaaacatcactttataataatattcaacaccatattatttaaagcattgttattagacatcagtagtgtctagcacgttatgaatgcgtcatattgtaattggttagtgatactctttaaaagttattacattaaattatatgagacttgatacttaattgtatagataacgatactgatacgtaactaggaccggccctaaaatttagtagactataggaagaaaagtagaacctctattcaagaatacacttgggac

SEQ ID NO: 21271 - DNA, 4911 bp, Cannabis sativa
  modified_base (4856)..(4863): a, c, t, g, unknown or other
taacatacatgtaaacataaatcacttcaaaattctatattgataactaatcagattgtaatgggttttgtttagggcacaaaacccaacaagtacaaggcaagcacaccattaaacatgtccatggtcaagtagccatttgcaggggcagccgaaagaggaaaggtttttgagtgacacataaggaatatccaaatggtacgggttgtcatcttagcacaccatatgatgcagtagccacctactagatcaacgatggaatctcttctagcaagaccaacccacaaagcacgtgaatgaagagattgcctataaatacccttacatttcacgagatagaggacgcctcttgggagtctaaaaaactatttttaacttattaaaactttactgaaaattcctaaagagcttcttcttcaagaggaacgagcggaatacataattcaagtacataatgtaaatacttgtaatattcattacttgtcgatcaaattaataaaatagactcatggattaaggataattaatacctgaaccacgtaataaaacttatgtttattatttattgtttattgtcttctttcttaagctctaattaattagtttctaaaaatctcgatacatatctcctcacatgtttcatctcttggcaacaccattattgtgagattgtcctaacattgtgtattgtgggacaatagcgtcacaacagatgatatatcattattaacacattccaatattaataaaaaactatgaaagaaagctaaaattcaagacagaaaataatgtaaaattgattatgtactgaataaattgaaaaatgattacttgttatacatgttgaaaaaactagctccgagtaactattttagttacacttataacaaactttaactaacattttcaacaagcaaacttaacaattttgaaacagcccctcaagatggaatacatatattctataaatcgatctttatcttaaactatttgaattatgttggaaataatattttcgttagaaggtctgccacatgttctttagatgatcaaatgtgagatgtttcaatcagcacaacttggaccttttctctagtttattgacagtgatttttaatatgctttgtcctctcatggtatgaatttgtagcaatgtgaatcgcaactttgttatcacataatagctgaatattttattatgttcttgattcaactcctttaggattgcaaaaaccaaaataatctgacatgttgtgtgtgtcattgccctatactcaccttcagctgaggatgtttaaactatatgttgtttcttactctcttctaggatattagagatttgccaataaagatgcaaaatcctgtagttgacgtctttagaacatagcaagatcccgaatttacatctatataagcacatagcttaacatacttctgtacaggaagcatcaatccaagacaagggttacctttcacatactgtagccctctacctttctcaataattttcctgaataactttggatcggtgagtaactcgcttgctccccgctttattttcaagttagtttctattggcctgctagctggtgtgcatcccagcttaccaaattctttaagaagttgtaataaggtctttgagagatgaaaaagcttatgtcaacctcgcaacttcaaggcccaaaaaataccttcagcaaccaaattatttgagcatgaacctatggtaaagtttgactttgagagacttaatttattctagattgttgcttgttatgataacatcattaacataaacaagtagtgtaataaaattagaaggagattgttttatgaacaatgagtaatatttgatagagtgaaaaaaatattccttaatgaaagcactagtaaattttgcaaacaactggcttaatacttgtttattaggactatataaagatttttggagcttgtacaatgggttgataagtaaagtctccccttttaggtatagtcattaaaaaattgtcatttaggtccctactaagaaaagcattattgacatcaagttcatggagttgccaatcatgactagatgcaagtgtcaaaataagcttgataaaaaccaatttttccaaaggtgaaaatgtatttttggaattaaccccctgctcgctagattagcaagaatgtaataagagttaagtatgaataagacagacaataaatttataaaagttcactccccgtgactcgacggtaatagagctacatctatttatgtagaaatttacacatagatatcaggctacacctgctcgctagactagcaagaatataataagagttaagtataaaaaagacagacaataaatttatagaagttcactccccgtgactcgacaataatggaactacatctattttgagtttttatttttcccgagaataataagaaactggctgagtgtagggctcgaatttctagagagagaaagtatagagagatgctctgacgttatggggacttagaataatatgtcacatgaactagagagctctcattttatagggaaggtggtccatttaaataataataaaaaatacaaaaatttgaaaaaattacattcggtagatctttgccactaatgatgatatagctattaaaattgactattggtgaaaattatcaatttttgggttttgaatttcgtccgtaggattgtttttcggcaatgtgttgaaaaaaattagaactatgttgaggatgaattttggacataaaatattaagaattgcgatatgagtgtcatacacaacttggtagaatgtttaaatagctctgaaatgcaagttgaattacgtcaatcagatcaatattgaggaagttatagatattttactaatgcttgttcagcaccatgtgaccacgttgacaccctgacatcaacttggatatcggataagcaaaaaaaagtcccaaacttgtattttttgatgcctaagaactattttcacacaacttagttagattctatgttctggtgaagttgttcactagttcttgaagatttcattttttgtgaaattaggagactcaaaactccccaattatgtcgatattccaccttgttgaaacagtaaattatcaaactatgaatttgacctataaaaagtcatagctttcatttactatagaaaaatagttcaattctttgaacaaaattgaattttaataagtagaaaccgacgtgtcaagtcaggtgtcaactattggtttttattgtccatattagagttataaaggcccaagcaaaattcgataaaaatagtttttatctaatatgaactataagcctaaggatctcaacataatatatgtagattaaatataaactattatcccaatttttatccacatggcgtggcatgtccacgtaagcaagagcggggccacgtggaatacagcgtgtgaataggtaagccaaatcaccatgcacaatacataaattgacaagggattcaaagacacgggcaagatcaacttagaagaaaatggttgaccatgagggtttggtcggaccacactctggccgacaaggccgacaaaggttgactatgtggtggttagccccaagcaaaaggtaggttggccagcactaataaagagcatcaaaggaagccaagttgaatggtggggtccacagccatcctcctgcaccggtcataaattgattttagctacaagatggctctaacaacccacaaaagttggggtttaacccccaaactatctgcatataattagggatatttgtttgttatttttgtaacttaaatatatcataaaagagcaatttttcttatttttaattgatatttacttacttggaaatagatcttttctaatccctaaactatgtaaaagacattaggcagagtaaaaagggacctaaattctatgtccttacaacccttttctcacatgccattacccaagcattagacacttagtctattttctcatctcactagttcaaaatctgtcatacatcagttctcaccattgtaacattacaagagagcatatctagaacttacaacaaaaagcttgtaatctacattgtgtcatctctggaatgaatacaactaaaaggaaagtaggtcattagtcgctatacaagggggtcgaaccactataaattgttgtttaatatttttttttacaatttacaggcggtaattgtctatcataaataaggctccattgtcagttcaccaaatctgaggttaacattttggtgctcttagtgagagcattatttgtcatcttgatcattcatcatggttgtaacaaggagaaccactacctccacttcctcgaatcttccttaagatctgatgacgactgatcccaattttcaagttcctccccccactgaaggcctcactgatctaactcatattgtcactccgacaaatcctacaagtcctataaatttagccaataaaactaatcccattgatcctactaacatgataaatcctaataatcaggccttgtcgcccaaaatagatccaccaatagtaactcgaacaaaaggtcctgtaaacacgaaacaacctctacaaaacttaaataggactattccttagtattatttaggcaaaatagggcaaggaattggtgaaccaactattagtgagcctcatgtggacttgggagaggatattgagctggctaggctcaaagaagctgtaggccaggtcacccaaaaagaagaaccacacatttttggttttgttgctttcacccaacagagatgctgttgggaatattttaccaggatctatatttactaacaagtatgttnnnnnnnnatcctaaatatgaattctctaaatcaatgaaataaacacataatggtt

SEQ ID NO: 21272 - DNA, 2284 bp, Cannabis sativa
agtgaggtttatatatgtatatgatatgtgttataaaaataaatattatcactaatttcaatttaagcatatttctctaactacttagtaaaattgaaatctctgtcagctaaggtattaattagcagagctctcctaatcaaatttttatgtgaaattgatatatctactttacattcataaaaatcaaattcaaattatatactctttatacaaccaacttgattgatcacatagtcaattcaaacttattgttaattagagttgtactaatataattttttgtcggcaatttttaaaatgatttaaattttattgaagattctataaatatatatcataaaatttaatataatatatgtacatatagttatagtaatataattattttgattttttttcttaatacattaagttatttaaaaaaatttataattttttgaataatttttcaaataatttactatatcaaattttatttttatatatagtcagttatacatgtggctgtttgcttaattattatttacatatgttaaactaaatattagtaatacgcaatgaatatttagttaaaattgttattaatatggttatttttaaccgttaatttcaactaaaaatatattaaacgaataatttttgttaaataatcacattaatataagagaaaatacaataaataatttaatttttttttttgtttttttgttttttaattacaagatatatggtctatataattacaatgtgaaggagtatatatatatataatgcacgtgtactcctaaattatatttgataataaatttatgtgtgtatatatataagattctgttcacacgtatatattatgggcaaattaaaagaggttaagtacgtagtggatgatcactgtagaacaaccctatatacataggcatgccccggcaaacagtactttgtattaattaatttctttctatttaataacaaagatatcaacaattaattaattcattaatattccaatattccagttgtattaactctgtcctattgtctatgaccttggaacagtatctgacctaccctagaccaaacaaaaaaaaaaaaatcaacaaatcaataattattattatatttatacaaaattataatttatatataccagtttcttggttattatttagctataaacacactagtctagttgtatatatatttatacatatacactgttttcttatatggtattttaaaccatgtggctctatatatgaatttatatatatatatataatataatcatgcaaattggccttgattttgatgggggagtactgagaaagacatccacagattaatataattaatcaagatttcattttagatagataatagtgatttgatccataaccattggtttgtatttgtacaccaatttgaatattaatttatgtatattatttaatacacactactcaatccttcaccttctcctactatgaattaataatatttgctattatattttatttaatatcattagtctctagtacattttataagtcacgtctcacaattagttaataatattcactaaacattattttcttaaattatatgaaattcaacacttaaatcaaccaataataacagaaataaaaaaatcggtaaacatcaataatattatttaacaattctcttactacgcacaaccaaataaggaaagctcttctcattggttcaatacttcaatttgatattaataataatattaattagcattaattaataaaagcttgtagaaaactaagtcagcgaaaagatgagttttaaatttttttgacaatgacctcctcaaaaaatagatgggtattgtatttaataaaattattggtctaaaaattatttaaatatgtttttgtgttatagttagcttttgtttgcatcccaattgtataaacaatttttaaaacaagaatcgttttacaaattgttagcctcatgataattataacattaattagtaatataatatacaattaattaagttaagcacagattctcacaagtgatcgaatattcttaattaactactctattcacttgactgagatttcgggtacattaattatgggagccattagttagttggttatctaaattagcatattttataaaataaaatatttatatatattatactttccttaagattttttttttaaaaaaaaaaatagaaactagttaggctctattatattcttttaaagcaagcccgaccatggatataggcggg

SEQ ID NO: 21273 - DNA, 3399 bp, Cannabis sativa
  modified_base (212)..(218): a, c, t, g, unknown or other
aatcatattaggtcataatcaatagaaaaaattgaagtcaaagccctagtttttattaactattaattttcttattagtttaattgcttactctttcactgtttttaatttctagtttttatcttttcttaatttttattcaaccgaatagaagtaaacgtttaatttaaacgtacttaactacaatcttcgtgggatcgacctcactcttnnnnnnnttactacttgtcacgatacgtgcacttgcatgtgcaaaatatcacaacaataagtaggtcaattcgtgtcgattttgtgtcacatgcattaaccctaacccaaaccaaataaataatcgtgtcattcgggttcgacccaatttcaacccacactactacaaaactaggcattctcgtccatcctcaaaataccttttttcgaggaccgtcgctaataaaatttaatgagctgattggcaattcattcaggctatgatgttgaagttgggatatgcagattttagggttcaaaaaatcatggcttgtgcaaaagctttttcttatctgatacaatttgaagaagatcaagggagatttatagggttagcttttggtaattgggggctctcattctcacacctttttttttgccaatgattacttgtgttcatttcagctaatgaggatgaatgtcagagttttatggaggtattgaggaaatatacagttgattcggggcaggcggtgaactttcataagtgtgaattatgtttttggtcaaacgatgagggagtctctaagacattgttacagcgatgttggatgtaatagtggttgatgaaattaaaaataaggtttggaacaaggtgaaagggtggaaattgttttcggtggctggtaaataagttcttgttaaggctattatccaagctatgccaatctataacatgactatgtataagctatctaagagcctaagtaatagcttacatcgaatggcggcgagattttggtggggttcatctgacaaaaatcaaaaaatacctaaggctaaaggaggcataggctttcgaaatttaggtctctttaatcaagcacttcttgcaaagcaaatatggcgttgtattagatctccttcatccttgtgcagtagggttttaaaagctagttacttcacgaatagaggtatcttggaagcaaaatgtgggtcacatgggtcatttgtgtggagaagtttggtgtggggtaagaagctccttcttaaagaatatcgatggagggttgggaatggaaactcagttcgagttttagaggatccttggataccaaggccactaagagcctgttttgttgtgttttcagttttcaatttttaaaattgtgtttttaaaagtgagaatagaaaacagttttttatcattttaaaaatttaatagtgtttggcacaagttttttaaaactatttttagattttttcttactaaaaaaaatcaatattttaatactatacaatgacatgaacccatttggtttcgggtctaggatcagagtatgtgagcaaaaatgtaaaatataatatgttagacaaaaaatttgtttttgaaaattaaaaacaacattttgatgttctctattttctagttttttaaaactcaatttttaaaaaactgtttttaaaaaaaaattgccaaacgacctctataagtttttaaaaactgttttagttttaacaatttgaaaacagtttttaagttatgaagccaaacagcctctaagcttccaattctatgacaagccatgtctcccggaacagttatatgttattgattttaaaaaagttgatggccaatgggatgaagcgtttgtcaaggcagttttaattacaaggatgctgagttaatcctaacaatttagagtggtgattgggattttgaggataaagtcatgtggcactataacaaaaatggagaatactctgttagaagcgaataccgattagctgttcacttacaagaaaaagagcctatgaaaaaaaggtcgaaattcattgggaaactcaaaatacccccaaaggtaaaactaactatgttttatccaaaaggggtatgaacttggcacccaattgtggaaactgttgaggtggtaacatggaaaatattcaccatgctttatgggattgtgaaactcacaaggaggtgtggaagagatgtgggctatgggagaacatttaggtacataaacaatctaatattcaatatcctttctccaacagttagctcaaagctagaagcatgaggactttgagttgttttttatcactacatggcatttatggtcgattagaaactatacaaaacatgggggagaagctccccattcaatctacatgccatgatgaagatggactactacatcatatatgaagtttaggggttcatagtcgagtgggtgggttgtcctttgtatttcttgaggctaatattgtagcgcataatttaaccaattatgctttgtcttttaaagttagtgccatttgaattgggattattcccccttgtattaatcaagccatatgagacttgattatcctaatcatgtgtaatttgttctgttaaatgaaggatttccatttcaaaataaaaagataaaataataataataaaaaatctaccctatattttaggtaaaaagtcaaatataatagcaataaataaattattaccatgattcacaccatgttataaacttgtacaccccattagttcaagcaatcaattaatttagaaataatattgtattagtattatgttttatatcatcccaagatgaacagaactggtctcagagccacactactacaactcccactctatacatacataaatataatagaataaaataacaataataaaaaaataaaaaaaaaattctaaacaatattgctttctcatctaaaaacaccattttgatacacatatttatataaataaaagcaactttattagaaacaaattacaaatggcaaaaggtgcattactagaacttaatatggcaattaaaaattgaagaaatgatgatcatactgtccaataacactctcatcattttgttgtgattgtgtgaagctattaggattaggattagaagaacaagaagaagctgaagaaaacaaggcaatctcagctcttgtcatagccaattcaatctcaacattttgtatttgttgttgtaactgagaaataatcctaacacatccgtaaactcgattctccattctacatgtcgcctcgaaatgcatagcatccgctgcttcaccacgcagttctaccggtaattgctaagaaaaaaaaaacttgttatttttgtcattataacaacaatgaaaccgaaaacttagtagttatagtaagtaccttgagca

SEQ ID NO: 21274 - DNA, 2233 bp, Cannabis sativa
  modified_base (1417)..(1421): a, c, t, g, unknown or other
aatgacatttgacttgttattcctctttatccaactaagtgcctctttgacacttagaatttctacaatctcgggtcggcaactgacagaagaaatagttgaaaacggctcaactataatgtttatacatgtattataatttagaataaaattattaattttacttaaataaatttacaaaatatatatttatattttattaagatgtaattattcttatatagaggtatattttattaatacggaacttagaaaatgtataactaattaaaatttagaagttattcttttttataaatggcttaaattggaatttgatttttttataaaaaattaaaagttatttttaaatagagtattgttaaatagaagttctaatgtatattgaaaattcagactaatcacttttttttaaagtgatcggagcaagaaaaatagaaatcaaatcaatagaaagaattcttttttaattattttttctttatgtgatgaagtgacgtaatttaagttgagggctgttgaaacttgaaagttgaaacattctttgtgctatagaaggtgtgaggagcccacttatcgtgttcatgtagtggaaaatgactgtgaaagtaccagaaatgtgttgtacttttaaaaacaaccaattcttcgcccaacacttcagccgatggtgggccttgctttgggcccatataggaagacattgcttatttattccattttaaaataaaagtaaaaatatctaaaaaaaaaatgtggaatatatactatatagtatatatttataaaatataagtttgttgaagaatatattgtgtcattgtatagtagatgcatatgaacccataactaactttacgtttaacatgtgtagttcttatgacactatttttcttttttgaaaaatgcttattacacactatttgagttactagaatatattaataattgagatgtaaataagtgatgtgtagctgaaatatacttcactttgtaataaatttattctaatagtttattaaaatttatgtcaaatattgtagtacaaaatataacatacaacattagaaattaccaaaaatatactactttttaattttagtaaatacttattcagtattttaaattttattaaaatataaatttaatacccaatatttttaataatgatcatttgatactttttatttacaaataatacaaatttagtacctttttttttggatttaatgaatttaaatttctagtataatacaattactctcattctattattttattttattttatataatttaaattttgataaataaaaattaagatagacctattaaaatattaaacttgatttaatatagttaatttagaattttttttgttgttactaaaaattttagactattcttatatttactannnnntctagaattttcttgtttgtttgagtactctagaattttctagaaagctttcacttgtgttagtagtgggaattatgtggaaaaatatagaagctgaacatttaataatatttttagattagtccatagtcctataaatagagatgtaatcctatcattttgtactaagtcaaaaatcacacaagttaagatatgaaacatagcttcttctatttaagtattctctccaaaaattgtcttattatccaacaaagtggtatcagagctaagtttgtgaagaaaaatggcaagtggaggaatgatccccttccaagttccaatgcttaccaagagccactatgacaattagagtattatgatgaatgcactactaggagctcaagatgtgtgggatattgttgagaaattccataaatagcaagatgatggtactctttcccaagctcaacgaaatgccttaagggattcaagaaagagggagaagaaagctttctacttcatttatcaatcagtggatgaagatgcgtttgagaagatctcgaatgcaactaggaccaaagaagcgtgggagaagcttcaaacttacaataaaggagcagagcaagtaaaaaagatttatcttcaagctgttagaggtgattttgaaactgtatttatggaagatactgaatcaatttttgattatttcactagagcattatcaattatcaatttgtaaaggaggaattgcaaagaaatttgtgaagtaaaggtcatagaaaaaaaattcttcgtactatgagtccaacctttgagtacattgctacaatcat

SEQ ID NO: 21275 - DNA, 2759 bp, Cannabis sativa
aataataaattaattacctcaagaacaccatcatgggctactaatcttccagcggctgtggtggcacccccggatagaaagctcgagtgttgaaatgagccttttttcttctgaccaacataaagagaccttgttgtgcttagcacaaaaatccatttggaaccctccaccgtattcactgggctcccactttgtctatatataagtttcccatattctacttttacttcgtatccttctctttctttctgtaaaaaccaacacaaagtttgacataaatatgtgcatgcatacacctttgaagaatgaatagtgaatagaatggtgtgtttatataagattagaacttacgggtccaagatatgtaatgcattggcgctggagaacacttcttgggattttctcaaggtttatctctttgccatctccaatatccaacctgcaatttttttagaaaaaaacagtgaattagagagagcccatatatgttacgttttaaatttgaaatagtgaataattacataccaaaagaagaagggttgagcactctcgctttcaaaccaaatatcataatacacgtgcaaattgtgtccgtaccgatggcgtggatcaatctgtaattagaacacaaattaatcaaacttaaaagttagcctatttgacttgactcacacatataaacacgaaaaaactctaaaaaaaaaaaaaaagagaagaattacttacagcttcaagccaatgttgtagggccaacttttgtgccttatcatccttggacaaaccttttcccacctaaaccaagaaaaagtcattctcagctcccaaacgatttttcacaaatgtaattctggggaaataaaaaaaaaaaaaattacctttgctgctctggtcctagcccttgcccatctttgagctacagtttcctgcttctcaccattgaaaaacgacacagaacttctcttgagagatgcaaagtctaatgctttccacctaaattatgtaccaaaaacaaatcaatttaagcaaaacttataaaagaaagaaaaagaaaaaaaaaatcccacttttgcaaaataaatgaaaaactaaccaaagttcttcaacgacaacagcacaatcggcaaggtttcttcgagttcggtaacttttgtacactttttgaagcttaacagcagcagcatcaagctcactgaccggtctaggtgagaacataatagctggttcaggcagagaaagtgtggggattggtttgtgtttatttatttggttttttttcttaaaagtcaaactctctattgggtcttgaacaaggctcttgaatgaaagattactctcaagaataactttctccggtttgtaatgctgcaaacgattggacctgtcacttttggtatcgttagaaccatttgggattactgtcatggtttctgattctgttctcttaaagctctgtgttctactgtatttgaaagcaacacctttgggagaaaaacagcttgtgtgttgtaaaaaaccagagttttggctacgttctacaatttctttccaggctgaaacaagtatggagagggataaccccatagactaaacaaacccaccaagagaactttgtttcaagaaaagggtatctgtaatttgcattaaaaaataaaaagattaatgcttctcaatactacataatggcataattaaaaaaaacagaagataaatcaaacaaggtgtaaagggatggtttattaattatcataccttcaattttgttgcttttctctttcaaaacatggttgtcttttttttataaggattaaatataggatgattagtccacctggtttcctcttacttatatatacagaacaaagtatgtgtcctttgctgaatttttcgatacgtgttaaaattggaaaaaagggaagtcgttgaattctcttatagaaaatcaagtcaggtacttgttggttgtgaagtgattagagggttcaactcttgattttactttcctttcacgattcaaagccacgagtttgatttgatgtattcaaagatagactttgaattaacttaatttggagttgtgaacaaggtttgctcttatgaacgctatgttacattctcgtatatatatgtgtgtgttcttcatttacaaaaccatatattaaaacataacaaatatattaatgtttaaaaaatatataattaaaggaagtcggtcaaagaaggtaagcctagcctggtttccatgaaattctcctttggaaacacaatattcaatattgcgtttcacttagctaaactgggattttggtagtgtgttttaattctcaacagtcaacaacttttggtcatttcgtgactcgtgctgatataaatcgtaatactactctaatagcctctttctttcattttattatagagtgaaatgactataagacccttcccccttttccgcgggaagtgagaagtggctacccttgagaaatgttaaaaagtaataatttgtattaatgggtcgaaatctttgacttgtgggaagtgaggcaaacaatatttgaagttaatgttaggtttgtggaaactttggtatccattttgctgaaccatattttggttaagaagaataattataatgtcacttgaaaatagggtaaatgttccatatttcattaattgcatgagtttttctatttctattttttattttagtcaaaatggactaaagagaatagtctgaagtcaagaccgaaagctccaatgtagtg

SEQ ID NO: 21276 - DNA, 3101 bp, Cannabis sativa
tctttctcctgctgacataccctgaagaacaatacaacaacaaatacatcttatgctatggatctactttccatagaaattttccatcttaacaaagcaaataaaggaaaacatagggaaagaagaaaggacgcgtatgtaaggtgggttttcaacaatagtcacaatcaataaagaaaagcatcaagatgtgatcaactttcaaaaggaaaaaaaaaatccaagtagtttatatattcctactttataatctctgcaaaagagtaatcaacttatattattcccttcaagtctttgtggcaacttactatagatcatttactcaactaaaaaacgtctttagccatgctttttataccattttgtcaggattctgaatagaataaaatcttatattaagaacgtcttagttacagcaccttacaaatttttacatcaatattccaataaacactaagccaaagaccaacatttggacttacattccaaagtaattggaattggaaaactacttatgggagcattttaagtactaataatcatctgagctcaatcagagcatggaaagacaccctggagcatcatacttgtaattgctacacattaaaccatatgtacaaggttattgtcctctttgtcatcttggaaccatagacaaagaaaaagttctagaactttttatactccattgctttgttcatatatacacctttttcaaatctactgaagcaatatcctatacggggttcagaaagtaactttatggaatcagcaaaaacaaggatctatatagaagcaattaaccaaattaaatagacaaacaagagacccacatcaagaatgctaagaacataaatattttatctttaattagtaaagtttttattgggtttacctgcattcttcatcataactatcactccttgataagaacccctttttaggtgagggcacatccttggataagtttgctatggactctccatcatcagagataacaatggtgacctgtccttgattgaactctatcccttgctgggctaaaacagtcgaattgctctgtttttctagatcatcaggttgatcactgctgttacccatctcaaactcacctgattcaccaattacaaaaaatttaataataaactctttaaatttaaaaccaaaaaaaattgaagaaaacttttggttatagaaagacacaaaattgcaacttcaagaaaaacccgtttgacacaaacgtgaatcagtatcaatcactattccaattaccctaaaaagaacaaatcacatggtattataaattttacaaatacccatgtaaatttaaaccaatatacattcatttatacacacaattgaaaaaaacgtaccaaaggattcagcttcacagtgtagctactcagctgaaacagaaaaaaagcttgttgtttaaccccatgaaaagatgcttacttatggaaatcgagttaaaaacttattttccaaaatgagaataatttttcttggtgggtgagtttgatacaatttcagagtctatacaattgatgattgaaattggatcgataatataaatctatctgaaatgggcaaaagaatttattacatttataggtgttacctaatatttttttggagttcagctttatgggattgagtgaagcaatggtctattcatatttcagatatttctatgtttataataatggtaattaatgaataatatgtaaataaatcaagtaaataacaatccatctccacacccaagaactgaacttccaaccaaccatcatatctatcaatccacaattttctactatttagttgcctattatgtaacttcaattagattttttgtagctttgtgttgactgtttagggaattaaattatttgaatattggaaagataatagaaaatcagtttagcaaagataaaatagcattaaaaaaattaggaaaaacgacaaaaataataattaaatgagaatttttttttagtaaagattttattgcttgttttgatagaatgcaaactcccaaaaataaataaataagtaaaatttgaacatccatcattttttcattaagttttttttttttttttggataagtggagtttttattcgaaaacaaaacagaaaaccagtagccacaagggggggctacatcccttaaaagacccgaagtcttcaccctcgactctctagcccaacgagctaaagaatcggccaaaccattctccaaccggggaatgaaagaaacaacaacatcctcaaaggatttacacagttcaagacacaaatagaacaaaggataggtacctcaaccataaggaagagaaccagactcaaaagccaaaaccgccaccttagaatccgattctatcttgaccttgcgcactcgacgttcctttgcctccttcaaagctagctgaattcccagcaattccccttccaacacgcacgacaccatggagaagtcaacagcaatctatggatttgagagaatctcatcatacaagcacactaccgccactcctgcatcaacaccagacatagaggcatcgactttgcagcaccagtaatcgtcccacatggagtttggtgtaatgtccttcaaagtaacccgagtctcttggcgatcttcccaataatggcaagaagaatactcctgaaatctcgccatacaatcccgaaagacacgctccacatcacagccaacattcttaaatatcatgtcattttgccatttccaaagagtgtcacacacgcaggccgtaaacaggataagtgcctcatccttaaggctcgtccaccatccaccaaaatccaattgactattccagccaagccgatcaatttgaatcccctaagaacttctgaaccatataccccgagtcactgaacaattacaaaacaaatggagagtagattctgcttccagagtgcaaaataaatacttcctatgctcaacctctcttacacccaatctggctgatgtggggagaatgtcagaaagaattttccaccccagaaactttaagcgaggatgcaggcgcggcttccaccacttttcccaaagcttattaggcgtattgaaa

SEQ ID NO: 21277 - DNA, 2051 bp, Cannabis sativa
  modified_base (489)..(508): a, c, t, g, unknown or other
  modified_base (1992)..(1996): a, c, t, g, unknown or other
gttaatttgtgggatgcaaataaaatttttcatatttttataataaatgagtcccctcaaaataaaaagtcgtgttgaatacacgtgcggagcacgtgtgcctccgactagtaaatgttaaatggattgacattgtgttacacttatgtgtacatgacatattttcattggagattttagacgtcttacatgtacatagatgttaatagtgataatctcagttgtcatttaacgatagattttaagtgatatctcaaatttagaaaaaaaagattaaagagttaagtgtataaaaaagtaatttgcaactaaattctctgaactttgaagtttaacacgatcaaccccttagactggaaaaattagggctgaactccccaacctccgtaatcattttgctttgtactcattccgtccatcaggagcggccctgagttaaaatgggccataggcaattttttttggtctttactataaagataaatggtnnnnnnnnnnnnnnnnnnnnaaaatatgtatattttttaaaagatatttttttatttaggcccctaaaatgagtgggccctaggcgcgagcctagcccgcctatgcctaaggctggccctgccgtccatttgatctgttaagtgccgaagtggataagcactgggcacacaagtgtacatgtgacaaaatttcattagttcacctaatattcatgatataaatattaaaaaaataatttaaaatataaaaaaattaaaattagaaaagtaaatgtaaaaaataattaaaatttaaatatttcctttttctttttctttctttttttctttttttccttatccttttccttttccttttttttttctttttcttttccttcttcttcctaaaaagaaaaagaaaaattgtagcataagttcccaaaaactcttgtttaatacagataatccctaacttaaaaataacagttttagtccccgaagtctcttttctcgtaaatctattagtctctctttttagctgatatattaaatattaataacatgccacatgtcaaatttttcagggttcaaatcataattttaataaaaaaattaaaatcataaaattatttttattgtgattttttttttctcaaggtattaaaatctttacaaatatcttcattcaattgtgttagagcatttttaaaatagtttgattgtatgggcatatatcacatgcataattaaagtatgagattttatataactataagtattaagtgagacaaatcctgtttattagtattgagtatataaatattaactctaaaagtgtatatagattcacatatttattattatactgttattttatgtacttatatttttttgaattattaaattgcatcgaattaatgtcaccttagtactatatatcaaaaaattcgatatgaaaaatataataaatatttaaaatttaatattaaattatactaatacaattctatcatactatccttttatcctttagcatttaacaactctcaaactctaaatatcttttttgaaggatcaaattctaaatatattaataatttactaattttaatgggataattatataatatactatttttttttatagaaattttatatttttacgtttattttatttttttatttttatatttttacaatattctataaaaataacacaaaaaataacaaaaactacataaaagtaagaaaataacatccaaacatcatcaaaataataacaaaaaataacatataaataaaaaaacaacaacaaattaacaagaatataacataaaaacatataaaaaaaccgtattttatgtaaagaaaattataaaaattagaaaaatatttaaaattccatacaacgtatttttgtattttttttttgttgtttttgtatttttttgaaacaatcccaattttaatggggttagttgaaaaatgcctcttttattcatcaattaatcaaatttacctnnnnntttatatttatttgaaacatacctctttttatatgtattatacccaaaatatcct

SEQ ID NO: 21278 - DNA, 2257 bp, Cannabis sativa
tttacaatcagaaacaatgtaatccaaatttatgttatgtctttggtaccaggatagcgcaaaggagagtgcatgggcctccattagtaaagctgattgagtgccattccaaggagatgatatagtcaacaccaggtccccatgcgagttatatatagcaaaaccaaggcccgttttgtttgctgcaacattctgtgctgcgtccactgatagtttcaattgaaaacctgaaggagtttcattgtttggctcggtgggggcagtgggagccttgaagggaaattgttgtgtgttgtgttgctgatattgttccaagaaatcggccacaacgtgtatttgagaagctggcgccataactcttctgtgatgaagaaattcattcctgcaatgccacatcttccaaagcaagcaaaggaaaaattggaaatcattggccatgagttccgtaccagccacatgaagaaagtccctgcaagttagtgcaatatattttgaaataaattaagcttagaaaaattacaaagttgaattctaaccttaagagcaactttaatctaactactaataaatcttgagctgcaacaaataccttcaaatatatgttacaccacaacaggtaacaaggctgaaacaagacaaatatacaaggttagttggccactcctaatggacaaaccaacaagaaacatcatttataactttttgagagaagatacaataaaagaagaggtggttatgagactcgacaaataacacacacagggcagtacagagtcaatcgaaaggaagtgacttaaaacatctctggtcaaaagatgttcattgagagcttaccaaaacacaaatctatgttttgggacacacaaccgatgccacaacaatctatgatactctatttttcaacaacaataagagagagataaaaaaaaaattctcatcttgaatcttctagtcaaccccgcctcaaacaaagcctgtttgtcaatgacattcctcagtttagttagttttttaaaataccagctagcatccgaaaaaggagagaaacactagaaatcaatcccttttaaatagataaaattcactgactttaaccagagactatcttgctttgttgaaatggcccaaacaaacttagccatcaaagccatattctactttttaccttctctaaagccaataccaccataagttttcagcaagcaaactttttcccaagaagagagatgaactttgcaacggttacctttgataccccaaagaaacatcctgcagaatttatcaatttcaacagtgacattttatggtaaaataaaaatactcatccattaattacgaatgctcaagagaaccgaatgaatcatttggctctaccagcataggagagatgtctactagaccagtgatgaatatttttacggaccttttcaataatgctatcacaatcagacgccttccatttagtaggcctaagattaaacccaagatattttaagggaaaagaacctttagccatatgggagatgtcacacaattggtgtttcaaaacagaattaattcttccaaaatgaatctaagattttgaaaaattagcagcaagcccagttgcatcaaagtcttctaaatgatactcagggaaacaacatttctcttacaaaaaataaccaaatcatctgcaaaacacatattcacaagattcagagttttgcacattgggtgaaaactgaaacccttggagtgagaggcttgaatcatcaatctactgaggtactccatgattaacacaaaacgaagaggagggatagggtccccttgatgcaacccctttttcacccctaaacaagctatgaaatctaccattaatcatcaaaatgtaagacgaacctctcaaacacgtcataatccacactatgaatttagcaagaaaacaaaatccttttagaatttcttcgacaaaaaccaaatctattgtatcgtagattttacttaaatccactttcaataaacatctagctaagatattctttctagtatatcccttagaaagtcttgaagaattaaaatatcatgtgccagcaatctcttttaaataaaagctccttgattactgtggatgagactaggcaacacaatattcaaacgggaacataaaatcttagaaataaacttatataaagagttttgtttttgttggagtaaccgataaaggttaagatatcaaatgtaacaaaagttatacaataggtgggggatttct

SEQ ID NO: 21279 - DNA, 5799 bp, Cannabis sativa
tatatatatttatatataaaaattcaaagttgtactgtacaaaaaaaatcaggtataattaattactctatcatgaatcatgaaattcaaatatggttaaaaaattctttaacttagtgtttcatgtcgtccagcatgtacaataagtacaatatacaaagactatttatagtatagaggtttataatgtgtgtacactagatcatgatgaagtttgtacaacaacaccacaaggactatagtctatatatatgtgtgtataattttgtatagcaatactacaaatgaatcactattgttttatttattttttaaaataaatataccatatagtattcaatctaattcattagcatcaagactagaaccacaaaaaatgtgatttattttttaaaatattttgatgactttattaagagattaaaccaaataattaatggttataaaatctgaattatgtagaacgaagatgtattgtataattgtgaccccactatataaaagcacacaaagttacattattaatatataatcacataatttataagcataatggattttcaagttacttcttccaagacaactgggagttgatatggagcaatcacctctttctcggaaacagggaaaatagtgagagagataaactccactattcttacagtggtgcccaaggtcaaatgccccaataaagttaaagattttaggccaataacttattgcaatgtcatttatataagatcgcaactaaattactgtgttctagctagaatcaaaactatccttcctgatctggtttcaaagaatcaagaaggttttatccaatggaggttcataggacatgatattatgatatgccaagaccttgtgaggcattatgggagaaataagtctaacaaagttagttgcatgatcaagctaaatctgtagaaagcctatgataccatagagtgggatttttttagaggagatgctttatggtctaaattttcccattgcattcattaaacttgttatgaattgtgtgagaactcctaaattctctctcatgtttaatggatccattcatggtttctttgaagctaagaagtgcctaagacaatgggatctaatgtcccctttgctatttgtcttagggatggaatacttatccaggattttggggaaaattggagcaaaggaggatttttattttcatgatatgtgtactgagctcaagcttaaccatcttgcttttctaggtgatatcatactgttctgcaagggtgatttcagaagtgtgtattacttgctacaaggtctcaaactgttctcaatgacttcaggcctgcaaccaaacccacacaaatctacaatttattatagtaacatactaaaggaagatgtaaatcgaatctttgaggcctatggtttcaccgtgcaggaaatgcaattcacttatttgggggtacccatctatgcaaagaaaatatcatggaaaagaatgtgctatacttgctgagaaaatcacagcaagaataagaacctgaagctccaaaaatctatcttttgcagcttgagtggtattaatcaactcagtgttgatggccatacatgcttattggtgtcaggtgatgattctactcaagaaagtgattaggaatatagagtctatttgtagagaattcttgtagaaatgataagcatttttcaatgggccaggtcctataacttgggattctatatgtcaagcaaaagctgctggaggtataggatttaaaaaaagttttcgaatggaacaaggctacaatagagaaatacatatgggccatagataacaaggaaaatagtttgtgattaagatggatacacagtgtgtatgtcagagaggaagactggtggagttacaatgctccagtctaggggagctagtattggaggtgtcttgtaactctaaaagaccagttgaaaaatttactagatggacaacaggtgctgcagcaaaagtatagtgtgtctaatggatataaaatgttgtgtccaggcctaaaaaaaagtgcattagagtcaacaagtatggggaagactcaacacacaaaagcatagttttgtcatgtgagttacaatacaacataagcttaacagcatggggattgcagtagaagaacaatgtgttttatgcaatcagtagaataaaatatcttctcatctattttttgagtgccttgttgtgtacaatttgcaggaagttaaaactcaacttcaatgaaaagcagtagccacatcactgcccaaactaattcgatggataagaagatcaaaggtgagcaaatttaagaagcatgtcttatctgctgcattagctagtcttatttataccctgtggagatctagaaacatcagaatatgggaaggcatcctccaagaactaggcatgttactaaaggattaaaagaagggtataatccaaaaatcgttctatgctggcctaagaatgttagatagatcgatggacaaagtatactttgtaacatgtcaaggaaaatcgaaaaggaagtgcaatagaaattaacaagaataattgtatagattgtatagttgattattttaggcccttaaatgtgtgctaatagaatgtatatatttattttgagcaatacaaatctctaaatcatacaaaaaaaaatattacataattaattaatttaatgtcgagtgtgtaattatattttataatatgtaagtactattgtccataataatcatataaatgtcgagtatatatgcaagcttaattaatttgataattttggttaatttatttaaatccacaatgtacaccacacaataagtacaatgcttttatgttgattgaaaaagaaaaattacaaacagagaatatctttcatcttaaatacttatttttagctaattaattaattattgttgttctaaatattttttatcatttgttagaatttcttgttattcctaaatccttaagattacttttttttatctgactaaacttaccaactctacttgggcttaggggtagtttggtaaaggtctatagttttgctactttgattagatttttgctactaaaattagtcttgtctctatgagatggttttgagtgtctttaacttgtttatgttactacgattaatcttgtttttgcgacatgatttgtttaattttttttcgtttagggcgcaacatatttgtactcgaaaacccacccttttggtaaactagaccgaattgaacccagaaaactaaaaaaaaaaaaaggttttaccatgtttgggcgcattcgggtgaaactttggctacacactgggttaggtttgggttggtgaaatttcacacttccagaactcgggtttcccctggactcgcctcgaactcgattacattattttatttttttttaaaaaaatcaaccttactcactagaccccaaatgaaaaaaaccaaaaaacctaattctaaatcacaacccttgagtcgaaccttcccttccctctcttcttcttctattagcagcagcaaacacaaccatatccccaaccccccgagaacagtgaagcactagtccgacaaacctcccatgtgattgttcttctcctttttgttattttgcctcatgtaggaatagaaggaatgctcttccctccttccccctccatctgacatgcagaaactctggcagcaacatccaatagctccttcgtgcttcaagcttaatgtaaaaaatgatattttaagaagaaaaaaaacaaaaaaataaagaaagccacttttgctggtcctacccaacccaaaagccagtccttacccacccgtacacgtcctaacccgagcttgacccatccacacttgaaactcaaaattctacactccccaacaagcgggttcgatatacattttcccgaacccaaataacctaaaactcgtcaaatccaccccatgtgtcaccttagttttgctgttggttcatcttttttgttcttttgatggctcgctatcaaatcactattactggttaggaataacaagttcaccaacaaatcctagtcatattagttgattgctattaataaaattatatgatttcttaaaaataatgataactcacatggtggtttataatttaaaactttcaaatttgaaatatcactacaagaaatattacttttaccagcagtttgctactatgctagtaaaagtaacttttaccagcttatcttgcaaactgcgcaggtaaataggtcaaagttttaccacacatttacaatgacaagtataacttttacaaccgcatttacgtgttcgaaaaaattatttttgccagcactttcattttgcaccgacaattccttttgccaacatatcaaaagtagattctgttttgccagcacaatactaaatttttgctaatgtaaaaatgtactgacaaaagtagcatttcttagagtactaattacaaaaaaaaaatgtattaacattaaaaaaaaaacaaataatatatatttttatcattatatatataataaaactattaacaattgagaaaactatttttatcaaagaatataagagggctttatctttatttattttgtagagaggaagctcttcattatatttacagctaggtgttggttggctttctgagatacttttctcgtgaaaaaaacatgcacgcccactttttattattattattatgtttactttatcactaattaatatgaaaaggttccatttttatatttgttaaacttcactcgagggtactcaactaactctcgtagtaatacaattcacttttgcaagggcacactctttagtttttagtcacatttgagctaaaatattatataaagtagagttattttccataatcttactttaattaagcataagatattgattattttattattttaatatgtttttacaatttaaatttattaaatataaattaatttaataaaataataaataagtagtacgtaatgcatttgagtaaaatactattaaaaaaatttgtcacaaaagtaaggaaatctttatccattctttattatagggatatatttttaagacttactctctattttagttaaaaattgtgtttagagagtatgttcagatatgctcgctactatacaataatgtatttatgtcagttaacgcttatgactgatgcaattacttagttagtaaatttattattgattttacacttgcattgcgctttgcattaggtttaaattaacgcaaaactcttttgcatcggttgtaaattgacgataggtcgaaaaaaaaaaaaaaaaacagagaatgagcctgaaatttaattaaccaaaaccctaaattgatataataggtacattattttaagccaactttgtagaaaagctaataaaatctgtaaacatcattcgaaaactgaccaatcgagatagcaactatatatcgatctcagcctaaaaatcattgtggttattattattttacaataattgtgtatatttaatttacatatatatattgctcaatatctgcgacagttgaaatatgtgcatatcatctgtgtctcaactgcaaattgcaaatatggatggtgacagtgcggtccaacacatctgtcgttagattttgaatcttaacaaaaatcgaaacatgcattaattattaaaaattgtgtattaattgatatatcagccttatcaggcatcgatagctaccatgcatattcataccacaagattttgatttatttaaatgctttttgttccaaatgag

SEQ ID NO: 21280 - DNA, 2986 bp, Cannabis sativa
cctcacggacactcatggcataacgccgatatgaaagggacatctctcaggagtaagcaaacatttttcaatcaagagggtagtgtggtcaagtgctataaagctctcttccatccaagcaaaaggatggatttacaataagagggagactgctcaaagagccaaaactcccccaaagtacatgcctgtctaccacgggaaaaaatggcctggccaaagagtgaccaccctccgagttgctcgaccaacaccagttacaaagatggctcagccagagagtgatcctagagtcgctcggccaacgccggttacaaagatggcttggacagagaatgaccctaaaatgactcagccaacaccgattagaaagatggcttggccagagagtgaccccagtgtcactcggccaatgccacttatgaatattattgggccaacgagccaccctcagagttgttcagctaaggcctagtaaaattgttgcttgacatattggcgcgaagtaaagttcacccaagggaacccccgtatagagggagcagtgtctcagagataactgagaagatctcatgcctagacaaggtatatcccccaacttatttagtctggaagaacacttaaaataattcttgtagactggagggcaagtgttaaccccaaaaattagaagaattgatttttgagattagtcaacgatcgaccccaatagtcgagagaaataacctgtaagatttggttgaagaatgattgagtcaatgcatacgacctaaggatcattaatctaggaaatccatgcttacaaggctcggggtatatccgtacaacttggaggtcaaccccgtaacaactcatgagtagagttagtaagatcaacttactaggttacaattgttggagaattttcgtagtgatatgttcagaatgggatctttccacgaacataagattcaaagacctctttcttatctttccaacgcatctttaattgtccaattccgatgtatatcgagaaagttatggccaaaatactaaggctggcgaattgtgacagcttggcatgcgagctgacggctcccatacgagctgacggatcccatgagggactccctagatattgtgcgaccccatgggggttgtgcgagtttaggggccattaggtgagtcgggggcattttggtgagtcgtggaaccttcatacaagtggtggagcattcgttcgacccgcgaatgaagggtgagtggggagccgtgtgggcgtgcaagtgtggattggcgagacgtgatggcgagccgtgtgtgctagatggggatgggcaaggcgtgagtggaagtgggggttgtgcaagccgtgagagggagtaagggggtcgtgcgagctgtgagagggagtagggggccgtgcaagccgtgagagggagtacggggagccgtggatgcgagtggcgagtgtgcgtgagtggtagtgacaaggcgtgagtacactttagagggatgtaggtgtagggaaggaagtgagggcatatggataagggtgaggttgagtgagaactccggggacacgacgtgcagaggaaagcatacacccaagccttttgaaacctctgaatccaagggagtacagtcgagcgacaacgaacctgcttgatctgaggacccaacgaaaggtacaccatgaccactcttttaaggcttgcaggtggggactcctaaacctgcaactggcgaccacacacctgtagcttaaaaccacgcgtctgtagttcaggaccacacacctacagctcgggatcaccttcttgtaattggggaccacgcatctgcaacccaagagcataggcctgctattggagaccacttgacactagataagagtacgaggcgcaaggccactccaggcacctgcaacccacaactcgaaagcgatgtgttgatacgttttgatcatgttgtacccttggccactagtgtctataagtactcccatttcagatgtgagaggaggttggaagttcatttttgtaactcatatagtgaaggccatagagggcagaagattcatcgtttcactttcattttatttcttctctttatctcatctcttaatagttaaacattttccgaccactaacttggttgaagagttctaaccgtcaattgtttggcgctgtctgtgggaatgaaaagctccagtcaagtcgctcctttacacaccatcgttacataatgggtagatgctctcatcatcgtcagtacatggaaactcaccttgaggaagaacggctgcttgcagtagagaaagacctggtgccgtccgctattagcaatagtgaggcaaacgtcgatagggaaaaagtagacgaagagcatcgataaagagtgcccaaaaaattccttaagtggtggaggacatcaaaacagtcataggagggccttgtgtagggggccaaactcgtagaagagggaaaggtacgcccgtgaagcaaggcgagaatctcactcttgagatttggagtagaggcccctaaagagtttcgagggggagagcaccccaatcacctttacaaaggaggacacaaatggagtacattttccacacaatgacccactggtgcatacagtgcaaatggctaacacccgagtacaccagacgttagtcgacgatggaagctcagtagatatcctatattagactactatgcgggagatgggtttgggcgttgaggatctcaaatcctgtacgtctcccatatacaggtttaccaaagaaccaatccaactatgaggaacaatagaattagcactaatggtggggaggagatcccagcattctacggcgatgaccaccttcttggtagtggatcgctcgttagcttacaacgttgtgttgggaaggccatcgctcttccggttgaaggcgatcatcttaatctaccacttgactatcaaatttccaacctgtgggggtgtcgtcacattgaaaggggat

SEQ ID NO: 21281 - DNA, 5741 bp, Cannabis sativa
caaaaaaaaaaaaagactttctatcaaattttttgtggcaattgatgtcagtatatattatatgaaatgtattaccaaaatattgttgatcataattaaaatattttattgattaaactttgaataaaataaatataattagaactaatattaattaggtaattctaacgaactgtataagatcttataacatttttacactggtctgctattaaattgttgcacgatttaagctcattgattatctttattagataacaaacacaaacatcatgatgattaccctctttatgatgagtaatatcttccatatattataatatactcattacataaaaaaatacttcatgtatagcttacgatattttaatttttctatgttagtaaagcaaggatgaatattttttactcaacctatagtctttggcttcaaaatattaaggttggctatttttttaaaagcaaacttcctaccaactcagttaggaaagaatccaaactttgtgtggcaaaatttttgagaagatccacagattgtttgaagtggttcttgttggagtgtgggttcgagtgacagtattgatgtggtcaaggatccttgattgccagattttttgaatcctatatgatcaccccagagtctcttggcttacaagaagctttaatggtgtagaaaatttagctctaatacataacaattaacctctatatttctagcttcaagatcacacttaaacaaataaaagttaaatcaaaataaataaatcaagaaccaaaatcagcaaacacatactaaacgagaaaaataaacatatagatgaatctagataacttccaaacacaacacacgagaattatactggttttgatcctattttcaatgtgaacttagtcatactccagtttgaaagcgttgccaccaatctttattaatgacgagaattagagatatcaatctcaggagctacaagaaaataatcaaagtaaattatatatggtgtaatccctcaacacccattaacttactgacccgagccaacagaatcaacaatgttgctcaatacaatttcccaatcccaactctctctctctttctcaaatacctctctcacttttctcactctaatttctctctctattatgttgtgtgtctctcccctttctctggtggagtctccttgttatgtgttgttattaaatgagtagccctctttatataggccaattgaccccataagcttgctgtcatatttgatagttgagttagttaaagaacaactaactaactaacctaatctttggtttggggtttaagggataataccacaaattctaccttatttcttcaagcccccattaacaagctaagcatatttttctaatggaggttgtagtgctttcatgtgtagcttcttagcaactaaggttagtaacaccttagtgccaatatcaacaaggttttcttctaacttcactttctccagcttgatcacttcttcttctatcttctctcttatccaaaacaactgaatatcaatgtgttttgtcttctcctgataaactagattcttgcacaaatgattcaaagattggccttacctttccatctagaagcttcaactccttcagaatttcttgtagccatatttcttctttgaatgcctctatgttcaccatgaattcgtcttctatagttgaaagtgctactattgattggagatatgatttccatctaatgcaatctccattagtttgaaactcatatgagatagtagacctcccagtatccttgcttgattcataatcaacattcacatatcctttcaaagttattttctcaaaaattctcttgtaagtcaatccaatatctgatgtcccgctcaaatatcgtagtagccatttgagtgccctccaatggtttatcataggatttgatatgaacctactcaatatgcttaaagcatgagcaatgtcaggtcttgtgctaaccattacatacatgaggcacccccaaagccatttcatatggaatttcttccagctcttctttctcctctgctatcatagggctttcttccttggttaatacaaatttttctccaagaggtattgaagagctcttagaatcttgcatcttgaactttgttaggatcttctcaatgtagttcttttgctttagatgcatgactccatcactcttggatcttcattacttgtcccaattctttcatgtcaaattctaccttgagttgatcttcaattccttttattactaccttatctttacccattattaacatatcatatacatagagtagaagatacacaactattgactcttctaggtgcttaaaatacaaacagtaatcaaactttgagcttgtgaaaccaatctcctaaacatagatgtgaaatctcttgttccattgccttggagattgcttcaggccatatagggacttttttaacttacaaactaactctttaccatcttgttccacctaaaatccaggtggttgctccatagatctcttcttctagaaacagttttgacatcaagctactccacttctaaacctctatgagttgccattgacaacataagtataatcgtcttatattttactacagttcagaatacctcagtgtaatttatcccttccacctaagtgaaacctttggtaactaatcttgccttaaatcttactatcacaacctatgtcacacattctttaatctttaaaatctatttgcacgatatcaccttcttgtcctcgggtcttggaaccaagaccaatgtcttgttcattctaagcgagcttaattcatcatccacaaccaagaccactccttgtactttccattcaaagcctcttctatacttaatggttttggtatgtaacatggatggcctattgacaaagcataagtaattagatcaacttctacgaatcttgctggtatatagatttctcttctaggttttgtctattgcaagttaatagtcagacatatctggttgttcctcactctcatctaaagctgtgtctgtgctgcattcttctcacttggttcaaatcctttaagctcaattttaaactctgctaaatcctccctcttgctagatgaatctgcatcaggtaaaacatttcccttttaatcttttaagtgaggaaaatcattttcattaaacataacatttctagaaatgatcaccttaggcttcccattctgttatatgcttcacatccaaacctctcaagtgtttcaggtttggtatgtccccatacaacaacttataaggtatcttcaagtccatgactcaatttggaatcctattaataaggtaacaagcagtagataaagcctctccccaataaggctttcctaaccctaaactgagaagtaaacatattactttgttcaaaagtgttctattcgtatgatcaataactccattctatggtggagttttaacaactgtcctatgcctagttatcccatgctcattacaaaagctatcaaatcagtgttgatgaactctagaccattatcagttctaattgtcttaacctttaaatttattttattttccacctaagctttccatatcttaaattgttgtagacactcatctttggtcttgagtatataggtccaaacgcatctactaaaatcatcaacaatagatgggaagtaatgttcacctgaatgtgttagaattctacttggctcccaaaggtcagcacccacatactgtagaactgccttcttgttcagagttgctattgtaaatttgatcttgtgttgctttctataaacacaagcctcagagaaggataaagcataggtctgaagcttttcaattaatctcttcttgtgcaattcgctcatgccttattcactcatatgtttgagccctttatgtcatagttgcatatcactttctaaacctttcatatatctacctcgaccacaggtacaatttcaccttagagtacatacaacccatgtactctctttcctttcatcacaagcaatattgaaccttttgtcatctttaggctcccattcaaggacttatagccatcatctttatgttctaaggttccaagtgatatcaaattctttcataattctggaatgtgtctcacattatgcagattcttcacttcaccattgaatttctttatagccaccttaccaattccaaaaacccttcaagaaacatcatcaccaatagtactctaccaccattattggtttcttcataatcaaagaaagaatctaagttgggacacatatgataagtgcatcttgaattaaggatctactctttacttttcttattttctaaaagaaaactaattccacatctgtacttctatctcgactactctcagccacaactgcaaagtcttttcttagatttccctgatcattagattatgagtattggttctggtttctgttgcatctcttgtcatcgtagtttgatctgaaataaggttgcttctttaattgacagtagaatctttaatgtggccaatctttccacattggtaacattatcgattgtctttgatcttcgacttagatcttgatgatgattggttgttccataatgatcctctctttggacttcttcctcttgcaagataggcttatcctttcctagtctccttcttgagttgcaattcaaagtcctttgacttcaatgttgtatgaacaccaaccaacgaggtcacatccccgtaatacttgattgctgcactaacttcttgatatgctattgacaatgatctgagtaatatgattgcttgactttcttcatctacctaatgaccaatattagctacaccaacaattatttcattaaatttatcaatattatcatctaagaaaagagatgagttcactctaaacccgtataatctttcaagaagattaatttttctcgagattgatggtgtcatgtacagctgctctagtttgttccataatccttttgcggtcttttcttggattagctttcttctaattctattggataggtacatgacgatggtgtagtatgccatattctccatttttacaatttcctctggtttcttctcagccaacaacttttcatctctgagtacctttgataccttttagtgcacaagtatacccttcaaactctcttgccatagtgcaaaatcagttaaatcatcaaacttctctagttcgaacataaaaattgaccttgtccttcaacctgagttcatgtagaattccttaatgaattttgatgagttcttgatgcggaagcaactgatctttgaatcttctttgatcaattaacctctataattatagctttatgatcacacttaaacaaaaaaaagttaaatcaaaacaaacaaatcaagaacctaaataagcaaacacatattaaaccagaaagataaataaagagatgaatctaggtagcttccagacacaacacaagaaaattatacttgtttcgatcctaagttcaatgtgaactttgtcatactctagtttgaaagtactgctaccaatcattattaatgaggagaattagagatatcaatctcaagtgctacaagaaaataatcacagtaagtcatccatggcgtaatccctcaacacccactaactcactaactcgagctaacataatcgataatgttgctcaatacaaattcttgatctcaactctctctctctctctc

SEQ ID NO: 21282 - DNA, 2446 bp, Cannabis sativa
  modified_base (2298)..(2299): a, c, t, g, unknown or other
attttaacaataccaaacatgctccaagcctctgattctggctaagcctatcctacgtgttactctttcattggctaatccctggatctcctcgaccccaccagataaaacgcgtgcacttaatcaaaatcagagagagaagaaagaaaagagagagagaaacactaaacaaagtgttccaaaaaaaaaaaaaaaagcttcagaagaagaaaaagaaatcagctatggcgtcgaagctatgcgactcgtgcaaatcggctacagccacactctactgccgagcagacgcggcgtttctctgcgtaacgtgtgactcaaacgtccacgccgctaacaaactggcttctctccacgcgcgcgtctgggtttgcgaagtatgcgaacaagctccggctcacgttacgtgcaaagccgacgccgccgcactctgcgtcacgtgcgatcgtgatattcactctgctaacccactcgcccgtcgtcacgagcgcgttcccatcacgcccctatacgaatccctcaacacggcaaaatctaacggcggtggtggcggtgatggcggtgccgttaacttccttaacgaccgttacttccccgaagacgcagctgaacctaatcaaaccacagccgaagttagtaccgaagaggctgaagctgcttcatggcttcttcctaaccctaaagccatggaaagtccagatctgaactcaggtcagtacgtcttccccgatatggttccgtatctagatctggattacggtcatctagatccgaaacttgaagctcaagaacaaaacagttcaggtaccgatggagttgtacccgtacacagtaataaaagctctcaatctcaacctcccatggcgaacgaacagtgttacgaaatcgatttctccggatctaataaacacttcctctacaatctaagccacagtgtaagttttatgttttcttttacttttcggttaccgagaaaatgagaaagaaaattcgtattcattgtttttttttttaattttctcaggtatcgtcttcttctctagacgtaggagtagtaccagatgggccgaatggtgttgaaatatgtgagaataataagcccatgggctcaaatgggcctcaggcggcccaattctcgtcggcggatagagaagcgagagttttaaggtacagagagaaaagaaagaataggaaatttgagaagacgattcgatatgcttctagaaaggcttatgccgaaacaaggcccagaatcaaaggaaggttcgcgaaacgtacggaagttgaaatcgaagctgaacgatacggcgtcgttccgatgttttaggttttaatttctttttttaattttgtatatatagttttttttttaattatgtaatgtgtagtaatgaattttgctttttacgatgagcaaatttttaagctatgaatcttttaacaagcttttttttttttggatgtatttttgtattttctaaaataaaatatgattagtttgtaatctaaatctgaagttttattggttcagttaaggttagtatatatataaattattatattaagtttgttgtgtttatgggttattattttattggatttttagtgtatttttataatgaaaaattatgggaactggattagattattagctgagtaattaaataatgtttgtttttcttgttggaatattatttaatataatctatattaagaaaacatgaaaatgaaaatctccaacattttaggatacatatcacttctgtctttaggagtaagtatatgattatttagtctttctttaatttatttatttttgatttaatttgaacaatctttttaatttatttataatgtattattgggtattttagctttatttaatgctaatttgcaaatatttacaagcaaaaaaatcttttttttttttatttttataatgtgtatccaagttttttttttttttttggacaatggacattacttttactgaagagtttatactaaagaatatgcttgaagcattgaagagcaaaacatcaaatgtacttgaaatatctttataatggtggacaatattagtcttaaggatcaatattaaagttaggattaacttagtatgttctgtacttttttctttttaactaacacattctaatttatgatatccctaattctaacatgtctcaaaaaaaaaacccctttataaagaacaaattttgaaaattcgattcaaatcgataccacttcaatgttggttcaaaattgtatgataatgtactaattaattaattaattaannaattaattaattaattaatgtatataatctccattaaaaaagagtcatgtcctctgacatgtgatttgtctctattcctatagagttttgttattttgtgtcaaagtatttttgtttgattctcatcatggcgtctagtagccgatc

SEQ ID NO: 21283 - DNA, 2224 bp, Cannabis sativa
atattttctatgtattattatattaaatttgtaaacgtggcaagagatgatttgttgtccatattagaaaccatgatttcagaagcacaccataacctattcgcttcttttaaattagaagctctcttacacgacgtcgtttcattacaatccgcaaaatacttcccactcacatttttcacctttggatttgttgcaacataacatgtcgttgctgctgcctatttattattaaataaataaataaataaataatattacaaataaaaaaaataaaaatacaatttatctatttaattatttttttacctgaggaatagtctttaagagtttagaagccaagaagaacaccaaatctatagaaatataataacaataataacaaattaattaaaaatgatccaatctaatcatctggataaagctaattaattagtaattaattaataataattagtacctgtaataagaccctcacgttctctggtgagtcttgtcctcacgattcccgggtgtacacagtttacagtcacattagcttccattttctgtatcaattattattttttttaatgaaacaaaacaaataacacttttttttttttctataataataataattaattaattaaatttgtctttaaaatgattgatcaaataattacctttagtctccttgcgagttccttcgtgtgtagaacattagcaagtttcgaaagcgcatacgcacgtgtgggatcataatgtctgattaattaacacaaatcacaaattaaaccactaattaatcaagtaatattaataataattttattttctttcaatttctcacctattgtttcggctaatctcgccgatatatcggattgtatcgccggtaaaccagccgtgtatagtggacgaaacgttcacgattcggccttggattcccgaaacgttagccgtttcgatcatattctttagtaaaagttttgtcagtagaaaatgacctgaaaataacaaaatcataattaattaactgattaatttaaattaataattaattaatttaagtacctaaataattagtggcgaaggtcatttcgattccatcttcagaaattccatgctcgtgcgcgaactttccggcgttatttctgccattattattataattttcttattttctttccatccaaacaaacaggtaataaaaaaactaaaaagaaagttgaacaagtcaaaatgaaaattacatgaggagattaagaggtaaccgaagagaatcaaactcagtaacgaatcgacgaacagagttaagagagctaagatcgagagccataacgacgatctccgaatcaggatactcagacaagattcgcgactttgcttcttccgcggctttaacattccgagctggaagaatcaacctcgcgccgcgccgcgccaaaacttgagccgtctccgctccgattcctgacgtagctcctaattcaaaaatcaaaaaattaaaaaaaaaaaagaagaataatcatcatcatcatcgacttgttttttaatgattatgaataattattaccagtaataatggcggtgagagatcgtagatcagagttctgagtaacttcttcggcagtagacttggagccgaaaccgcttgctccgactgagccgatcaagtactttaccgattcgagcatttttgaaataatttgataggcaaaaatgtaaagattctttttctttttaagaagaagaagaagaagaagaagaaggtgttaattgtggtgggaaaatagcgagagtaggaagagagtgtcagaagaacagaagtttttttagcttaacgacgccgttttgcattaaacgcagagcgggcacacagttctagctataggctgctccgcttagcattaaaactcttttcagagaaagaaaagctggtttagtacggtactgtgttgatgagaaaaatatatatatagagagagagaagggattagcttttatatttattagtggagaatcaaaagagagagaggattatatatttgtctttgtgattgaatatgtggttattaagttttttatttaaaaaaaaaatggatgattagttttaattagttttttaatcttttaataattaagaaataatgagtgggtaatttgaaactctgacctggattattttatttagtaattagtagatatatttctgttattgtgttacaatttattattacaa

SEQ ID NO: 21284 - DNA, 5057 bp, Cannabis sativa
aaaaaaaaaacggtatttttcaacttcttcaattaagtagcccaattaaagtgaatctcatacaactgagccggccaaggttttgccaccactctggagaagaaaactgccggatatacttacaatggcggtggctcatgcgtaaccgctgctacagactaatcggttaattttcgaagacattacttcattgttggtatgtttctgtgttcgtttttcttgtctaatttcattgctacccgccatgtgtttgatgaaatgtctgttaaagtaagatgtttgatattattacttcatgtctttttttgtttgggtttggtttcattaaaacatgttataatattgcctcttatgttttctgtttaaatataattgctggtttggctacatcaattgagacaaactccagttgtgatgtaaggaaacagagtctgaaatcaaattataacttcactggttggcaacacaatggaataaggaagtatgagataaaatatttagtttgagggaaggagagaaggagaaatttacaactttattggtttggtgggttcatcagctcagtattcatatcaataatggaactggtttgagtttgactacaagacttaacacaaatttcacttattttcttctttttacatgtaatataggaactatctgtttccatcatgaaactatttttgttagggtataggggaattaattagtaaattgctaatactgcctagctagtctaaatatgtaaagtcattttataaatgaaaggagaatgagaatgaattataactaggagtattcttaggagattggaactgtcttgaagagtgcatttagaatttggcactgacttgaagagtgcaacccggtactgtgtatcattcgtgctttcattgaaagctccgtaaaatgattttacatatttataccagctaggtaatactaataatttactaattaaccccctatacccttcatgtaacatatttgttagtgcttcaactgctcttgttagtgttgtttttctttcttgcgtaaatttccaaaattacaaatttacaggttttgtttgaaatatcatttttaagtggctttcttacaataattttgcaaaatccttagtggactttttacttttgtagatttcttcttgtcttttgagagggttttaatcttcataagagatgatgatgataattaggagaaaaatgagtcatcaaatcactgcactcttccctacatgtgtgtacaagtttaaagcttattcaagctccatttctgtttgtgggtttactaacacttatttagccaatctaaatgaggaggttgtagttttaggaaggaataaggacttcccgcatgagatgaagtctttgtcaactatgacaggaacagtcttggtgcaggctggagacccagctatgctaagtgtggaaatagagaattcacttgatgagcatagacttgaagatacgtggaaattttatgaacaacatatgcagatagatgggttccctagaaagtctgttgtgaacaaacttcttgtagtttttgctgaaagccttgatgttctgtggttagagaaggcctttgggatggtagaacgaatattcgagaaaggaaaacaaaatttactacagaaagagacactaatatatctctctctttctcttgcaaaagtccagttgtcggttcctgcatcaactgttatgcgaaagctggtggaaatggagcaatttcctcctgtttcggcttggtcttcaaccttggcatatatgtgtcaaacaggtcctggtacttctcttgctgctgagttgattcttgagattggttacctatttcaagatagtaggatagatccccggaaaaagagtaatgcacatttgcttgctatgaagcctaatactactgcttttagcattgctctagttgggtgtctcttgtttggaatccataggaaagcagagcagctccttgacatgatgactcgagttggtgtgaaacttgattctgacttactgatagtcatggcacatatatacgagcgaaatggacgaagagaagaacttaggaaactccaaaggtacataaatgatgcacacaatctaagggatgttcaattgcggcagttctacaattgcttgctttcatgccatttgaaactgggcgatcttagttctgcatcgaagatggttttggaaatgcttcaaaaagccaaagcagctaggtcctcttctgctgcagcatcgatggtaattgatgcaattaaaaacggtggtaaatcctcttgtgttcttggttccgggtcaacttcaagccatgaagaatctagaggtttggaatatgatggagcaactaatatcactatactatcttatgaggattatttaagagatcaaaattttgtgaaactcgacagtgaagcaaaggaggtgctaaataccatgttagttaagctgcagactcaagttgaactactaacaactgaacaaggtatcatcctaccaactgagaaaattttggtgaaattagtcaaggcctatctagaagctggaaagaccaaagatttggcagagtttctcatcaaggtagagagagaagattttccagtttccagtgatgattcaatgatggtacatgtcataaattcatgcatagtacttggttggttagaccaggctcatgaccttctagatgagatagtattggctggtttcagtgtttcatcttccctatattcctctctcttaaaagcatattgtcatgcaaatcgagcaggagatgttgcagcacttcgtcgtgatgcttgtagagcaggaatccagctagattctagctcttatcaggcattgcttcagtctaaagtggtgcaagaagatacacaaggagccctccatctattcaaagagatgaaagtggcaaagatattgaaacccgctcatcaagaatttgagaagttggttaagggatgtgaagagggaagtgaagccaagttaatgggaaagttgttgcacgaaatcgaggaagggcaaagagtagattctggggttcatgattggaacaatgtcattcactttttctctaggaagagattgatgcaagatgccgagaaggctctaaagaaaatgaggagtcttgggcataccccaaatgctcagacgttccattctatgataactgcatatgcagctattgggggaaactatacagaagtgacagaactgtggggggagatgaaatctcttgcttctgcaactccaatgaagtttgatcaggaactcttggattctgtgctttacacttttgtgaggggcggatttttcagccgagcgaatgaagtagtggagatgatggagagaggtaaaatttttgtggacaagtacaaatacaggactctcttcttgaagtaccacaaaacactttacaggggcaaaactctaaaattccaaactgaaggccaacacagaaagagggaggaagctttaatttttaagaggtgggtaggattgaattgataatactttggtctacacacctatactctcatagaagatgttttggtccattcagagaatgggtgtaaaacaatgtacattgattaaagattgactacctgcatggattggaagatactaaataaaatggccaaactggagttgaacaagagggaatggcagctaactgcatagtaacatattatatcgtacccttacaacttacagggatcaaagttcatccaaccatgacaggtttatgatatagcagtggaaagatagcaacatgtgtaaagtgttctgttctgcatatcgcctttttattctcggcccaagcttagtatcatagatggcttttcttatctatctaactgcattatctctgcaatacagcaacagggatttctggggaaatttcattagttgttgtagttgtaccaaatccctgaactgcagttcttatagagattgagagttaagtgactaatatccatgcttttttcgtatgtgtaaactgcagctgagccataggccatcttttccgcccaattgctagcttggagagtctcttgccagctgccattagtgaagcttagatgagctcagtaacttctgctttacatagaggatatgatgagttgatttttaaccatttgttcacgcattcaatatgtaagacatgagttcatgttttctttgttttctattcatctccagaaaataataaatagaagaagaaaacccatgtaaaacaagtcttcaaataattggcacaagtaatacacatgagctttaacagctatttttattaaaaatagtttgcttgttgattatcaattttttttttctacttcataattaagtttctttcccatgtgtcattaatattcttactcaaaagttgcagcaactagttaaatctgttatattttggttttctggaattagcacttgactcaagattcaccaaataaggaacatgttaattagcttttgacttcttaaaaatataatttgtgagttatgatatgaacacttttttcatagatttctttcatctgctacatcccttgcctcttcattcaatatagttctttgttgaataatgattttcattttctatcaaggaatgaaaaagaacatttgtaattttgaattaagtaagagatcccttcatccaaaaaacaaaaaaaaattatgtggctaagagaccttttttttttcttcactaagtaaaagattatttatagtgtttctttgttagagaggtttaagaaaaaaaaaatacacctgaaacatctatacgcaaaagcagtgaatgagatgagaaaaaaggaaaatgtgggatcgaattgaataggaaaagtaacaaaaattcgccgttgccggggatcgaacccgggtcacccgcgtgacaggcgggaatacttaccactatactacaacgacttgtttgataataacataagaattttgccatataaataaaaagctaagtcaacggattaacaataatttggtcaatttcatgaatgaaaataaatatatttattttgcattatt

SEQ ID NO: 21285 - DNA, 5164 bp, Cannabis sativa
tggattttctaatatgtacgcatttttgttctgattctctgacatgcagttctggtttataccatatcgttctatgttgaagtatattttatcatgaagttaatgggaatactattacttatattactttggcataatcaggcgtgtgttcatgttgttttggacttcatgtctcccgagaatgttactgagtgtgctcatttgtccgatgaaatacgactgcttccagaagaccataaagccaaagtagacaagttacaggtaaaaatcctgtaagattatttggtcattttttctttttctttttttatcaactgtattgatgtatatcatattattattattattattgtcacgaaaacaggtgaagaagatggctcttcacagtattagtgcagctattaaagaaattcgtgagcttacatgtgcaacgtaagtttccagattggatattcatttatatcttctgctttccattttagcacccatttaatatatttgtacagactggaaaattttcctcgtgcatgtctaaatttagcatagcactttaaataataaatgatagtgaatgttcaatgacttcctgcagagtgtttactgtatgtaattcttaggtgtcccaacactcttttttgtgtgaccgtacggatctttagattttgatttttcacaagtcatgtgtaggagtaagagaaaacagcctcaattcaattatcaatctgcataagaatttgtacttattctatgtattaactttacgtaatcagttcaacacatatgttagcccctttagtgatgcattattctgcccgcttatatttataactcataaatatggattattggaaagaatgagtaaagttggtagtgaactatctgaagagattatttatttacaacttacaagtttgcaaattactacatactaagttgtcaagcgtggtgttttgggagcacagtctttacatgaatctcaactactagaacctggatagaaatccaaatacgattaggaaagatcatgatgggcaaaagaaaagatgttttaattcagtgatgttttcttagataagtttcgaagagagaataagtgattgtaattcaatgtgtaatgtagctcatagttcatacccgctttaaaatataaaaagtgctatacgtgttgctcaattcacacaataatatacacaagcacgaagcatttaacagtattacagtaacttgtgtttcatatagtaatcctctcataaacacataacagaaaaataagaatctaatatcgtactacctcgttcacatggcctattattaatctcaattactcacaacaattaacaaaaataaaaatgatgaatattagcttaggtaagattcaattggatagccaaaactaagattagaacaagacgactttgtttaacgaaatatgttcttatgatttatttttaaggccttatgtcacctccccgcccttattatctttggctatttgtcttaacagatttgtcacaaaaacagaactctttttcatttcacatcgtgtaaaaggaattataaccctttgtaactagtctattaatacactatacttgaaataatttaattaacgcattttggccattctgaagctggcaaatatagtgctacgtcatcctaaagaaagcaaaagaaaagtttatcgagtgattaaaatggtgccctttgtcaacttttgtcatctcaagaagattcaagatcccaattaagcaaactcgatccatccactaaaattaataacaaaacattttactacttgctaagaaaatcaaataaaaaaaaacactacaatcaagtaacaaagtatgatctggtgatcaaactcgtaaacctataataagttatatatgagggaatgataagttgaaacataagaggtagcgtgttgatctcgattctcaacgtcttttagtagcaggttctttctgtgaatggaaatatagtgcggcaactggtggcccaaggccatagtgggcagcaaattggcgagtactgaagttgctacgaatctctggtgctgggactcctgccatgctcccttcactctgcctaaatagcgccaacacgtaacggtgaataccagttggtggttggggtcccatgtattcaaccaaatcttttcctatatatatatttaaattcatcattaccactgtacgtgattacgttccattcacttacttttttttttttaataaatttgaatattctcataattattatatatcaaaagttcaaacctttggtggcatcgaatccttctggaatatctataacaatcctgaaataattaataatctttattaccagtcactatttacgataaataaataagaccaacaatagaattaagaaaacatttttgagtgtgactgaatatgtattatctataccaatggagccattctctcaatgctggttcactaggacttggagcatcaggatccaccatcacctattaatccaattcgacaatcattaatatatatatttatataaaataacagacagagtataaataaagtacgtactaaggtgtagagattggcttggttccgtggaccgagaatctgggccttgggcttgtcaacggcggcagagggtttgatctcatacccattactgatctgttttgaaccataatggatagtgaactcagtagttgggttaaacatgtcgaccacatctcctatcactttgcctaccacaagtggctctatagacctggccatatcgtaatcacctttgaggagcagagcagtagccgtgcgcctgtctgtacttgattatatacacttgagtttgaagttgaagtggtaagtactggtacttaaatccagagtttggtcttctgatcgaggaaaaaaacagagtgatttattatctatttatccacgaaatcgccacgtagctcagctggattgagggtgacacgtagcgagtccacgatgtaagtgctggttgtacacgtgttagtcacctgcacctacgtcggttactaatgcccccactgaagccaacggactttttgatgttgatgggcatgggcttttgtctttttcaattgacgaaattgccctttttgacgacaacacggctgaggaaaaaacaatagcaaatgcaaaagagtagccgacgtactcttgtctttagggagcaaagggtctttttggtgtggagtctaccaataagaagagtcctgattaaatcgtttaacgaagtgggtggtaggtgaaacaaaagctggaatgaagtaatatgaatgtgagagcttagaatggtttcattcacttcgaatgaaagaattttatgatttttcatttaacaacaaatcatataattgatcatagtaagagaataactggaaataattaattaattttcactaaaacatggatttgactgactaaagctaaagggggatgacatcgattgaacgcggcaacgtggcgagacgtacacaatgtgctgcgcgttttggtataagagtgaaaactgatgagaatatgtgtcaagggcattgttattgttgatagtggtgcttcacacttttagatatatcaatttatgattgattagattaaattgaataaaataataatattaacaaaaaaaatgctagacattataataccttttaggcttttaatattttcatctgtcaatcagtcaaaatataagttaaatattatacttaaaccatttcaaaaataaataaatatacattatccacaacatacttttatattattaaaagtaatttccagtgaatcttttttatatcttaatttatttatatttaatttttttattttttttttggcaaaacttttaagtttattttttttttttataaatttgacacgtcaactaaatattaccattaaatatcaattggatgaccactatatgtaattatatatatcatagtaaaattttaaaatcgttacagtaataatccaattactatttaatgataatatctaattggcaccttaaatttataaaaataacataaacttaaagagattttattacaaaaacgacaaattcctctattattaattatgttttatataaaaggaaccaactcaaatttatcattttcccatctttctaaatgctaatatactctttcttttttttttctttttttctttcttacaattatcatacttctctaaaaagtcctcacaaaggaggagagtataatcattacacttctctaaaaagtattcacagttacaaaaaaggagggtgattctagaaattgttattaatatattttaaaagttattaaattaaagagaaatgttgaaaggcgttagtatcaactgtcaagcactctcttacgtgttaatattgttattggtctaattaagtatcagattctatataatttaatataataatttttagagagtatcactagctaatcgcaaggcaacacattttaagagtgctaggcactactagtgtccaatagcaattagcaatgctttaaattaaattaaatgggataatacaatttctcaactttcagcccaaaagctaaaataattgcaatacgttcttttgaaattgcgtagcaggagagacaatcatatttctcattttaaacccctacatatgctatatagtttatactacatgcacacctaaaataaaaaagaaaagattggccgaaaactccttaataatagtatcaatcagattgaaaagatttttcaaaccagcatatattcaaagatacatctcataaacatgaaagttgtaaaaacaaaataacatataattaccaattttttggtgcaaaatcattgtatatatatagtaaacaatataaaagaaataaaaatacacaaatttaatacacatttttcaaatgcatgtgtcaacaaataaaaaatctaaaaagttccttcaaactcttgtggaaatataagttgtcgtttggtaacaattttattttctaattttttaatcacaaaatgagtaaaattttgtttttaaaatatttttgtttttaaaaaacaaaaatacgttttcactacaagaattttggttattagcagcggaagaattagcagcggagcaaatccgccgctactaataggactaatac

SEQ ID NO: 21286 - DNA, 1586 bp, Cannabis sativa
cagattatcttgtttaacatgctcaattcagttttcatttgattctggtgatataagctagattattaagcattaacttttttatgaaaaaacaaaaattagatgataagacaggtctaatttaattttttggatgtccttgaaaacttctctttcaaattctccataacagataattgggcaatgggcttctgattctatgggtggtttcccttgtaatttcgttttttttttccttcgaaaacttctacggaaatgggagtagtactttgtgaaatcgtaaagacatacggtggttctttctcctccttagagtctggtacaaagcaaatttgccaaattattgatcttctatgagagcatgaacttttccaatataattcaggagattgagttttatgcatttcaattttctttgcttgaagatgctttttttcttgtcattcattctataaatttcacgtcatgttgaagtgttcacctgaatctaattctaattgtttttctaggcagtaaaaaggccttgggatgaagatccattcgtaatgagtgaggaggttatgaagaacatttcattggaagtagttcgcgagagattattggatcacatacatcaggtgagctcagagtttataatgttacttgtccttggccttcatttaatctgcctaacttagttttttgtgtgcttttagaaataagaatgcaatctattcatttcaggaaattccttatggtattgaacatcgtttaatggactggaaggagttgcgaaatggctctcttaggattgaacagcatttaatcacaaacaagttaagccagcgcaaaattcttgtgggaaagaatggctctaaaatagggtaacatatgagatcttgtcatcacgattctgtttcttattttaataaaaaaaaaagaatcctattgctattgtaacttgtttgattattgtgactaggtctagtttatattctgatcaacccatggttcagtgttcattctctgccttcttttgttattttatttgtttttgtttaccatatatttgttttgcaactttgtttgcgcatcaagaggggaacttttgatttagagaaaactctaaacctcaatgccatatgtaaacagaattgcaatgacatcttatttggaatatgtttttatctgtaacaggagaattggcattgaagctaatgaagagttaagatccatcttcaaaagggaagtgcacctcattctccaggttagacttaaatgaagagtttcatataatgacgaaatgtcatattgtatggaagtgtatatacaaaggcgtctcatgtgtacctatactgcccacttttctcaatgattggtcaactattcaaaattcaactttgagaaataccatcataactgagctttgtggagacaatatagaattatgagttgggcaactcaacttcatgggaagatggctgcgttctttcgccatttcaaaattttgataatcatgtcgtttcatgcgattttgtgttttctaccaaaatttgaatgtgtactttttttttttttttttcttttttaattttttttaaattttt

SEQ ID NO: 21287 - DNA, 2183 bp, Cannabis sativa
ttttattgattatatttttgaaaactatttttacttttttaattttaaaaacataaaactcatttaaaaagtgttaccaaataccaccttaaaacaatggtctaataattaacttttttcctaaagttcaaaaaaatctcaggatcaactctgtttatggtgccctcataaaaattgagtgtcaagacttgtctagaaaatcatgatgaaattagattcatgtgtaatattagaggtaattatacacatattatcacatttatttgaccatgaaattataaatggtcccaattagactttttaattttcataactcgcatgagaattaattataattacattgtgtaattattaaaaaatttatattttaaatattaattattaaaaaatattattttttctgtataataattatatattaatttattttttgaagaagacattaggaattaccattttatatccaaacctagtgttgtaaataagagtcgtgccataaatatggattgtgtcgtgttgtaccgtgtcataaaataatatgagtcgagccgtactgtgtcgtgctataaaaaagtatgaatcatgcatgtcaagtgatcgtagtactataaatgaattgtggcttgctcgaattcgtgccaagttttacttgggccaatcccattttcttagacgagctcatattcgttctctatttttctacattttattttacaattaatgagataagataattattaaacgatatgtgttttttatatatttttaattatttttatataatttttttaataatatattgcaaaaattatgtaaaaaatttattataataattaaaatttaaatatttactaacagatagtcaaattattattattacttttatcatattataaggtttttagcgtgtcgtgccatcgggctagattatttgtgctcatgtgttttagtctagtcgtgatcgtgttgcacttaagtctatatttttcgtaccgtatcgtgtccaagttatattttttcatgtcttgtcatgctcgtgcctcctaaacttgtgttgattttgtgtcgtgtcaaaaaagtcaatttatatttacaacattataaaattcactttgtatttaaaatattgtgtaattactaaaactttacagacacaccccctaaaaaaattcactttaaatattaattactggacaaatgttatttttctatgttattagtaaatattttgtccaataaaaaataaaaaattcatatataatcactcccttatatccaattacaactaatatttaaaaataaaatgtgattattaaatttataactactattctaataattgctcaataatttttaaacatatatccaaagaggaagaaaggaaattctcatatagatctctcttccttttttttttttttttttctcttcatgagtgtctagaagggcttctctaatgagacggtaaaattctaaaaataatggagttttaacataatattactctaactaatatttaaaaataaaatgtgattattaaatttatgactactattccaataattgctcaataatttttaaacatgtaaccaaagaggaagaaaggaaattctcatatagatctctcttccttttttttttctcttcgtgagtgtctagaagggcttctctaatgagactgtaaaattctaaaaataatggagttttaacataatattactctaactaaacactaaacattactttgtatatgtgggagcagtgtcccactattattagtggaatactgttgaccactgcaattctattttttttttttactttttaataatttaataaccattttatataataaaataaataattaaataatgtatttataatcaaaacttatattatattaataaaataatataatactaaataacatattttttttagtgtaatttttaatgttatggtttgaaatgtaaaaaaaattaatattaaaatagtacacttttaatattgatttaataccaaatataaattttagagttgctctaaacacaaattagttatgaatgcattgatagtaagggtggcaaaacgtgtcatcgtgtcgtattcgtgtcatattttatgtgacccactttatatttcgtgtcatgcgtgtcgactcgttttttgactcgtgtctaatt

SEQ ID NO: 21288 - DNA, 6676 bp, Cannabis sativa
agcaaatacacctatagtggacaaagacccttcgagctttgaaaattttccaactaaaatttattataaggtttctgataataatacgaacttggatgttgcttaatcagtcgccacgtattaaaataaagggagaagattggtatgtacagttgatgaatggttgatgcatgggccacgtgtctaccagatattaatagtaaataatatatatgggagctggtgaggtaagctttaatatttttttgtgtgtcctgtgctgaaattgcttggttgattggttttattgattgggcggtggtacagtagaaattaaaattaaaagatggagaataaacaaaggtataaggtgggtctggctgctattccacatggcaaccaacaatgtgtcaaaatgagtatatttaaagcaccatcttttcttatcagattataatgttattgaaaaggttacatttatggttttggagttttttcataatagagggaacgatgtgtggtggagatcatatctatcaacttacttttatggctaataaagtaatgcaaattatttcgcaaaaggaaatatatgcgtgctacattagtaattagaagagtactctgtacccgaaccacttgaagctagctcaagtggttgtatgagtgtgcgtgtgtgttagaagtcctgggttcgagtttcaaattatgcatggttgtaatatataaacgcttaaataaaaaaaagagtactacgtacccctcaagtcaattactcacaaacaaacattcatatttgacatcttacaataaaattgaaaataatttttttataatttatttattttataatttttaaaatattttaataattattttttaaaattaattttacgtgaaccactaaaaatttaccacgtttataagtgtgtatacgtagacaattcaccgtggcacttaactatgattttagacggaggggtgtacaaagcaaaacggaatggtagtttaggtagttttgaccccaaaagattaatttttgtggttaagtgttaaaaaatttaaagttcaagtggtttagccaccaatatcccttataaaattatatttacagtgtttaattaaagtgtccattagtataatcaataccagtgattagccttcctagtattggtccatactttgaattggtcaaatttacccttctaattacctctttatcatttagcactattaattaattcactagtaaaaggataatttagatccaatttaaatttgtgcacaattttttagttctagaattaacacgtaaatggaaccaatatttaatcaatagaaaagtcgagattccatattgtaaattaagtttccatccatacacattattagattactaaaatagaaattgtaagaatcatcttcacactgagaaactttcacggtgaaccaaagaaactaataacatatgaacatgagttcatgattttttaggattttggttgatttactaattgatcatctttatgatatgaattagatcattatagtaaacgactagtttgataaagataacttaattacatatcggtcctgtcatatataatctctattatatataacacattcaccaagatatcaatctacatcagcaatccgaatcaagattgcttgcactgagtaacgagcattaatgaattttactagtaattgttgattaaagattctattattttaaattttacttgctattttagtcatatagctcatgataatgataatgaaatcgatcaatgataatgaaaataataataagaattttacgtggttggggcgttaatgaaccttagtccacgagtcaatatattattacttgaaagctagaaaatcattaaggtttacaagaatgtatgaactctatattttcctgagcaattgaggatgagtttctaaccctttgcatgaaaggttctttgtgtatttatagtgtttaggttttttattcgttatcctttttccactaatggggtcattacaagtaacatatcgactagggcttatctggtgaactctagcccataaggtgcttggtgtatgttgatatggatgccacatcacattggcagttgctaaaagtcgtgtcctatcttcgtgaagaataaagaaacattatatgcttaattgctaattactctatttccatatttaagaagatatgatctttgggcgagagttaattcttgatatcttgggctcttgtaattaatgagaatacttctgatctggacttctagatgctcgttgtctgcttttcccggatgcactgtgtaatatattctggatgttggatgggttactcgcctggacgagtcttctacttttctggaaagactgactgcatatgggtttggtccaatatttcatttgggtatgccattggccctagagtatttacactgcagttacttgtagaatcccacgtgtacccatccagaaaaatggataacatttaccctccaagctttcgaaactcaaggggttatggaaacttgctcccttccactcagatggataggggttatggaaacttgcgattcttcccatcaatttgtgaacatctttgtgtttttagggaaaggcatgtctggaatagctttgatctttccgcatttacctcaatgccttgagaactaactataaaacccaagaattttcctaaggaaaccctaaaagtacatttctttggattcagtttcattccgtactcatggatgatggaaaatgcttactctaaatgttcatgatggctcacgaaggtttttgattttaccagcatgtcatcgacataaacctccatattatttcccaataaatgtttaaacattttgttttctagtcactgatatgtagctctagtattctttaaccaaaatggcatgaccttacagtagtagattcctttgttagtttggaagcttgtgtgctcttgattagccacgtgcatcttgatttgattgtagctggagtatgcatccacgaaggttaaaagttggtatcccaaggctgcgtcaatcatatgatcaatgcgcataagtggaaaacagtcttttagacaagctttattcaagtctatgaaatctatatacattctccatgtcccattaggctttgggacccaaacaagattgtcgagccatatgggatgtatagctttcctaaggaagtcaatgtttgttagcttgtttacttttgtttttactacttctgacctcactggatctacgggttttcgcttttattggactggatctgccttggggtctatgttcaatgcaaggaaaatcatacaagaactcattccaatcatgtcagaatgattccaggctaatacgtcactgtttgccttgactgtggagatagtttttccttcactacaggaggtaggttcttccccactctgatgactttggtgggatctctgtcatcgatacgtacttcttctacttcttttattggttctattattcattccacgccaattcgtggatcaaattcatcttcttggcaacccccagtattggttgggaagatgttccagcttcagatgcatttccttcctgtaccatgagaattatcctagttgaaatgctatagcaactttgtgcgcttctttgattgcctctgatcgtccctatacttttggtatcgcttgggaattttaggtacaagtggttgatggatgttaccactctaaaatccatcaaaaaagttcttcctaagatggtgttgtaagcggtagggcaataaactattacgaatgtgttgtatttaaatgatgacacttcattgctttcaggaacttcctcatttattgtcattggatgttgtattttttccatggggatcaacctgtctctgttgaagccttgtagttgaatcaaacatggcaatagattggcttccacctgaccaatgatcgccatgaggaaattgcccatgaggaaaatgcacatgcctagcatcatgaggaaaatgcaccagaggatcgtcatgaggaaaaagcacatgcatggcatcatcttctatgaaagtcattggtgaattcatcaaccttggacgttaggcaagtgattgtaccaagtggtaagctttgttttggttcaattcattcaagtaccttttctacacattttaagtgattctagaaatgtgaggtccaccataaatagttgctgcctgaccgtctaaggctggcaaaacaactcctagggggtactaatttttggtatcgggagctacagctaatgcagctattgcagcattttgtgccccctgaagggcttgtacattttgagtttgtattctaggagcttatggatggcctactccctgaggaggatttatgactcaatgatgtccaacaataaaaatttgtccatgtgcaactacaggtccaggatatatggcataaatccttacccaattggataagtgttcattttgtaccagtccctcaattttatttttcagatagttacattcatttgtgatgtgcctaatatcactgttatatttgtacttcttatttggatatattctttgtcttttgcccttataaatgggcgaaggcttcttgtaatgaaccatgttacaagtttccttgtacatatactttcgagtatctataagacttgtacactcaatgtaccttgattcttgatacttttccttcttcgcagaatcattccaatttggaccttttcaactcctatatattaccccgtgactgggttatattagactctagaactttttctttttggttcatttgtttgggagcggtactatatctagtttgtacagctctgaagatgaaaaaactagcatgtgtagctggctatacagaagtacttggtccatataccgttggggttgtaaaagcagttggtgcagggtaaatggacggagttgtcatctgtgaagttgtagcatttggtacatcggtggaaggttctgggagtactctatacgcttgagtatatgcttcttccaaatttattataaatccttgagctcttatcaagaaattggttagagtacctgctgctcttttgcgttgaagctctccccacaacaatgatctagttgcaagtcctgatgttaaagctaatattttcatatcattagtgaccttgatcttaacaaatacatttatcatgcgttggatgtacttcttcaggctttctcctggctgttgtttgacactagtcagggaactagcttccaggtcgaaggcctttcgttgctacaaactgtgttttaaatatcgcttgcagatctctctaattgtggatcgatcccagagataatctcttccaccaatccttcacgaacttacttggtgttaatgaaaaacataaacatttaatgccatcactagccttggcgacttgcataatacgattgtacttggacaggtagtccctggggtccatccttccttcatatagctccatctgaggcattctgaagtgctctggcagtggtacttctatgattattttcacacacaaggctccgtatcttcttccttagggtctgacatggtgccgctttactctctcgagattctttctttgattttatcaactcctcgactttgcattccatgcatggagtcttgtcacttgaagattctcttttacgaacacgatcgttgatatggtttctcagatagttctcacggggtttagctttttctactttagctctttcttttttctcatttaatcttcttcgaagattagttgtggaaatacttctactattgtcgtttgatatagggtataactcatcagcatcatcatcattactagaattgttgggatgatgcttctccttccgagactctggcttccagacttcggcatcagtcttacttttctgcgtgactctgcctctaaaaatagtctagtcaccatgtcctgaagcatgatttcctttctttaattgttaaggttggtcaacagtgttggaatttttatgtttcttggtggaaggagtctttttaggattattgacagctatccctttatttttgtctttgtaaatgctcgaggttccaagatcttttggaaatgctctttcaagagcatcaaatgttggagaaacttgtacgtcgggagtccctaggtcagggcagtcatcacgacctttgttctagtcattattgtgagcagcagctcgttaaattgatcctaacaagataaccctactttctgccaattgaagttgtttagccatgatgaccatagggtctgactcatcaaatcgaccttattttgaaggtcaacttcaggcatattcttctcattttatttttttaatctaatatttatatgcatatattttgttattattcaaacgtgtaaatggattggtaccttaataataaatacatcatatttttttttatcaaactaataatatatggatgggttattttatttttgtattttgataggagtatctcataatttttatttttttgggaagaatataataatagttttttttttttttttaatttttttttatgaaatatctaatcaattccacgcgcgcgtaatatatatatgtgtgttatgaatacatatgtaacgtttgagtctatataataagtaataataataataat

SEQ ID NO: 21289 - DNA, 2407 bp, Cannabis sativa
ttattacttgtctttagcttaaaaattttgggctttcatagggaatctgtacccatctctctccaactcttggattaatgactctttaattatcagggttcaaatctggatagcaatgccaaaatgtggcgtttggttgcggatcttatgaatgatctgggtatgttgccatcaattttctctttttaaatccaaatctaaagatgaaatttcaaagtctttttttcaatacctagacagtttttatagatgctatcacatagttgacttcctgtaaacatgcatgggtgttattatcatgtttatcttttcagttggttccttataatttattttctcaacacttttaactttcagggagataagaagtttctatcattatggtacatttacatcttttagaactgctgataggtgaaatgaatgaaatgctttttctgagtcttgtatacctgcaaaactcaagtgtctatatctctcttaaaatcaatgttagcttaacttgatcagttatcctccttttgtatgattgaggctgtcatgtaataataattatgtgtagaaatctgggtgttactgttggtccatgagaaatgagaatcgacattatttttttgtaatatcaattgtgaaagacaataatgacattggtttcactaatttgataattatatgctgtttgatgagactgagaatctaagattatgggaactttttagccaaatgacgaagctaagttacaatttttaaaactgtcagaggattcatattaactgtcactgacttaaagtttgttaggccattctaccggcctttggtgttcgaattaccatctcgctttagtactggtttttctgttatggcaagaactgacgagcaatgctttttattggtggcaggaatgttgatggacctgacttctccactatttccttctgcttttgtttttgtagtttgcttagggagcctatcgagatcattcagtaagttcctttgatctagaataagaaagaaatctggcactcttgcttagtttcttgttgactttcatataaatatatattatatatatatatatttatatatttatatcttttttggcaaaagtcatgctttttgatgttgctggttgagttgaggcatcattctaaccatacgccaaaacattaagacatcaaaggcattgtactcaaagtaattgttcttaatttgtagctaaacctcaacagtaataataattgcacttttaaataatgctccttgatcagagttgcaacttagttctttcctttgtttacttagctggtgttgcaagtggagcaactagagctgctttgacacaacattttgctcttcagaataatgctgctgatatctcagctaaggtaataacaaaatattctggctgcttgatgaggaccctgaaatattgtttagtagtttgtgctgaccattagattgttttgctatattgtaaggagggaagtcaagaaacactagcgacaatgtcaggtatggcattgggtatgtttctggcccgcattaccatgggacacccactagctatctggttctcatttttgtctcttaccgtgttccatatgtatggtaagttctggtagtatgatttctgttactgcattattactttcatattatcgagtgctcagaaacagaagtgtctattctatgttctgtaagagctaaaatattaaatcttattgtggagctctcgcctgtaccactcaatagatgacttcctttccatgcaaaaactaggttatgttggagaaaacagtgagctggtacaggggttagatcattttggtcttctttctttctgatctcagtgtgggggtgaggtgacatccacttcaggaaacagtagaataatagtaaatcagaaatccttttcaagtttcaactgacaataaaaagaatcatatttatccaaatgtaaataaaatggtttcgtagttttggtacttgtactgtaaatgtttgttctggtaagtaatatttcattttctgtctacagcaaactacaaggctgtccagtgtcttgctctgtcttcaataaaccctcaaaggatttcaattcttttgcagcatttcatgaatactggccaaggtgatgcagtagacctttcataatttataccttaagcctaaactttatgttctaccataccttgtcataacataaggttaagaatataaattgtctggaaaaggtgcatttcagacagatattggccttctgaaaatgtgcaatcttcccactgattttagtgaaactctttagactgagatctgaccttaagagggcatgctattttaagtaggagaaatgaacttgtcatatttattttcattttacaaaatatttatttagaatgcaactgta

SEQ ID NO: 21290 - DNA, 6044 bp, Cannabis sativa
ataataataaaaaaaatactatataaattggtcaaacttaaatgtgtcatatttatcataagaacttttaaaatcccataataagtgtaatttcctctattagtaaacatgctataaaagttactcctatggtcccacacactatatttatcttcaatatttactttaatttttttaaaaatatatatatatataaaatattgagggataagttgaaaaatacctctttttttatacattaatcaaaaataccctcatattatattttttaaatatagatccacttttttgagtgggttacccaatatacccttattatctacttaagtctagtatataatttgcattaacctaaggggtttaatgggaataacatctataaaagtgaatatatcttaaagaatataaaaatagaggtaaaaattaaaataagtaaagtaaaatgggtataccatgtaattttctcaaatattgaccccatgacccaagaccgatgcccctatatagcagttggagtagtcaagcttttttcctccaatgcattagctactcttcttagtagctatacccctgacaaagacagatgggcaactagaataaaggcagtattaatggagctgctcttaggggtgacagaatagatcagacacaataacatgattcaaaatccgcacaagataaacgagtttggatttctcttaaatgggtttggatcattctcgagatgacatgactaacccgtttattaaacaatttattttcgagttgacacacctaaccagaaaatgacacgacaatgacctatttaaaagtatttactcttataattattatattttttgcatataaattgtattaagttagttaaatagaacatgaacatgtttaacgacttataaatgtgtcataaaacaattgtaaacatgttcttacttgtataaacatattaatgagttgataagttgatcacaatttagtgtgatcttttttaatataaacagtttaaatgggtcgggtcgagtcaacccatttataaacaggtttggtttggattttagctttcgacatggttaataaatgaatcaggtttaagtttgacatttactagtaattcctatgtctcgataaaacatggacacaacccatgaatacaaattgccacctctacatccaatccatatgaaggctaagtttatctaataatataatggatcaaattttagaccaaatctattatactcggcccattagtgaccaaattatcagcaccaaatctattatacttggcccattagtgaccaaattatcagcaaaaataattaaaattaagggattttcgctctcaaaaaggctccacaagcacgatagaggagtacttaacgcgcgttgagcgagcagcaagttctattcgaccacgtgaacgcggtttatccgtagtaaagtaaaagactgctcctgctgcgaaagttccaacccgagccaagcatagcaaaccgacctcatgccgaggcattcccagtgacacaggacctcggacctagctggatggacccctatattcgctatctgagagatagagaactgccagacggtaggagagaagcagcaaagataaggcagaaggcgggcataagtacttaaaattttgagtttgtaaccgccataaatctagagattctttttagcggcattaatatccaattactccgaaaaaagaatctattgatactctctcaattggttggacttctttatagtttacaattttgtcatgatatttatcaaatagaacatttaaaatttattttgagaagtttccaaagaatacatgaaattatcccaaatatctatgtcaacgtttgttatttatataaagagacaatgtcaattgatattgatattttgtttcatgtttgcagtcaataaaaattaccacatatttctatattatgaatacaactcacctcctatgaattggaaataactcaattagcagaaagcaaaagtgcatacatgtaactgtgtcttaaaatacaaacaaaaatagtgtcaacattgtgtgtattttatgtgtgtaaaataaatatttacctagcattgctgaaaaaaaatgacttgtaatttagatggaaggaactttgaacacattgcaagattaacggtgaaaaataaccaattattgcttatggatacagaaaacaaagaagaaaaaatggtgtttacagatatttaagaatgaattatttacaagaatgagataaggtgagtaaccttgcattatgtggggtaataaaaagatgtctaactgcaaagttgacggcagaactcctggacctgagcccttgaagggttattatctgataactgaaaaatgctgcttctaccattcctttcacatgtcatattcatctgatttccgaattggatcgtctgaaattacatggtaaataatgtggacacacaatgagaaatcaacacattttaacaatgttcctaaataaaggtgaccaagccagattgggggccttaaattctttataacttcctgcaaggtaacttaatgctctagtcatgttattcccaaaatcactcagcaagatgttaacccctcaagcagggaactttacgaatgaacattacaccacataaagaacaatatcacacaaaactagaggctaaaaagaaaaacaaatgagcagcatgagttacctcgcaaaattctttttgagagttgcagttccatcgagcagtagggacacaactaagataatgacaccatgaacaacgctgatttacattaacccctcgaaagagcataatcaacccaacaatgaatctgaaaaattacaagcttttggttataagacatcaaatttgttgacatgcaagaataatttaaattcacaatcatgtattgactaatctctcaaacttggaaattatgccatgctatacattcccaaaaagatgaagcaaccacttctattttcatctcattcaaataactatgcattaagggacacatattatggtacttcaatggtgagagtgttctttagaaatgtgctttaaaaattttaagatatgcctttttaaaacaattcgctggtaagaaatggagtacgagattaccccacaatgagaagaaccagagaaaaaatcaacagagcatactgatatgtcctgtgtttattaattggagtagcagtgcggccttgggaagtaaatttctggctaatccatctgtactggggccttactaaaaatataaatccaagcaggaatccagacaaaaatccaccaatatgagcaaagttgtcaacatgtgggaggattcccacagctaaatttaccacaatgatgaaaatgagagtcaccaatgccgccaactgcccagtaaatataacaatgtaagataatgtggttgtgaatattgtcaaatacaataaggtgatatgcgttaggggacagttttatttaccttatttgcatataaagtccaatttgtaataagctctgaaagcatacctcctagtaaaccaaaaagtgcacccgaggcaccaactgatatgccactttgaatgaaaagagctgatagcaaactgcctccaaaaccagatatgatataaagcaatccaatccttactgcaaaagaagaaaaaagaaatgaaaaggtagctcaaacctgtgagctagaaaagaagctattcactaaaccaatgaagaaaagaaatcatgtacactgggggagtctttctttcctttttcacagttatttatcatacaaaaatttcttctttattttggacacttcaatttaatttgagtatacttctatggccagaaaatgtatccaaatgttatgggaaagtagaaagaagaatgatgggttgggttgaatcaaactagtttagatttgtacatggaataccaaacccaactaaaacattaacaacttatataataagagctaaccaccatgaaaatttcaaaacacatctatctgagagattagatgcataccaaacccaaattcttgctcaagtcgaataccaatgaaaagaagacttaacatattggcaagtaaatggaaaactccagcatgtaaccaagcacaagtgatcaagcgccatgcttggtgtttatggaccactttatccacttctagagcacccatcttttctaatctgtaaagaggtaaaaaaaatcatacgaacaagaggaaacaaaaaaaattacaagagattgatataaggaaaattgctacatttcgcatttacagaacttaaggtgctcgtcatggtctacccttttaacaactttccatttaatcaatgacaaatatttgaaagatgagtgatttgagaagagaaaaagaagaggtcaacagaataatgccatcatatgaaactactacaaagtgatctattagacttatttcatgttagacctccttagcagagtagtgtaagatactttgaaaccactacagtaatgaagttcaagtatgaaactaggtatggcaaaactcaaaactcatgatcaatccaagtgaatgatggtaaaaggaaacaagaggattcaattggacgtgtggaaataatattctgtgcacataacaacagttcaaaattcaaagcgcgttgccggaaatccccaaatataaaaattctcaaaagaacactaatttctacttttcaaatgtatcaaatctctaatacttttatattgcattcagaacttcttctgagctacatttgtttaaaaactagtttagctttaccgttggattattgactttccaatgacagataaacatggcaagctctagaacttcaaaagctcattgatcactcaatctccaactcactaatcgaataatgaaacaaattacttgccatattaaacattcaacaaagagatcagatcaacattatttttctctaatctccattaacacattcataagttcaatcacaactttccaacaaaaatgagggataatcaacaaaacccatttctacaacaaccatataagcattccaaacggtatagataagattatacacatgcagatagagaagggcttacgcagaagcagagggacccagaagtgggttttctttcagaggctgaaaggaaaatcgccccaagaatcgagccaaacaagaagtcgaattcttggggcaatcgttaacggacatggtgacagcaaacaagacaatgttgaccaccacaaacgacggaacaagccaagaggtccatctcttgaatggcttgtcctcgccggaaggggcggtgagccgaaacggcgtcgctgaaggccgagaggaagtgtcaaccggggcaggatgacccacgttgtccccgcggcgtggtcggaccttaatctctacgtggttcgccgctggtgatgaaggactcctctccatcccgaccgttgatttcaaatatataaaaacttcaatgattttgatatctttctctactcgatgcaaaaattattaaagatttaataggtttttttcttttggatataatttggattacatgtacatttttttgtgttgttttggttttggagggtaacattttacctactgaatcggcttcaaatgttttcatacattgctttgttgtgtaaaataatcatctttttttatgttttaagttgctcatcttatacttcataccattttttttatgtccttagcactcctcttgtttttattctcaactttattagatcaccaaattcttcaagtttgagtgactcgactggctgtgatatacaattcctttagttgatctatagtttaacatatatagtattaataattatttattatttttctaaatatgtatatatatatatatattatattctttattaatttgccaattttctagtcactaggaggagcaactcctttagtttgaaatcttaagttggacgtaacaggaaaaaaattaaacagaacttcaaaataagcatatcatattagtagtatcgaaaagttcatgtattgatttactatatatat

SEQ ID NO: 21291 - DNA, 1385 bp, Cannabis sativa
gacataaaaggaaaatagctaagacatatttacattctttttagaacttataaagaaagatgcaacaaaattgaccttcattgcttgaagttcaattaacagaggttccatcttcaacattcagactctttgggcgatacaagaccggctgctcgcctgaatgctgatggtgttgggggagttctgggagacaggttaacaaactccagggcttgtactctcacttctacagggtagtctgcaacacaaccgattcttgggccagctccggttgaccattttagtgagagctgattccctaactgataagatttggctgccttctttgaattaattctttctaataatttggcttttggaacctcagctcttggactctgaagaccaccagataatgtcctcttgtaattgctttttgtttcaatctgggaaggtttggcagattcaggtgatgaggtactctgtggatcttctggagctttgacctcggcagtttcagaggctgttaaattatcgagcacagtcccagctgtcctcaccttgctctcgtcatatgtatctgaatcttcatttgccttgcgtatctgaagacaaggatggcaaaaatatcatcagccaaaacagaaagaatctaaaacaacatgcacgtggaaattcatttaactgaaaatttgaccaaagcattagcaccacttgtcacatacatattgggtgaaaagattcacggaaatactaaactactgttttacccatcatcattgtccaaacttgtttccactaataacatcaagcctttcgattcgagaccactaactaagcagtaaggtcagactaaagtattaccctggacttcattaaggttcactccattttctttgagaattgataagaaggtgtccaaacgatcatctgttggccgatagtggccactatatgcagaaatggactgaaaagtcaaagcaattgttgattagacaccataaatcagaacaataagaactttgattcggtattgctaatatgtctagtttgtataaagagatagaaggttcaaaaaactaaataagggtaacggttcaatttaaacaggtcaaatataaataatgcattactcagcacaagcgaattaatttcatgcataataaaattcttctaatgtataccttcagcgtcccaagctctgcttctagtctccctgcagctaaggtagcccccccagccaagaagctagaatgatgaaatacccctttctttttctgaaaaatatgaaaaaggaatcagtgtttcaggaaagacaattcaagctctgaaaactgaacaaattttctttaaaatgaaaaatataagtcatctcatgagtcatttcgtttttctttttttttttt

SEQ ID NO: 21292 - DNA, 1461 bp, Cannabis sativa
tgttatctagttggggggttatgtcctacatagctcttcttactgggcgttagctcacgggtactctgtgtgcaggtaaagacaaaactaaacagttaggatggcgagctcggggcgtggattacatgttaggggattatcacgatgttttggtttaaaaatatttcgttaaagattatgatttgattacttttgtaaaagttaatgtttaaaattttataaatgaattgagtgtttttgttttaaaataatgagatctcatactttggttattttcaataaattagtttgtcttttaaaaatggttttaaacggactagcgagtgtgacgtctagggaaatcggggtgttacaaaatcttctcattaaggcttctgaccacttgatgttgtcgatatggctgaaacttcacacacactaagtcaccaactgcaaactgaacatcccagcgctttcgatcagcttgcaccttaattttctattgtgcacgagtgggatttagcttaagtaaatcaagaatggaatcttgagacttgaggttctgctcaaccgtagagatagtcgtagtattatgctcaaattgaaccaatggtgggggttctcgaccatagacaacgaggaaatgagtcatgcccgctgaagtgtgataggacgtgttgtaccagtactccgcccacggtagccacttgacccactgattgggttcagtatacatgaaacaacggaggtaagttttgaggcaatgatgcaccacctcaatttgaccatcggactagggtggtaggcagtactgaagtttagagatgttccctgaagaagaaagagctccttccaaaacatactgaagaaaaccttgtcgcgataaaaaatgatggaacgaggaaatccatgaagcttgacaacaccacaaacaaacacggtggccactgtaacaatagagaatgggtggtgcaagggaatgaaatgagcatacttgctgaggcggttgaccactataaggattgagtcaaaactagtggagctcagaaggccctcaataaaatccatcaaaatatcgtctcatacttgttctggaatgggaagaggattcaacaacccaactggagattgggtcaagtacttgctttgttgtcatttggtacacttagtcataaacttttgaacatcccaacgcatgctagctcattaaaattagctatcaccctctggaaagtcttgaagacccctgaatgtcaacttattggactgttatagtactcccaaagtaaaatattgatgaatgtggaggaagaaggtaaaacaaggggccctttaaactttaaacatctctgttgtagtgtgtaccctttgcaatcatgccccctttgtaactcttgcactatttcacacaaaaaggggtcagctgccacatgggatcaaactagggattgatatggaggctggagacaactcctcctagtg

SEQ ID NO: 21293 - DNA, 3230 bp, Cannabis sativa
aaacttataaaaaagcacagtaaaaaagtaaaaaataccgtctggcaatatttttgtaaaaaaatagcaaaagttagtataccgtgtaaatttccctatagtttccatgttttctatatttccttcattaataccatttgttttgaaaaatacctattaattttaatttcttttaaaaaataaaagcataaatgtaattataagaaaaaagcccaattttgtagcccatgagaggcccactacaaaacaagttgttcttccttataagcccaacaacaaccgaataggcccttaaaatagtgacaatttcttttagaaaaatgacattattttacaaagtgaataaaataataatattgctttgaaaatgaaagagtgcattaattataacttagtagaaaagcagtgcaatgcaatgttatttttatggggcagtaaaatctgacacactacttcactttacattaaattttctagaaaatataaaaaataaaaatataataaaaaatttaactacgtagctccaaatacaagcaaaagtctcataaataataaaacagaagtgtttgtcaaaattcaccacattattattctttttttctatgaagaaaactatgcaagttgaaactagctgagttgagacatacccattttccacaaaggaaaggtaaactaaactaaactaaactcactaactttcttttctatgcaaatttccaagcctttacttttggttttattcgagtgagtattattattagatagtagagagaataaggattacgtggtgcagattcttttatcgggttatcatcctatcctatcttctcagatgatcgataaagtagtaatgctataataatgattaaggtgattaaaaattgccactttattgggtgtaaggaacttgttttagtattccttgccataattaatactaataattttttgtttttctaatatattttctcaatgagaaaactaattattttgatgtaaaattataaaataaagagtattgctataaggtattagtgaggtataaggtattagtgaggtgatattttgcgattaattagtgatattatataaaaaatattactttaaattatatgtgacctgatacttgattgtattaataccgataaatattgaaggttgctagacttaacatttctcatagcctggaaataagggtcattgtctctaacctccattcttttatcttttatgggcaaacccccatactccatctccattgttttatatagataatataattattaaatcaaatttctttattatattattatttttaaaaaaatattttaaagcctcacattctattgcaggaaagcattaaattctgtcacaacaataaattttcacctctctcacaacaacaacaatatatatccataattattatctctctttttttcttctttcttcttctcttcattttctctaaatctaaagagtgatttttttttttttttttgccatattatcacttttaacactttttcttttgttgggtgttttttgctttcaaaataggctcaaaaagaaattaaaatgaagaaatttttgataatcttctttgtgatttgggcaagtttgatcatgttcctccttggattctctaccactcatcaatatggtaatattcaaattttcttttcttcttctttgaacatatatatatttggctatatataattgattctttttttgacatataaatttatgattaaatattttcagagaagcataatggattaataataagtagaaagcaattaaaggaagagaagagtagttttgtggatatggaagattatgggccaattgatccagttccaagctcaaaggcatctataaggccaggcccaatagagcatgggagtccaataatcccatatataccaaagccttctcctcctcctaatcctaatcctaattctgaccattcctaattcctattcttactagggatagtggtatccattgtttggaatgaagatagtctctctgttatccctgcacccaaacactacttttgtgtttgtttttcttgttctttaactttgctttgtaatctggatgaatttgtgttgttcatgaccactacaccagtttgtatattaattctaatttttatatatgggtgaattgttaatgagtattatcaataggtagtattagaaaaacttgagtttttatatttaattagaaaaaactctcgtttttatattacatgagttaggattattctatcggttgaaaaaaaatcagaaaaaaaaaagataaaaattaagtttgatttaaatattctattatttaaatatttttgtgatgtgtaaaaagtaatatattcttttaataaagtagttaaattaaatataaaaatttaaatttatcttttattatttgtcattaaataaatatctaatagtttaatattttaaaattaatattgataattaaatttatttacaaaccatcaataaataatatctagtgctcctatatataaattgagattatttcacaaatagacaaaaataataaaaaaattacaaaaatacgatttcacagaattttaaacatttttacgatttttttttattttatttacagaaaatatggtattttttatgttgtactcttgttaattttttgttgttaatttgatgttatttagatgttatttttatgttacttttatgtagttttcttaattgttgtttctatggaaaactgtaaaaatgtgaaaattctgtaaacattaaaatataatttttttttacaaagaatagtgccttatgtatatattttggtccatatctctaaaattacaattattaggacagtagggttaatatcttttaatatcaaaagaagatttatactaatttaaattctgtattttagtataatgatatatattttttgaaattttattttggatcaaaaataattaggagctaaaattggttcttgtcaaaatgtttccttatataatcaaactattatagtaaaattatttctaaatataatcaaccaatcataaaagaatgaataaaaaattattaattaatccattcggaaaaatgattaattaatacttaaagttaaaacaaaaatacttttaattattaaaaattatttttaaaatatattttgttacaaaataaattttcagtgctaccgccaacctcttatta

SEQ ID NO: 21294 - DNA, 3287 bp, Cannabis sativa
  modified_base (3214)..(3215): a, c, t, g, unknown or other
  modified_base (3241)..(3245): a, c, t, g, unknown or other
tgaccaaaggcttgacaagctcacggttccatttcctcatcgacaaacttggagtcatgaattccccctgcatttgagaggggatgttaaagaaaatgaaacagaggaatgcacttgatttacactactctgcattgcagagaagctattctcttcacaaaggaatcgagaagaagatccctgaatcttttctgttatagatgtggtccaatgattggacacgtgtcacactcttctattgctgaaattaaggaggatatttaccgttagaatttatgatttgttaccaatcattgtatttgaaaaagattctcttttacctaatttctgccagctgtatttaagctaattgctcacgtttgtaattggcctttggccctttctttctatataaagaaatcaaaatctcagcagtaaattgagctgaggaaatcaatttacaatatctctaaaaattgactttctgtataaattttcctttttaaaagtgcttcttttataatttttttattaagagaaatattcatttgatatctaagctgtattgaaatataaatttggttatcatattttcaatgatatttattttctgctatacaattatggaatatgtctatggtagatgttatccacgttttcgaattagtgacatattcatttcaaagcccgaaatcaatcaaagtagtcccatttcttggcccaatcaagttaataagtcaatcacatgtggagtcaaactacgtctctgaatctggatgtaagtccagcttacagacacaacaaggtcggaccactttggttcgagaaatagtgtttggcccagaaggcgaaatggtccattaggattaatattgatactctcatgtgataatccgaataagggtaattgaagagacattcaagagcctctaaatattatcctacgcggcatcctccagacatagggccctactatgttaggggttcgtccccaatgtcaggcccagggagtgtgcgcaccactaaaaggaaactatctttttgtccaacgccatattctcgaacattctcagtaccaacacaacacacatgacacctgacatcactaaatggtccccactcatatgggtgaccgttatcttgtgaattgggcctcactcaattggctcaaagtcaatatatattgtattttaccccataagtgggcctagttgacacctttaaatcctaccgagtccaggttcatccatacccggttctagcctataaatagaacattatccgttcatgcaaagggttgaaaaatcatttctactatcaagagctaagaattaaggttcttaagctagggcaaaaacacttgtgtaagagtactttgaagcttttatagctcaataatattgactcgtggactaaggctcattaatgcctaacaacgtaaaaatctatttttcttcttcttttataatcagttttcaaagatcttgacaaacatttcggtatttttattgagagctaaagaaagatttaccatagttgtcatcaacaataatggttgcaactcgaaatgaaatgatcaaaccacctactcgagatggtagcgacaatgccgccaacgacggcgagaactggctccataaaaaaatgctcaggtgggtgtcgtgggggacgaggaagcgttggaggtgggcaaccatcttcactaagaataccatcactacaaagagctcgtccccgatatcccatcgacgaggatgactaggaaggtcacaaagatgagctaaaggatgatcacaacaaaaaccacaacaaggattatgaagaagagtactacgagcaagatcctgaagtagtatgactacagtatgagcttagaaatacctaaaggaggttaccggatctagaagaagtctcatgttagatgcaagaagcgatcagaagaacgccaaaaaatgttacaatgtcttggccaaattggtgttcatggtaggaaaataagttgaagaggcttccagagcgactgtctagcctaaacaagaggtgatcagggagggagatgagttagatcgccgagtagggatagaaagaatgtttggaccactcgaggatgttaaagaaggcagcactagcgaaactaatcctactgaagtcatcaaggtgggacgaaatttgtccctagtggtgaaggaaaaaattgtttctacagtgagaaagaaccaagacatattgtgctggagccatgtagacaagcaacgctagttcatcaaaaaagaaggccattagatctagtctaggtagaagttgtgaaagtgaaggttgataagttaacctccatagagttcctctaagaagccttgtatcctgtttggttggaaaatctggtgctggtcgcaaagccaaatggaacatattatacccctagtgatctttcttccaggaaaaacaacgagcatgcgagagccatgttgaatatttatgaagcaagcttcgacttccacgaaggaagattgaagttgcataaaaatttaggcttagacttcacttgaaaagatcaaagggtgaaagagtcattgggtgtaaagtagacttcaagtagtccttcccttccgggaaggagagttgaagatgtgcggtaacccagtgatcttcatgtgtagaaagcaatgcgcatgcacatcctaagcttcgggaagctttaggggttgcatgcctgcgccctaggatctcctgggcagtctgtttcttcagttaagtacagggcatccaatggcttctggggcaaagacgcagactcccagtaggataagtagcggaccgacatggaatttctaactggtttataatctcttgagtttctttctttgatgtaactctggggttgtagtcacacagggcaacagaagccttctgagcaaactgtgccaaaaatggcatgcttcaaccaacagtaccataactaggcctgattggaggcccaacagatgttgaagatactgatggtctcctcttagccaccgccattacaagatcagtttctgatcaacttcaccacccagtgcaaaggtaggggaattagttgtcagacaacagatctggccctcgtgctagcaccgacgctggagtctcaagctagattgtgtcgttatacctgacgacccttcctgagttagtcgtcgtaaccgtacagggtcttagcttcttttcctgatttattttgcatggttcacatgatttnnttcatgattatgtttaatgtataaannnnnttaagtccagaacatatgtaaatatatatatattttcatgat

SEQ ID NO: 21295 - DNA, 1867 bp, Cannabis sativa
gtcagtcttatatatgacttatatcgaaatctctgtctattgatgttctttctagataagtcttcatcctattctggacaaaaccacttatcatctggtcaacaaggaaagacttgccttgatgaagaaggttaaagtctctccataaatgctactcatttcaaataaactcataaaaatgatatgttcatgatagcttaaaaattaaagtatgttgaatctttgtttgtaggaagcaatccttataaactgtagtagaggccctgtgatcgatgaagttgctcttgttgagcacttgaaacacaatcctatgttccgagttggacttgatgtcttcgaggtaaaaccagatcatttctcattgaaaaggataaaaaaacagcaccatatataagtcaatatgggcatgatcatcatgagtaagctatgaagttggtgtgtatcaggatgaaccttacatgaaacctggactgggcgacatgaagaatgctattgtggtacctcatattgcctctgcatcaaaggtaataaaccctctgaaaactagcttaagtagcaagatttttcgtatcaaacaaacattttactttattaatataaaatatgtatcttatttagtggactcgagaaggaatggcaacattggctgctcttaatgtcctggtatgtgttcaccaaacttagatacatatatgatatattggtacctttcttagttcaaattgttggttaagtactaaacttttgttttgtttccttaatctttagggaaagataaagggctatccagtctggtcggatcccaaccgggtcgaaccatttctgaatgagaatgccagacccccagctgcagctcctagcattgtgaatgccaaagctttaggtaatagttcttatttgggtacctttaaaactcattcaatactttagtaggctagtttcttttgggttcaaagtttgtgttttgtttcttcttttaatcaggtttaccagtgtcaaagctctgagtgagaatttaaggttgatataatcacatttgggctaaaacaagagtgatttttctagctgatggaacagtgcatcatgggctctattggtaaatgaaattagaaaagcagtaacaacatattaatgtatattaaaaggactatttttacatgaaattactattgtgtgttatgtactccactaagctgtgttgatgttcattatattgggttataaaagaataataataataataataataaagtgttattattcaaaatattttatgttgaaattttgtgggatatgacctttttaatacagttattctataatatttattaagttaattttttttaaaaaaaaaaatacaagaacagcaaaaaaacaaaaaaaaaaaccctaagatccctgaagaatttaagatacctaaatacatataattcaaacaatcgaaaaatgtgctcaattaaattataaaaatcattgtatggattaaaataatcaggacgcatgtagtacaatcgacttaatgaatatttattaaaagaatgacataaaaataatcctatttctccatgtgtttttataaaaagtttaaattctgagcttgttatcattgttgtttatgttgatgatttgaatattattggaactcttgaaaaacttttagaagttatggaatatctaaagaaagaaatgaaagatttaggaaaaataaaattttgtcttggtctacaaattgagcatttaaaatatttttcattcatcaatatcaacttataatgaaaagattttgagacggttttatatggataaatcacacccattgagtagcccaatggtagttagatcacttgatgtggaaaaagatcatttt

SEQ ID NO: 21296 - DNA, 6072 bp, Cannabis sativa
  modified_base (6034)..(6038): a, c, t, g, unknown or other
agggagcttcatacacttaaagggcatgttgaatcagttgtcaagctcaaaggacttgacatagagacaattcaacaacattataccgtttgagagtttgtgtttatgtttttttttttggtaaacaaattattaagagagaaagagagaaaagaaacataaacttgaatgaaactatggaagtgtagtgtgctttcactctttttttattttcttatatggcttttatatataggaaaattgcaaagagttgagaataatccaactaagtttgattgattgattgctctaggcatttaattcattcaaagttggagaattttaggaataattctgctactttgcatagattttactttttttatttcatcattctttttcaatgataattctctatttttgacttcagctcaatcctctatataaatattatttgttcattttcagtaaatattattaacatattattattctatttctattctatgggatttttcttcacttaaaagcaatcatgtaaaaaaaatacttatcaaaataacaacattaatttatttatatataagggataccaaacgtggccttacttcattatcattcctcattaatgctgcccaacctgggtagccaattagtacgatcatcaatattcctgtttctactacttgtcgaaacgccaccgtttcgtttcgtcttaaacactcgaaacaagcaaaaacagttaaaaaaacgccacccattcttctctctcttttttcttgcatagtcagaactagaaattgggtcaacgacattgaattcctggtctgatctcgaagaagtggtttgatgaagaagcaggggaacaggagattgtctgagagataaacgttggagctttcgaacggtggcaatgggtacgacgtagtatttgtggccgaggcttaacatggtctcgggggagagggttgcccacggttggcgaaacacgtgggggtgagccacgtaacatcgtggactccgaaacatgatttctgaagcttgtattggtctgtcatgtaactctacgtgaccgccggggtgtactattttcacaaagaggttctttgagttgttagtgcacaacaaccagtttgttaaggatttgcttgttgttgatccagccatggaaattgagagagggacagagttttattatgctaaataagtattagtacaaacaaattctcttggaggagctgagaatattcaccacaatccataatattcatacaataatattatatattttaaattctattaaggatttttgttattttaaatttgcttctgaaattttagaagattaaaaatttttgatttaaagatttttgtcccataaatgttcactggatgtgaatacatccacaaccacactattattaaaattgaatattattagacaaaagttattagaatttaaaaatctcaataattttttttaaaaaaaatatattcctatatacttttttttaatttttttttcttcaaatttacagtttagatttctgaaatggttgcagcgctagttgcaataatgatttttatacaatttcccggaattttaaatatttttacggtttttttgattttatttatagaaaatacgttttttttaatgttatcttgttaatttgttgttattttttgttatatgtatgttattttttgttattattttgatgctatttaaatttaattttcatgttacttttatgtatttttcttgttgtttttatgttatttataaaaaaaaaaaaaaatctttaaaggtaaagatgtaatttttttaaaagaaaagtaatgctttgtgtaattatatatagttaggttcccaagggaccaaaccatggccctcccaaaattttggagaaaaacaaattatatagtaattttatattatttaaaaaataataattgtatttggccctctttattttttttttttctctaatcgtttgatttgatccgcttctgcctccgtccttgattccaaacaacctattggatttttcgatacaacgattattttataagaaataaaagaaaaagaaatttcgataaatacaaagaagactctaatatatatatagtttatttacaaaataacatggattatatcgttgtaaatcttgattcttgagattggattatatgtaacaaactttagccaatgtggttgcagttacagtacaaaacaaaagtttgattagtttgggaacttataaagcttttttacgtagaaaattaaggtaatacaccattgatagtgttgtttgtttcaataagtcaaatatatatttacatcaacacaaaaggaatatgaagatgttgagctcaacttcacttaatttagttcaatttacaactctaataatagtaaaaagaaatcttctagtataaatttttaaatgttcttttctgcctgcatctgaatccaactatccaatgtctaatgactaagactatgttatatatatataaatatattctgtggtgggaatagaacatgaaaacacatacatatttaagtttttttcttttcaaatcagtgatcataagggttggaacagacagagattggctctgttactcttagagatcctccaagctccaaaggcacaagaggaataagcgaatgcagcacatcagttatcaatggccggtaacttggctctggttgcacacatagaactgctactgcagcaacctgttcaatttcatccccacattttattttctaatttaacatctaatatcagaaagaaagagaaacaaaaatggtgatttcgataggaatttttacctggtagaggtgttttaaatccatggtgtcttttatcgcaggatccacaacatttggaagccttgttctgtctgtgagctgaggcattgcctgcaagttggttcgaaaattatgtttagagattttaaggctatgtttggaaaatgaatttcggtggggatggggaaagaaaaaggtaagaaaaaaatgtttcacatgtttgatatggaaacattttccttacacatttttttcgatactaaaattcaatttccaagcatagccgaaagaaaatttggaagagggccatgagttttggaggttcaaggatgcttcttacccttttcactagagactggttctgatctggtatcttatattcaacaagctttcttccaatgaggagctcaaaaagaacaaccccaaaagcatagacatcacttttatcagttaattttcctgaaatgatattatgacattatttctatttatattattatgaattaagtgtatatacacttcatgggaccacaacatgctaggcctgagcagatatactaaacagacaaaaacaatctttgttttcttcttaacaatcccagaaaaaatccaaaatcaataaatgcatacataaaaacacaatgagtaagaaaataagtaaaggaaaatgcttcctatattcttacaggttaataatgaaagaaacataccatccaaaatgtactctggagctacataagctgaagtttctgacacttcaatgttgtccttgttgtcaaacccagaagttacagcaattccaaaatgggaaagctagatcaagaaaagggaaaaacaaataaatatctcattaagggaaaagagggggtaaagaatcaagcatcaaaaggttactgatatgatatattctcaccttagcactaaaattagaatccagaagaatgttacacaattgtagatctctatgtaccacaggaggattacagttctcatgaagatattccagtcccctaacatcatcaacaacggtggttcaacgcatattaatacactaaacggtcgaaaatttcggttaaaattagtcttgtggaagtacctacctggcaacatcaacagcaattttcaacctgagatgccaagttagagctgatccttgagtaggccctaaagaattaaacaaacaaacataatgccaatatatagttataaagttttattcaaaagtctttatttcaaccttgtcgttttcagttgttgccaatagaaaattcttaccatgtaattgagtttctaatgatccattttgcatcatttcatagacaaggaaccttgttttgttatgaatgcaatatcccaaaagtttgataatgttctggtgccaaattttgctcagccatttcacctcattctgatgtgtaaagaaaagactagtaaggcaaaaaagcacacacaaaaaaccagtttcagtctcaaatggggaaaacattacattaaattttctttcagcatctgatccagtagtagtaacatctactttcttcacagcaacaagaactttttcatctaaaagagctttgtaaacaattccagaaccaccctcactcaaaacattacttctcccaaatttgttagttgcagcttccaacgtttgataatcgaaaatagccactgaacccttcctactacttcccatccttgaggagctaaaccccaccattgctgaactcaatgataacccttttgaagcctcttctaattgattgaaacgcatttatgaaaaaacaagaggaaatgaaggcaaaacaaggttcataatctaggtgatttcaattaactttttaactaaacaaaattaatgaagtaatggtgaaaagggaacatacccttttccttttggctcttcccattggagtctctcaactttctatgtctataaatccaaaagcaagagagaaacagcaagagtccaccaaggaaagtggaagaaacaattagagcaataagaattctcttgttcaaatcatggtggtgcactactctaacctcaggttttgctgctgctaataacacaacaagaatatttgttaagcttttaaaaaaaaaaataccattttcaaaattcaaaaagggggcaatttaggtaacctatcttttggttctgagaagaagactaaagaggggggaaaatatcatgtatcaaaagctttgtgcttttcaagttgaattgctttggttatttcttcagttatttgtatgaaaatgaagaaaaaaaaacaacccatttggatttaaaacaaagaaaacagcaaataaacctaagcaagttgagaaccagaactcaaaacgaacacaccatgaaaataaaaacacaaactttaacgccaaatacctgaagattcatcctccattgaagaaaactgagaaatgggttcttcctccttaagaaaaacatgacgagaaatgtaataaggagaagactctggtcttcttgcatcaacaacaatgagtgagaacaaaatggtaatgattagtacccacatgggtattaagagagaaaatagattcattagttactttttcttctactataataatatatatagtgagaagagacagaaagattatatctttagattattaatggatgaatgagaagttgtgctgttgtgtaaaatttgaatctctccctctctctggtttttccttttttttttttgttgggagggagagagaagtgagaagaagacaaaagagaggaggaggaaaaccaagaaagcacttttattttaattgtagggtgatctgtatccatccaaatgggacatgaaatcatgtggtagttatcaaaaggtaaaaaaacttcactcaatcacactcactcttctggatacacacaataaatttgacattctccctattttgtttaatttaaatattcatttctacaaacatttttactaccactttcattttttttttgaaatcccatctacttcgagatgacatagaatccacatttattcattaattgtcttatacaaaataagtaattgaatacaaggatagcctaaccatcaaaccttgctaactatagttaataaaacataatcaaaattgaaacagttataattgacgatagtactttactggtgcttattaattaattatttttattattattattttaatgagcaatttgcggcaaaaccccttatgttttaatttttatannnnnaacccccttatctttttttttggtggcaaaaccc

SEQ ID NO: 21297 - DNA, 3984 bp, Cannabis sativa
attgttataaattaaaaaattgtagaggcaaaacgttcctagcatgttgttaaaattcctatttatttgattttattattattttttaaaggagaataatctataaaaaaaaccaattattatttcaaacttcaaagaatataaataaataaaaagaagaagaagaaaactctatcgtatttcattttcaaaccaataaattaaataataaaatgatttcccgcacaaacaagcactgcgtctccttccttcctccctccttctgtcctctgatgtgagatgagtctccacgctctcactaccacattcttctaattcctcattccttcttcaaaccctaatccccaatttcgctttccattccttcaatggcctccaaggtccccgaagaaggctctaacaccaagacagaggacgaaaacctcgctctccgcaccaagaacaaacgctctcgccgagtcagcttcgcggacaccgagatcacttccgttcactttttccaccgggatgaggactacgagacgcctcctgactccaagcccagctctcgggccatggacactgccttggagcctgacaacgaggtgatcggatttttcagggaacttggcggtgatagtgatgattccggagacgatgaagggagtagtgatggcaggaaatcgttcctcaggcctattggatcgccctcccctgggagcagtactgctggttctgtcacatccaatgatggcaagctcttgtttttagcccttattgtctgtttggttctcgggaaaatcatatttatgtagaaccaaaaaaaaaaaagaaactaataaaaaaaattcgaggaagaattttctgtaagaagacttctgcaaatagtttagtctttcgagttataaaattaaactatctcgattaaagattcgtgctaattgtctgtttgttgtgaaatgttctccgtctattccttctattgaactgtttgtatctgcatacaataaaagaacgattccttgtttgcatttgtgttattctcattgtatttcttactattgtaactgggttgttgttgaatgactaagttcttattgcctgttaacaatatgaacacccagaatgatttatatccggcttcctttttgcagaggacaatttctttggtcctgtatcgtcgagtttcattagacccggaagactttctgactctgctgcctcagatgaacatcatgagacgactttggatcagacaactttttcattgcattaccgaagtattgcgatgtcagattctggagatcctaagactccaacagctgtccgccttgtttttgatgaaaagacagcaacaaaggattctaatcgtactgattcaggaaactctatggcactaacagaatttaagaaggtaagctctcaatctttggctccctttgaaaaggttagagttggtgaagattcagatgacatgagtatggtggatgcaaacccaaataagtataattatgggtggctatcacccacattagatgcattattggctgaaaccagcaatgatctcaatcctgaaccagttaacatttctgccaattctaaatcaccaatgagtgaggttttgatatatgaggccaaccaccacatggatagtagaaatggtagagattcagaaattgacattttcgatactcatgagaattcggctaaggtcccttctgtatctaacatcaatttgggtcaaaggattggtagatctccttacaaaattgcttctgattgcttgtctgatcaaaataatggtcaaactactggtgtctccaaccaaatgcaaagccctagtcctttaatcagtttaagaaacctatctatcatgaatactcctacgtttgccggagatacaagcacagtgtctcctttctcaaaactgacaaatgcccaaagtaatgattacatgaagcatgaccagggcattttgtcaattcaaaaaagcagttctaggtcgataaatcctaatatatcatacatgggttcctccaatatcaagcaggggactgacaacttgaaacatagattgtccaagtactcatatttaagttctccctacagtagttttctggataaagatggccaagaactcctacatgagtctgtgggtgctcctgttgcttgtttggaggaacgatttaacaaagacattgaggaccttgtaaaagatggagagcctctagattcaatttcaactggtacacagagaacaccattgtcttcacacgttcagtcggcatcatccggaggaaaagtaatgcaacgtgccctaatttcagagaattctgtaaataagatgttgtttgctcgtggaactgattccacattggcttttgatcatcaatcccctaagaataaagtcatctccaattttcagccggagggctctgagaacattcaaatcataacaaaatcaccgacctctacaatttacggtagtggagctactcccagatctacaactcttgaggtctcaaacttcttgcaatccttttgtttttctctgcactttaacatcatatgcatattgcactcaatatgtcttaattttaaagcatctagttatcttttgagcttatatttaaatggttcttgaaacattggacttttaatttaggctggatgttggactggattttactgaaaagtgttaaattgtcaattgaaggatgcaccttttctgcagtaatttcattaactttggatatttttgtcaattatggaatcattatcatcattgtttcttttacattgctgataacatttttttcttcaataaattgagtaatagttactgtcacttgtaatgataatgttctttttggtcaaatggataacttagagcccgtccattaaagagttatctcacagctctttcaaggatgtgccaatccaatgccccatgacggaaacaccaaataaaaaatctgcacagctagattcatttgagagtccctccaacaacattctatccaagagttcccccaggaaattgattaccaagagtcctctcaggaaagaaccgacttcgagatcccccaagaaactgcaacttcagaattcccctagaaaagagtcaactatgctttgcactattaacagagagtcatctcaaagtccgtcgatggaaaatcttatttcgagtccccttgggagtagagcaattcagagttctaccaggaaagaaccaacagagaattgttccagaacagaattatctaaagcatcaaatggtggtggcatgccatcaccgcagtctgatttcattaggcatgaaaacaacaatcttcatgaggaacatcatatttcacagagtcctttctctcaaaaagaagcagagatctcttttgaacgcaaaagaagagcagaatttgttcttgaggatggaagacacatgtacaaaaatcccagggtaccgaaaagtccagaacttcaccagtttggaaataatgagtccgagctcctttcatttcatgctaataaaaagtctacagaatcagacaaaactgttggtgacagatcacagaagcattggcttgatgtaagtgtattacttttcatgtattgtgatactgacatattctgctgtgctgacaaagttagtaaatctttttgtcaactccgttgtgttgtcttcacttaaaagagttattttgcagattttggccaagttttctagggatgcagatcctttgctcttgccatcaataaataagctcaatgtccaagcagtaaattctccttatgtgtgattttggctacaattaatcttttcattgtttcagttaaataagtaattaatgtttcatcaatatgtgcagattagcatgttggaagatgttttgcttcatttcttgaagattaagaaatatgagatgcttggttctgaaatccagtcccaggtatactgagaaaaggattttgttctagggtatcttaaattttttatgcatattc

SEQ ID NO: 21298 - DNA, 2486 bp, Cannabis sativa
  modified_base (1987)..(1989): a, c, t, g, unknown or other
gattggatttgagctattgtacggattggattggatccaaaaaatgaaatccgcatttagtgcggattggatgttgtttgaccaaaaaagtgcggattagatcgaatgaacagccctattttatatcaaattccctctttaattgcacattgagttgttaatttcttgtatatttctactagccaagagaatatcatctacatataatagtatataaagtaactcgccattctactctctgaaatatatacaaatatcatgcttgtttaaacccaaatctagttacaaagtcatcaaatctcttatcccactatcttagagattactttaggctatccaaagattttctcaacaagcaaaccttttccttcttcccaaactcttggaaaccttcaagtggcttcatcaagattatttcttctcaattaccatatgctcaagttctaggttgtacaaattttatgcagtagaattcaatgttgagtagttgtatatagtcatatatataaaaaaaaatatctactcatgatataaataatttatatttacccaagatcataaatctcattagtatatcataatgataatcatgcaaagtatacacatgtcgatatatgtatatacacttaaacatacacgtatacatataaatatatacacaacctatacattcttatgcatgcaaatatcacatataaagttcagaatcatatacctcttgaatcctatcaagtgtcctcgattcttttcgtataaaaccaaggtcttcctattctcacttcttgatgaaaattaatatttacaccttagatcttctggagtgttctctacacctcaagattgtgtgggcacatagagaatgaggtaattttctaaattaaagtatttctcaacacatgagaactttgataatcaataggaaaaatgtttcttgggaagaaagattgaattttggaagctattcttaatgagagtagcctactattcttattcttgattaagaagagagaaaaactttcaaaaggctaaatctatttctatatcattatatagtatatataggctaggttaattttattattcataataataaaataatatataataataatataagatgataagaaactagtttaagaaatatcttaatttaccacatataaatgaccttttaattaatttatttgttgatccaaaatttggtcaactgactcgaagtcgcaaaaaataagtaaaaataagtaaaatttggtccaagcccaatttcaatggtaatggcttactccttttttagttgtattttttgtatactaaagtttagactagacctggtgagcttcttgagatataaatgtatttcagtaaagtttctgcgtacaagaaaattgtgaaccactctcaagttgatggaagtttaatatttgtagcaaaaaggaaatctaccaacattaattgcgtaaaatataagcctcaatcatcttccttaattttcgagagttggatgaggttggatcttaggtgctggaggtggttcttctaacttggattccacctctaggagggtagcagaggtgtttgttaccctggagggacctatgcccctattcgatgttgtgtttttgcatttccatcttatgagggatgtcttgtctcatgatcgaaccctaagtgttagggttaatagataaagttactagagtagcttgatgaagcttacttcttcgtactctggctatatgcctcccatgtctagctctggggtgaggttgcatgctacctttatccacacttgggaagggaaacctcattcagttgatagacttggttgaattgcagtgattgatcatctcttggtaggtctcggatcaggggttgtaaggtgtgagttgacattgggaaatcgcactccaaggcacctaggagcatcaccatgccacccaggctgtgaggaatataccagcagggccggcccaagcattgggcagcnnnggccattgcacaaggcccccatttttttaaggcccaatttttttatttattttttttttaagtaaaggcctatttttttcttttttttttcttattatatacacataaataaaaaatttataattgaaaatttatgaataatttttaaaaaaaaaaaactagtaataaaattgtagttttaacatacacggtttttttttttttaaaaaaaaaaagcccaattttaaaattttgcacgaggcccccaaaatacttaggccggccctgtataccagagtggcatagggcatgccgctcaggtgtgttgtgacagtcagtagtcccgtgcctaggtgtgcctacaactttgatttcatctctatcaacttttatggcaatgtcaatatgacataggtgtgcctaggtctatccttgtgaagaaaaaccctagactttcctttttaagaaactttaccataatggtctaggatgaccccttagagagagagagagagaga

SEQ ID NO: 21299 - DNA, 4242 bp, Cannabis sativa
aagatactaaccgaagaaccacttactccatattttaaattactaataatatataaaaatggctaatcaaatcataacacttaaaaaggatgattaggatatgtctccccaagttttgacatatattaaattagagcattaatgttagttccaacaccattctaatatgtttcgtttagtagtttcttttattatttattaaatcaaaatgtatgagatacaattttgaattacaccttttaataactgtataccacctcttgtggcattttgtattttaatgtattccttaacattttttattaacttatgttgaatttaagaatttagttcaattttactaacgaggctatattgacaaaaattcaagaatcataattttgtacctgttaaagtttaagaaacatgattgatgcttgtcaaagtttaggaacacgatttgatacatggacaattgacactttaatcgtctactagtaagatgagtattgttataagatatcaatagtacgtaatactttgtaaatagttagtaatattctataataattactaaattaaattacataaaacttgatacttaacattattagtgtctattaacattcttttactaagattaagtagagaagtccttaaatttaataatttgaataaagtgtaatttatagtgtaaatatttaagtttaattttttacggtaatcataccaaaattatatttctgaaatttttataagtatctaaccaataaatgtctgcataccaataagaaaatgaagaattattaaaaatttaagggccaaattctaaaaatataactaagtatttatttgtaaccgagaataatttaccaaatcttagatgtgtatggtgaaagagtattatgcagtaaagttcaaagtaatggaattgaatacaaaaatggaatgatgacgaagacgatgaagatataataatggtgatgagcatcacaacaacaacaaccaccacgatccctctattccattctctcccaaaaatctcccaatcccaaagtcctcaactttctcccaaaatggctttgaattttctcaccaagaaaccatattctcctccttcatgggcttctcatctcaaccctttacccactcacaccttctctctcgccaatgtaatcataattcaatttctttctctttttccccaaatgggttttctttactactctttctcattactattgcttcattgattttgtcaggtccctactccgattcataaatggaatcttcctaatttgcctaacaacactgaaatttggttaaaggtactgtcttttcttttgtggttgcattttgattctctgaaattattactgttttcaattttgtgtgctgtagtgaattcagttcagttcagttggattgaaacttgaaattgagttgttttgattgatgcccatttgtattgctttagctataataattttggaaaagattgcagtgagttcagttcagttgggttgaaacttgaaattgagttctcttgattgatgttcatatgtattgcttttagctataattattttggaaaagactgcagtgagttcattttcatagtaatgagctcagttaattttttttagtaatgatttttctctacttctgttttggaaggattgaaattatctgggcattttttagttttaaatattattttgaaaaaaaggtgagttcagttgggttgggttggtaatttgctttagctaaaattattgtggcaaagattgcagtgagttcatctgtatagtagtgagctcacttagtaatgatattgattgttataatctgggcatttttagttttcaatttgattctcttttcttttgttgggacaaagattctctcttttttttttagtgtaaagtagttgattcacaaatggaatcttcctaattttcctaacaacactgaagtttggttcaagatattatttttcttttatggttgcattttgataagtcattttttggctattcttgttagttcatcaatgtagtgagctcagttcagttgggttgggttgaaatcgagttactttgatagatacccatttgaatttctttagctataattattgtggaaaagattgcagtgagtaaagtgagctcagtttaatgatcttcctctacttctgtttaggaaagattgaaataatctgggcatttttagtttttgattttattttgaaaaaggaacttctttttgtcctgccttaattggcttctcttttgggaaaaagattcttttttttaagtgtaaaaagttggtgattcaattcatggagaaggtatcaatgttggtttctctaaaattgttactactttgtgtgttgagttcagttcagttgggttgaaattcagttctttcgatttgatagatacccatctgtatttgctttagctttaattattgtggaaaagatggaaaatttgctaaattaacaacacgaaaatgttaaattagcaaaatttttattgctttagtagattttacaaaacactcggaaaagattgaagcaagttcatttgtatagttgtaagctcagttaatttaaatttcttaatttttcagtattgaaataatctgagcatttgttagtttttgatttgattttgaaaaagggatttctcttttgggacaaagattctttttttattaatgtaaaaagtaggtgattcaattcatggagaaggtatcttgtgctatgaatttgatacttttattcatgcattgttataaggtgcttctttgatttttttgttctgttcttcactttagttttgtactgacataaattattgcttatggtatcttagcgcgatgatcttaccgggatgcaaatgagtggtaacaaagtcagaaagttggaatttttactggcagatgctgtagaacaaggtgctgattgtatcataacaatcggaggaatacaaagcaaccactgtcgtgcaactgctgtggctgcgagatatttgaatctcgactgttatcttatactacgaacctctaaggtcaataatttcgcttctggaattccttgcttcttttgtttattggtttacggttcttcaaagttgttaacttatcatttttgtttcgattttacttaggtatttgtggatcaagatccgggattgacaggcaatctcatggtggagcggttagttggagctaacattgaacttatttcgaaaacagaatatgcaaaaatcggaagtgtggttcgttatttttagtctcggataatgttaagcttgttattatccatgcttttttttttcttcgaaacactctttaactttgtttcattgcatcattaatcagtaattaacataacaatataattagatttcatgaattaatttttttcaggctcttaccaaccaccttaaagaaaagctaataagtgaagggaggaagccatacgtcattcctgtcggtggatcaaactcgttaggaacatggttagattcgcttactgatttttgtttatcattttattcgattgcattgatcaaatctaatctgtatgatccaatccaatctgcacttttgcgcgaattggatttgattgaatttgatagcattgtgcggattggattggatgcactgtaagcaaagtaatacggattagattggatgaaaacccctagctcaatgttcttatttgctttctcgaatagtcggatgtgtgtatccgaaacccttgcattgagctctcttgtcattctaaattctaattatctgagttgactctattttaggggctatattgaagctatccgagagatcgagcagcaactccaaagtgagaacgccggtgtaaattttgatgacattgctgtagcttgtggcaggtaattttcatgttaatcctagatatgttctttgcgaaaagagagcgaggaccgcatatttctaaccgcattttaattccatcagtggcggtacaattgctggtctttcattgggatcatggttaagttctctcaaggcgaaagtatgcatcttttctttgtagatttactttcattatttacagacttttctagcgtaatctaatctaaactagaatctaatatgttcttcaggttcatgcattctcagtttgtgatgaccccgattacttccatggcttcgtgcaagacctactcgatggccttgatgctaatgttgactcgcgtgatattgttaacatac

SEQ ID NO: 21300 - DNA, 3564 bp, Cannabis sativa
cttgttttttaggattaacttagcatgatggttgtctcatatacacagtttcttataaggcaccactaagaaaagcattaacaacatcgagttgcttaatagaccaattgtatgacactgctaatgatagaattgtcctgattgtaactagtttcacaataggggaaaatgtttcttcataatcaattcctggtgtttgcaagtaccccttagccaccagtcttgatttgaacatattgagagaaccatcaacattaagtttgaccctatgtacccacttattgtatatgagatgcatcccaggttgatatggaacaagtatccaggtaccaacatttttgagagcagtgaattcctcattcatagatgcaagccatttatgattttgtaaagcttctttaacattccttggttcagttgggaggagagactgagctaaaggatgttttatggccatgtaagcttttggtttaactattccattttgtgatttagttctcatagtgtgagttatggctggttgatcagtattgggtggtaactgaacttgagttgggttaggtgaagcaactagaggaacgatgggtgtaatagtgggtaattggcttgcagtgggaatgtgtgggtgagtaattgacataggatcaacaacagacattatagggccaatgctagtttgaggattagatgggatagtaactggtgtggggttttgcacagtagcaggctgagaagcagctttgtcaaggttgccggtttgctctcgaattactggtgcagggtgtcttgaggagacagtaacacaagttgtctcagtaataaaagtcaagacaccagagaaaccagtattagtgtttaataaaatgtattaaatttggcagtaggtacattaattggtgaagaatttacttgatatgtgattgatgtagattgagcagcaactggatagtgacattcattaaaaacaaaattcctgacaatgaacattcttccttgattgttctcacatagattacccttgtgatatggggaataactaaggaagatacaatgttcagacctgaaactcattttgtgaggaatgaggatgataaggtctgagatgagggaaacaagcacattcaaagggcttcatgatggcatagtcttgtgtttgcccaaacagacattcaaagaggcttatgttattgagaatgggagttggtaatctgttggtagtgaaagtagcatactgaaaagcatgccaccagtatgaaaattctaagctagattgtgctagtaaggttaggccagtctcaactatatgcctgtgtattctttcagccttcccattctgttcatgtgtgtgagggcagggatgtgagaaagtgataccttgatctgttaagaatctcttaaatggtttgtattctcctccccatcgacttgaacacctttaataggtaagccaaactatttttcatccatggttttgaactggagaaacatgtctagggcttaagaattgaggaatatgggataaatccatgtaaacctgctatagtcatcaatgaagtggatatattatttgaatccacatctttggattgtatatggaaaggtatccaaaggtcggtatgcactaattcaagtggttggctggctctattgtgagatataaggaatggtaatctgtgatttttgccttgttgacaggcattacagaattacagggttttaagggagcctgtatggggtaactttggtagtaatttggttaatgtggccaaggatccttggccaagtttgcaatgccatgtgtttatatcagtaaaagcgaaagcataacagacagtaggcaaagacaaattggaacaatgttctttattggtagatgattgagtacaagaggaaacatcattatttatactacagtgattgaatttcaaactacaacaagaacaatgaacaaattgagattcattggttaaaaggcattgcaaggaaccattggacttggcaaatccttcacttagcatgtatagcccatctctacgctttcctttgaggagaagagcacctattttcttgtccttaacaaaacaacaatttttgtgaaattcaagaaatatatcattgtcatcaattagtttagaaaacctgacaatatttttagttatggagggaacttgtaagacagatcattgcaattttaaaggacaagaagaaacagaagatggaagaacagaggtgcctatatgagaaataaggagtttcttaccatcaccaacagccaatgttacagtgccattgtaggtctgttaagtgtcaagagttgaattatcgaatgtcacatgggcaatggctccagtatctgcataccaggtgctatcatcaccaaaaacttgaaccatagtagtggtgtatgcttgagggtcatattcaattttgagttaagtgagatgagctctgggtgtaggttgattggatcttggcaccacccaattcttgtcaaacctgtaatgacatactggggttgtgtgactagatcgaagacaaactaggcatgtaacacgttgttggttgtaccttggacaacccctgccatggccagaggaagcatgaggaggatcagttgaagcattcttggatgtggcaaaaggtcgaacaccaccagatcttccatttccaaatgcaagattggcttgtatttccaccgcaatgtcagtcatattttggtgatgctccaatctgctttcatgagccagaagaagggcatgaacttcttcaatcgttaatgcattacttcttgaggtaataccagatacaagcgagtcgaattccaggccaagtccattgagaagttgtagaacaagatcttgatcattgacaggggagcgagcaatggatagggcatcaaaaatggactgaaccttgtcgacatattcagaaatggaaagattttctttttgaatagtggaaaattgacccttgagctgaagccttcgagcacgtgtttgactggcaagcatatgtgttataattcgcaatgaaagcaagtatgctttttgtcatggaggatcgaagccatgaacggaggagttgatccctccttcgccattgcgcgtactctgggtttgggattcatgtgacaagattttgaggtggtggaactccagtaaacaaaatttcatcaagatcatgcccaataacagttggaaccacctgagatttctaagataagaagttgagatgatcgagtttcagagtaagggatgaggtgagagagttagaagaaggattccatggatgatttgtaggggcaggggaggaggaggcatgtgccatagacgcaggagcagtggagggggatgcattctgttgcaggtgcagaaatggatgaagaagatgacatttgtcaaatgcgtctgataccatgaaacagtaagaaagtgaaaaatgctaattgagattagctttgcaaaagctaatcaaacaattagagtagtgatttatttatataagccacaagtctgttacaaagcaagaaagaaaacaagattatatctaacaattacctaacta

SEQ ID NO: 21301 - DNA, 5396 bp, Cannabis sativa
attataagatgatgaaacataatctatataaatatcgaaaataattcgaaaccttgtgaaatatttcatcttcgggcttgcgatataatatttcctcttcattgttctgcttcttttttcggtttgttccctttagctgtagcatttgcaattaaatatcatatgaaaactaaaagcaaatttgcagcatgatgaattgggtttgagataaaatacctttccaatttgacagattattagatagtatttaaagccgaaggactttcgaagctctgctgttggcttcagacaataataaccatgagaatatgtcaggtaaaggaagttgctcaaataaaagttgagaaaatacatactaacattaaggatttaattcccatctaacctcatcttctgtagcccaggaaatttcatcaaaaagaccatcgtacagatgtggcaagagcttgtcggggagacatgtattgtgtttagacaccaaaagacctacattatgtgcttcttcattcaaaagcaatctcaaattactgctggagtccttctcgtggcatactttaaggagatactccttgagctctacaatacatttatgttcctagtacaaacgaaatcgtagcttttacaagtgagaagactcctatggcataagctaaccaacacgatactaaagagcgcagaggaccgaaaacaaagttggtataacagaagtattcacaaaggtaattaatgtaaactaacgagatacatctgcatcgctgagaaactaagggaatgaatatgaaggaaaagacagcattgtctgataattttaacatatttttaaacttctaccatcagaaacagatgcccttttatcgaaaattaaaacagttctttgagctaataaagtgcttcctgtcctacttatgacttggtaaatatttatgcatgcatagcataacttgcatttgctaatcaatctacagaagcttactgagtatttaatgtgattacttggctatactaaaaattagcaaaatattcagtgctaaaagtttaggaaagggctttttgaaagtacttactcaccttgtatctatacaagttaagagcagatacaatagaccagatagtattttcttcatcatcctctattttaatgacagtccccacagtaggctgtcctaggatcaagtccacaaaaccactcaaatcccagtgtttatcatcaagataaatctttagtaaggccttcactccgtggaaatcatcaggttttggatcgaagaagacaaaatctgcttgaataactcccttcaaaacaagaccagtataagcaagcatggctcaaaagggaaagagcaattacaagattatagtgcaataatagataatacacagccagaatattttcttacatcaaagtcttcatcgtcagaagcctcaatctgatcactcttagatgtcatattgttactcgtcgatttcttacctgaagaaaagataaaagtattagtgagttcttcccaaaatttccataaagatagcagagacaactgtagttatctgcagtgccattgtttaggcagtgatacctacagaattgggaaaaattttcttactcttgactttgggttcttgcctctgacagttgactgtggaagcagaggcaatttgagcagttgaacgagcaaatgaggaaaaggtcaaaggctgatgattccccaatcgggagcgccttaatggcttccggggcatgttactaatctatagcaatgaacaagcaaagtttgatgtcaagtcaatacaatttatccttgatcaatcaatgtcataagaaacactcacacacagtcaaatgctgcctaaaaagctaaagagaagtatgatagcatcaatacatccaatgagctctaaaattatctacagcagaaatggtgaatcagctgtaacttaatcacataaataaatctcaaatccccacaaatttacattatatcaagccaaaagatcaaatcttcagtttcctccacacattctcatcaattaaacacactgtcaaattattcaaagtattttttagttcctgtgaaacatgaggttgttattctaatctgatgaagatatgtttatttatatgtatacttggtatagttaaaacatacaattaaagaataaataaattgaaaaaacaatctttcagcaatgtattatctttcttcctggtttgaataccccaaagcaaatattatcagcctcaactaaagtttagcaaccaactgcatttggttccaaaaggactactattgaaaacaacatggagaaacattactaaataatcaaatttatgtaacatttgtttatgtgaacatcaactctaattctgatgaatcagacgctcagatgaaaagggcaaaagaaaaaagaacgctcagatgtatttttgtaaataaaaaacaattcactagagtagacaatatcatttatcatcacgaggaggaagcattttctccatgcaataatgtatgagcaacttcaacaaagattagcctcccatcaacaatcctgccattcatagccttcaaagccttttgagcttcaatctcagattcaaaagtgacaaatccaaaacctttaggcctttgagttctggaatccattactaatctagcttctgtgattgacccaaaaggagagaataacttcttgaagcgttcatttgtggtgaacgatgataatctgctaacaaaaagctgagttaagctcttcgacatctttgattccacaagttttcggtgcttagacaatgacagtttcgggaggagtcggttgcagcaagaacaatgaaagagagatccactattgtctaccggcccaagctagaatcattggtaagagtagaagtctgagatcttgagcccatcttaatcttaccaatagagcgagaagcgagcttctgcttggaaagctgataaagaatccgaaaaaaaaaataaaggataaaacaaaagccatttcaaagatgtattgaacccatgtagaaagaactaaaaaaaaagagaccctgaaaattatattgctcaaaagataaaattttcaaaccaggttgttactatttcagagaaactattgtaaccatttttagagcttagctcaccctactaaagaaaaaggtctttcttgttggtgaaatgcacacagagttgaacagccttataatataggaattctttaaccaaaaaaataaaagaaaccctatgaacatgagattagaaacaaacaattcaattacatccaattcatatgcatactaaagtactatgtacacatccagtttgtgtcatcaataatatctaagtgaaaattatagctaacatttcacttccattacaaatttggaagagttcaaaaaccagagcttgttattactataagattgtatttaattgtatatgttttttagaaaatgagattagaagcaaacaattcaattacatccaattaatatgtatactaaagtactaagtacacatccagttttgtgtcatcaataatatctaagtgaaaattatagctaacatttcacttccattacaaatttggcagagttcaaaaaccagagcttattattactataagattgtatttaattttatatgttttttaatagaacaatatatccaatatacaaggaaggctttttatagatgtgtaagaaagtcttgtctctgctaaataagctgaaaatttattaagagaactagagagagagacattagattagttaatttatgattcggccaaagtcgtcaaaatctgagcctaataacatcatcaagaaaactcattttgtgtaaacatgacacgtgacaaaaatagaatgaagacttaactaaaagataatgcaagacatccaaaaagaaaaaaataaaacaatctttccgtagtgtattgtctttcttcctggtttaaatgcttttacacacttccaattcaagaatagtttccaacctctagccatcaaataccccagagcaatattattagcctcaactgaagcttagtaaccaactgcatttggttccaaaaggactgctattgaagacaacatggagaaacactactaaataatcaaatttatgcaacaattaagtttatgtgaacatcaactctaattctgatgaatcagatgctcagatgaaaaaggcaaaagaaaaaaggacagggaagggggacttaacacaacaaatcattaaagcagttgaacatatagtaacccttcactttttgatatgcctcaaaactaagtaagaatagaaactcagcaaacaagtctttccagcaaattttgtgtaaacatgacgtgacgaaaatgcaagacatccaaaaagaaaaggataaaacaaaaagctatttttaaagatgaattgaacccatgtaactaatttagtaattgcagagcgagggagagaaagatgccgaaaattacacagctcaaaaattttcaaaaactagtgtaaccattttcagagcttagctcagcctactaaaagaaaaaggtatttctcgttgctgaaatgcatacagagctgaacaggcttataatttacaaactccttaccctaagaagcaaaagaaacccatgaaaatgagattagaaaaaacaattcaataacacccaattggtatacatactagagtcaacatccaagtttgtagaatcaacaataactaaatgaaaattatagtaaaaaatttcacttccattataagtgtgacaaggttcaaaacccagagcttgttattattatcattgtatttttcataaaatggcattttgtatgctttttactaaaataactaaaacaaggaaagctttttctagattttctagatgtctaagaaagtattattcctgctaaattatgcatgactcgtaattatatgcatgtaatatccatatccaaatatgaattttaaaatttgttttgttacctttctgagttttaaatatattttacacagctacaagaaatctgatttgacagaaaaatatagtgacaataccaataccaaaattgatctttgatcatataaacaaaaataaaaatagaagacatgtttaaccatttattaatttttacattgcggaggatattgtttttaagtattttttttaaagataaatagttggattcatttgttagtaaaattcattaattaggtaaaaatctatttttttcttatatgaaaatcagtgattcaattataatactacagtgctatgattcatttcatctacatcaataaatattagaagcaatataattaactacaaaaaaaaaaaaaaaaagaaaacccaattcctgaaaaaagaaaaacaaaggaatccaccatagattaacacataaaaaaaa

SEQ ID NO: 21302 - DNA, 8897 bp, Cannabis sativa
  modified_base (6430)..(6431): a, c, t, g, unknown or other
  modified_base (6742)..(6755): a, c, t, g, unknown or other
  modified_base (7184)..(7195): a, c, t, g, unknown or other
  modified_base (7901)..(7903): a, c, t, g, unknown or other
  modified_base (7932)..(7932): a, c, t, g, unknown or other
aataaatatatatatataattttttataaaaaaaaatgtatataattttgtataggttgcaaatgctatatatttcataataaatggcacatgcaatctactaaaaagcttagaaaaacaaagcttaattaactaggattattctctactttttttataactactaccaaatcttactttgatttgatatgtaaagtttgttcttttttgttttttttttcaatgttttgtttaaatagatttggatgttttgttaaaaagaaaaaaaaaatgatataatttgacaaatatatataaaaaatattaataaaactacatatgttcaattaataaacactattattattttttaattcgaaatatagtacatccaagttatgaaactaaaattaaaatcgagatgcatgcaaatagaataaaaaggctttaaaaaattaggataaaaatgtctcttttttaattcaattttatcccatttgtttaccaaaattttcggaaactaaatagtcaaaaattttaagaaatagtaaaatgaaaaataaagagacagaaattttttacgtagttcaggtattaattaaccttagtccacgagtcggtctattagcctcttaggacacttttgatgtgtttacaatattatttttacaggaaaccctaaatctgtactcttagtttctctcgaaaaagataaagacaaagaataatattggcagagtttcagctaggtgagttgtgttctcctctcttcgtataaaaatagaagggtatttataggctaagtagagggtatggacatgcccatgacccccctagaatttctgctaacaactcagctaataggtaaattatacgcaaagcgagagctaactattgggtcccttagaaaccaatgtgcatgtgcatgctgtagctagctggacaatttgagaccatttgtacgaagtggacacctgtcatctaaaggtttagcctttaaaagtagagtccatatgttgcccaaagctttctcctttaaaaatagaggtctgtaatatccatatgttaaaaaggtgatggaggtgtgcgcactatcatgcttggacatagggaacaagatctgatccttccttagagaaagcataaccgtcaattggtgacttggcttgtatcaaaggtagatgtccgcggcaatcctaggtagccgacatccacaataggccctttgagtacccgtttgggtattagctaggcaggcttccatatttgtacccctctaggtctgagagaggcaggacacctttcatgttggggaagctgaggcaggatcaagtagacttctgcatatccttcagtcttaacttgctcctggtttcgcgaggcttctctgggaaaagattatactaggatatttaattaggaaaattatgaggctaatccatttctttaaatgccgcatgtcacctgcttagagacaagaataatatttaccccaagcttttgggactctctgagatccaggagcttgcagtaaccttttgtcgcgaattcatcccacgagctgtcatcaagtaaaagaccataaattgaaggtaccattggcgtggcatgcatgcgacacctttaatgtaattgttgacaacacgcgttgggggcatgtttcttgggaggagttgcaatgatggcgggacgattcaaatgacgccaagggcgagttttagatgccatttttttaacttcccatccatcggatcatttgggagaagaaatctagggtgtacatttcaagtcgtgaggatcttgatcgaggtataaattgatttgcccaactcatttcttctctttcatcacctcagaatttcaaaactccccattttcgaacttgtaagccagtgctccttatttcccagaaaacttctttctcaccatcgtctccaacagtgaatgcaagaggtctttgactgcttgattcaaatctttctaaacctccgtttagcccattttcttaaatcagaaccattgaagctagaacagttcaaccccctgactgacgaaagcttagatgctcaagccggctacgattgtgtaattgactaggttcaacattcttagacagattttcacgacaacctctttttttttttactcacacaacaagtgagtatccgacactctgttaactttttgctatttcgtatctaagagagaaattcttagttcaagctaggtctaagatacctcgcatatttgagtggtaaagtgttacccgtaaagttttatttctagggtaagattacatagaaattttgtatgccgtggaagtgctgattttatgtggatagttagggtatggctgtttcttactccgtagacatttacatgcttataggattttggaattagggaaatttaagaaagatgaattttttaatgaacattagacctgtgtacttttttcatacccattcggagttaattgtacaccactacaagaaattaggggtttctcccacacatgtaatgtgtgggaaatacatctctatgtgtggggtaaactttatactcacacatacataatgtgtagacatgtgtagaaaagtaggtgtagataaatgtcattttccacatatacattatatgaggggaattgatttgtcattaaccgtgcacacacatatgtgaaggaaaatataatacatttgtgtgggtgagtatctagattagatataattgatgatttggatgatggcttggcatgtgacatggcatgacatgtggctgtttttccaacgtgtcatctaacgtggcatgacacgtggatacaaagttccaacttggcatttatgtggcagcttacatggtatgatgtgtcattatttatatgtgccatgtgtaaattgagatgtgtgggtaaaccataaacatgtgtgggtaaatattaaattatgtgtataaatattaatttattatttctatttagattttttaaaatattttagtaattattatatatcttaattatttgttataacaataaatgtaataaacactaaattgttactaaaataaaactatatcaaaacagaaaaaaatataaaacatcactaaattttaaatgtaagagcaaaacacatacaaattcataaaataaaactagagtatacactgtagtagaaaactagatgtctaaaatatagatagcctacacattcttgctcataaactctgaactaggttggcaaggtgagtcttgattatttctgaaaggagtagggtttattgaaggtcctcaactatggtcagatgcatgtgtatttgttgaaggtaacatgatttcctttgcaattaaagcttgtcacatagtgtcaagctctcctcgtaaatcaagataaagctccatgagtcgagaataactaggacaatctggattgttactagtgcttgttgtctcagatatgttaggagatcgaccccatctaaacaaacaaacagagtgttgaccaagtacctgttctaaaatttccttgtcaaacatcttctctagaggattatcttgccttaactgtatcattttttcttgcgtatataaaaataaatatataagataactaatttattataattggctacattaaatgaaaataaacttacatatgtgcccttcaactttagagtttcccatccattctctttatgccaataacgaaggtgccaagtctcaatatgccctatgctagcatctaatctactccacgtgatatgtgatgacgtgcggtagactttgagccatttctagagtcccacttccttttggaatgactgtctgcattcttctttcataattcctataagaacaatcaagtattattggtgaaacttctaatgtataaaccacaataaagttttaaatattaatcattacataccaaaaagctaggttcagaccaacgatcacaaagatattccaagtcttgctgagatacttctcctctagggcactcattcttggcctttgttgatctatttcaccaccgactttcttgaaatggtcatgcaatttatatttgtggacttccatgctcgttgcatctacccatcaataactttttcgactttctcatctttaatgacaatatcaaatgtattctactggaaaaaaagttgcaataataattagagattataaactgaaaaatataaaaatttagaaatattagtcaatcttaccaatagtcgatcacgaagtcgagctctaacttctggaggtacaagccttaattctttgtactgaaaaatacaatattggcgaactataaatccaatctcattattgaatcactcaacattatcacaaataacttgattaagtttatagtcgaaggttacaattaacgacttagctgacttcttaagtgccttagtaccatggccacaagtaggcccccatttcgctatagggtttctaccattctctacagtaaaaaattttaaaaaataatatacaatattattcagagaggcttttactctctagatttctgctttaaactctgttttggtaactttcccctaggttctcgacctatcgctttgagttgtctaggaaaaataagtttttataagtgatggtccggtggggacctctctaagaaattttaggggaggccttccccgataccctttcttttcatttagatagtgggtgtttaatttattgaccttccttttcttttcgtctttccagtgatggatttaaactaggagctctatcttaatgcagtggaaatcaaataggacacatcagttgtccttgttgaggaaacagctactgagggaactcaagcagaggttcctgcaagggaacctcactcagatgctgcccttgaaaccatcagagaggccactctgttcatgataccaaaaaagtccatagggaaagggaaggccaaggttccacctcctcctcaataatttgacagctccatctgggagatagagcaaaaaataactgcttccgttcatatgggatgcttgaaacatctgccactgaagttggattgctcaacgtattgggactaatgagccatagattagatgttgcggaagactcaactttcacgagcactaatgggttcagtgcctggagcttgtcccatatcctaagaacttactttgtagagtttattgcgcgtattggacttgctctgttccaactgatacctccggcttacaagctcatagccaaatggtacatttttttttttttataaaattaacaagtttttggtgcccactctagagaaattctgtacatctacggggtgaatcctcatccaatgaggaccaactgcaagaagttggagttttactgttggaacttatttttaccaggatctagatttactaatatgtatgtatgattaatttctataatctaacatcctaaatatgaatttctgaaaaaacaatgaaataaacacataagagattaataaatccttacattgatggtagcagaataatagtgactctttccattcagatctctaccccttgattcttttctgtagcagagcattatcaagatttaaacttggatcttctctccttcaatttggttagacatagtcttcctcactatgctaggtattgctttgacatgagtgggcatactctcaattgactatggtttgaaatattcagaggaagaagaagagaattttgaatagaagggggctcttttctattttctaattatctgacaaaagagactgatgttggttatgaaaataagatccatcatattctatttataggtttccttctatggttaggtttagaatttaattggaatcaaaaaagataaaaaaaaaaataactttcataaaccttaattggccgacctcattgtggaccccactattttcaattttaccatttcatttaacaacttatcttttcttttaccaacaccatattttaattctaactctaattaaatatttataattaattattaaataaaattgtcatttaacttatttattaataagaccttacaaagtctcttaattaacaaataaaccctaaattctcttttttctcaaataagcccttagttagtgaaaaaatcacaaacaagacatagtcttatttagaattttaattgattaattaaaactaattagttgatcaaaagtttaccaaggccctatgtagtcaagcttccaataagtagatctaaaagtttaccaagtaaatttcctaacttattattcctcctgactccactataaacttggaattgaactcttaattacatagaacgctctatcaccaaaaaaatagatgcgatttgaattacctattgtttcaatcttaatagtcaaagatcatctatagatgatctacatcaagtagggagagatttaccgttctaccctttaatgtnntttatccttaaaacacttagctagttgtaaatgatattttagtaaactaatataattactgaaatgaggtctcaatcatttatcgtgttaagccaagctcgaaggaatttatcgttttacttctagtagttatagaagctccagattctatatctataattaacgctcccactcaattgtactaccatgctcccaagatataagtattggattgaactaatttgtcagctttaacgaacaagtcaaagaacacaaataatagatttaagccagaacctaaccatctcaagattaagatctattgacctaannnnnnnnnnnnnntattgacttagaaagatataatggtaagtttatgatatcttatccaatgtcaatatcggtcaagtctgatgtacactccatacatatgatactagcttactttgccaatgtcctgaaaaggacaaaacacttatccaaaggtgtaagtaaactttattgctgattatcatgttagtgtaaatccagtgtactaacaaatcatgagatttaaactttaaaacgtataatcatgattatattctattgaatagaccatactataatcatgaataactatatgttctagatttaatagaatttatacattaaatatataattatgaaagaaatcatgtgaaccatgcaacataaaataaattctgatattttatatattagtaaatttgattatattgagatgagttttatttaggatataaaatcccaacnnnnnnnnnnnngcactaatataaaactaaaagtgtgtttcagttaatttcaacaccttgatgtccagatcaagtgtagtatgtagtatttgacaagctgtattcaatacaaaatttctccaccattacatctccttagtcacaaaaactttgatatcgtaagatttctttccatatatctactcctctctggttattagattctttattgtttggcaactatatctgtgttagtcaagaagtaacactagtagttaattcatgacgagaataacgttaaaagctgtatagaactttccattagttgaataattatatagtagccttttgggccactttaacattaagtctcactggtagagttatagactctgaattgtacacttctccaaaaatcactgctccactccagagtagtcaccatttgtcaagtagactttctagcattaacgcaagtctagaaacttaatttggtgtagcctaagagtattaaaatactaccattatcgactaacatatagttcctctttttgatcttaaaattgatttaattgtcttccaatattctttcatggattaaaatgacacctactgttgtaaaaattactctacgcaaatgcatgcaatcgtcaacaagtaataaagtgataaatcgagtatcgtctccacagggattgaaaattggaaattaatttacaaaactaattactcacaaatnnnttttaacaaaaataaaataaagtgatganaatatgtaaaaattaacaaacacaaacttagaagaaaccaagctagaattattaaaatggcctaaaaatataaagttgatataatgatgcaaatattattgtaaattaatgatgtcaactaggaatttaagatgtcataatccttttttcaaagtgtttatggtttgattctctaattaattaatgtatttctatgcccaattaattttaagtcatacaaggtaaataatatatttttatgtcatttacaaaccaatttttttaaagtgatattcatgcatcattcaagcaatttcactaaatttattttttccaaaattaagattacctacagtacttactaatggtgatcaagcaaaagtaagcaattacataaaatactcttgaatgaacaaaaccaatttaccaaacaaagaaacaaaataccaaatcataatttttagtcaacaaaataactctagcaaaaaaagaatttagctcatcatagattgtacaaaaattacaaagtttaaaataaaagagagatagaaataaaaacctattttagagtggtcacaagactctaagttttttctccaaatttctcttcgtcttcctcttgctttttgacaatcccaaaattataatgcacaactaaaaccctaaataacactcaaataaaactctctctttttttttattcctcatttcttgggttccctggattggaagcaccactggcgcctgctatgtatatatgctagtcatattcggtcttcatagcatggcaccacgtgtcatctaacttatctttaccttctttttttttttttttcattcaacaaatacaacaatgaaaatatgtaattacaaaggaagagccaagacctagacaattgtaacgtccccacttcaagcctccattgggcccttagacccacgaaatgaatgactcttatacacaagtatgtcactctagctgcttc

SEQ ID NO: 21303 - DNA, 9527 bp, Cannabis sativa
atttaattaagaataaaaaagttattagtagtatttatatatcatgtttacttattaaatctctatcaattacagaatataattgaagaagaaagcttgaacaatttcaacatgccattatattgtccaagtgaaagggaagtgagaaatgtgattgaagaagaaggctcattctttctacataagttgaatgtttttgagactacttgggatgcaggtttcactactcatcaaaataataataataattacaataataatctaattgagagaggaaaatatgtttctgattacatgagagcagctacggagtctattttggtgaaacaatttggagaaactataattgatgaattatttcagaggcttgctaataaggtcattgagtccatgaccaaagaaaattggcaatacaagaacttggttatttctttgattaagaaataattaagtatataatcttacttaatgaactatagctagctactctgagatttgttattcatcagttgtttgtttgtgtgtttttgtatgagaatttattaagtgtatttgtaatattttcactaaagttcgtgacactaattaaaataaaaaaaaaagttatgaaagtttaattggagaaactataataatagatgaattatttgagacgtttgtaaatgaacttggttatttttttttttttattatgttgagtgtacactatcaaagttctgcattgtttagaaatgagaatcaattggtatgaagttttttgggtagaatacaaaagcaaattcatgagagtttggacctatattgatgtagagatttatggtgtctaacgtcttaacaatacgagcattgctattaggcacctgcttagcactttctcgacatgttgcgttgtgattagctaacgatactccttaaaagctattatattaaactatatggccatataagaaacagtctttaacataggaaggtggtaggcactactggtgtactttagcatttctctaacaatatatatctaatgagaattgctaaaaaacactattggtgcttagcactcttttcggtgtcatactgttattagtgtaattaaatatcggatctcatataaatttttaaaataactttttgaaaatatcgctacctagttataaagtgtcacacataaaaagtgttcgacaatactagtgtctaatagcaatgctatatatctaattgaaacattaaaactgcaaaaacgacacatacaattgaaacattattcgatctaatgatctaatttgatcagcttgattatttcattcaatctgcatgcattaattaatacaaagattgagtagagtataaccaataatcatactcgtatatacaaacaaatatatacatttacagttaaggaatggatttgaattgaattggagtttagaaacttgtaaacaaaataggcgagaaggcacataattgaatttgtagaaatgttctcctttattttgtagaattcagtgcataatttggtgtgttattggagtgaaatagtatgaagatttcacactaatttggtagaatactgcaacattagagatgttggtgttagattgattgcttgagcttggacattccactcaattctattgctactttattttctaatttttctaaagcattcttaattgaaaaccgttctatatatttgaacttttcaatcttcagtctttgttttaaaatcacccaactttctttcttgcattgcattagtgaaaagtagcatcaatatgtccatcaacttggatactccaagatcctgagttgtttgagatcactactagactgtgttgtattgtaccccagaccccagttgaggtctactctgccattatctcttgagttgagagactttttctttcttgtttaaaagtcaaaaggcttgttttcttctgcaatagttgcttgctgtatggaaatcttagtgcacactcataaattcctcaagacttccaaaaacaatgaacacaaaaacaagccatgcctgtagtgaggctctgatgatgattatgaagaaatattcaaatatagctcagctaggctaattactaaagggagttggcctaagaccatacttgacagagtggtctgcagcaccagaaactagaaaggaaacttctcacaaatcaaatttgagcacaacattacatttactcagaaacaactactgcttagctgatcactatcgatcgagtcagtctgcaaagctatgtagatttgtggagacagacggctgaggtggttgatgctccagggcattggtgcttgtgaaagatggtggtacgccatagttttgtacatgagagttttcatacctggttgatgacaatgacgaccaaatttgaattttaaaacgattaatggaaacatattagataaccaattggaaatagcaatactggatttggaaaacaagtccaccaaaaaactgcttaaaagataaatatgcaaaaattcattacagaagaaaacaaaactaaaggtacaacaaaaacagaacatactaatactttaaactaacattcttccgcatctttattcttctgcttcttctttattcttctttttcttcttctttttcttttcactcttatcagcctcgctatcaactttgggagattgagcagcagcaatagcatcctcctcagcttctttgctcttctttttctttttctttttctcagatttctcggtttcgggtgaggcagcttcctccttgacctcatcgtcatccacatgcccattctctttatccttcttctttttcttcttcttactactctctttgccctcagaaacttcgtccgccactgcatcaaattttctcttgagtccgccatcatcttcattatccttattcttctttttcttctttttctcttcaccaactactgaggaagtctgcttctccgcaacagtggtgggttcacttggagctgctgcaaggcctgccaccatcgaatccccgccagtaggtaaaatcaaattcctagcccattcttgaggtgtattatcattaggcttcccatgcttatcgagtttcccatcagcaatcaacttcttcttcatcgatgctctcggaccaagaccccactttctcggataagtatcgcgatccatcacaaccctcttaatcctagccaccacaccatgatcacaagtagccataacagcagtagtcatctcagcaatccccaaagcaatcgcttctcctttagttgtcataagaacaacttcctcaccagcctcaatatcattctcaaacctcaacaacccaggaatcatcaacttagcaccataacaaatggcatttacagcagaatccttcaccaccaatctcttgtaactagttaaaatcacttcaagtggcataatcaccctcctcaagtaactctcatctctataattatcataagcccattgagcatccataacatcatgcatagtaaccatgttatctttctcaccaagaatcccagacctaactctcctaagctcctgcatatgtgctccaacaccaagaatcagacccaaatgaacacaaagagtcctaacataagttccagcctcacaagaaatccaaaaaacaaccaaatgcttctctgcatcaaactcaagtaacttactttcataaatagtcctaatcctaagctgtcttttcacagcagaaattaggggtggtctctgaaacacagccccagaaagggtttcgagtgcccgagccactttcgcgacatcggacaccgcagaatgcaacctagcaatacaaacatactctttcccggcaccttgctgagacttgacaagccttgtggctctgtcaatacagacaataaggtttccggtgaccttgggatccaaggtaccactgtgacccgttttctccacacgaaggatccgcttaatccaagccacgacctcgtgagaagatgggttagagggtttatcaaggttcataataccgtaccttatgtactcggcgagtgggcgtttgagcggtgagtaaccggagggaagaggagtgtagtgtccggttcgtacattgagacgatcgtagttcttgagtaggattggccactgagatgtgtcgatggtgggagtgtagctctgtggtttgatcatgaaatcggtgtccttctgagccaattcaccgtcgactggtttaatgggcgtgtcttgtgcctcatctttcttcttcttcttcttctcggagcgaacctcgacggcggccatgactgagctttctgtagaaggattgttgtgagcagagattttctagggtttaactgtgtaggttattagggttttgggttttgtggggttttagtaaggagagagatagaagacaagccactgcaacctcagccaacgtcattaaggcttgggctgggctatttaaagctgggccggggaaagcccaataatgtggtataatatcaattatctaaattaattacattagtatcataataaattcatcattacatttttaacatactttctttcattattatcatagttttactcacctatttttgattagctagttggtgaggtaatagcttaccaaagcgataatcagtagtattgtaagttcgtacctgttgtgctggcccgatctgtatttatttgtgtttttcaaaaaactaggcgtatcgtgctacagaaaaatataggatgtgccatgtcgggccaatatttttaaacggtaggcccgacatggtctataggtctagtattttcgtgtcgtgctcggattcgtgtcgtgttttgcttgtgtcgatccgtatttcttaaacaaggcattctattttcatattcgggcttaaattagtgatttactttttcaaattttttttacaattattaaattatctgtatattttaaagctttagttatatttatataactttttgaacaatatcttacagataatcatataaaaacaattattaacatcaatagaaatttttatattacactttataaataaattaatatatacttttattttttgtatatattttaataattttaattatagaataattataatattaagtattatatttaagttttattattataatttatttatagttgataaatttatatcttattatttttaataataataaattataaggttttttaatatgtcgttccgtgctttttaagcttgtcacgtgtcgtacttttcgagctagtctattcgtgattacgtgtcgtgcctttcgtgcttctcatatcgtgtcgtgcttaaagacatatttttcgtattgtgtcgtgcccaaggctggcattttttgtcctagtcgtacttgtgcattctgggatcgtgccgatttcgtgctgtatcaaaaagttcagcccgtttttacatcactaataatcaatagtttgtacaaaagaatgatcaaccacactgggactaaaacacagcccagactcctataagagacaacttcgggaaattttttcgtagggcaaaagcgtgacgaaataatattgtgtggaggtagaaggcctatgggttgtaaacttttgttcttagagaagtaatgatggtatttggggaataagggtctgctaactctgtaccagcagcagcaataatactgacgatacaaacattattcaggatgactggatgtaaagcacctgcaagtgacctttcaagtccgccgtcaaatccaaagactcaattttatatttacgtttagcttaagaagattgctaattacaacttcctattacaaccttttagtcaacctccacgcctgaaatcatatgtccgaatattttttttttcaaatttttttcatagcagtattcgttatagttacatacagtatcatctctttaaatgttttaaaaaatcaaataatttacaatgcctaaaacagaattcttgatatttcagtttactacatgtattcaaaaaacttcaaacgtatttttagcactgtaaactattcgaaaattttcaaaaacttacaggaatgacgttgtaagtataacgaataccgccatgaaaaaaatttaaaaaatttaaaaataatatttcagcatgaattttcaaacacgaagattggttaaaagaacgataagactcttaacttgataaaaaaatatatatatataattatagtacataataaaatgcaaattcttatttacatattattttttataatttcagtaataagtattactgaaaaggaaaccaactacaaaactttggctgctttgtaccaaatccccacaaattcaatatcactactgtacacacaaaactttaatctttattgaatttttttactttctttatttgacttagtaagaaaaatcctgtgtcttcaatcagtgtaaaggttaaaataaaagaacataaaataagctgaagaagaagccagtttatatctaacttggtaaatgtaagaatttaatatagatttcattatatcttcacttctctataaccttttaatcaaagcaagagatgttttactttcatcacaaattttttcctttcttcatttgtagaaactcaattagacctctcaatgaagcttcaggctcctcaatcttcaacaactcctctcctatttcggcgggagtcacctttgttgtctctatcaactgttctatttccgagaagagttgatgctctgtgatccctagatagttggaggctagtattttgaatccacatggggtgcaatgtgacaagtggatatgcacatccatacgaccggggcgaattagagcagggtccagacggtctttgtggttcgttgtgagtattacgatacgctcgtcgccacagctagaccataatccatctatgaaattgagcaatcctgataaagtcacctgaaaaattgaccaaatgagagttgagatactaaatatctccaaaattgagaaatgtgatcaaatctaaaataagactgttataggtatgattttaatatgcaattgcttgaaaaaattaatgcataggctttctattcaagcatggaacttcaaattaagtaatttgatacacaaacaccttatgaactcataaatataataattttattggacaagctttctaatctcacttaacatgaaaaatcaagttttgacaatattttaggtgatgtttaaaagtttgattttgatggagaaagaaaaagtaaggaaaaaaaatgattaaataaaaaataaaatctcatctttggtgtggacagaaaaattgtatagagaaaaatttgatccaacaaaattttcttctccacactttttttttcctacattttttctttccttgctaaaatccaagttctaaacataaccttaaagttttcaaaggctaattcattcaactttttaaggtttctaaatatggcaacatctctgttctttacactaactaaaaatcattcaacagctctcttcttgatcacattttcttgctaagaaatttcattgttgactcaaggtgaatcaaaaactcacaattcatgtccataaacttcttaagaaaccaaaaaaaaaaaaacaagactttaataattacctcatatttcctttttgtagattgatggagactcttattattaggcttagctttcctaagcctgttctgcaattcaatagagcaatcaacatcctcaacaacaagaatagaccgattcgcagtcgaaatcaacaacttcctaagctcagaattactcctaatacttgccaattccaaatcatatacatcaaatttaaggtaatttgccatagcagcaatcaagctagatttcccagttcctggaggaccaaaaaacaagtaccctcttttccaagctcttccaactttcctataataatcttttctctcaacaaacctctcaagatcctccattaccttcttcttgatatctaaatccatagcaagagtttcaaaactcattggatgatcaaaaatcacatcttcccacatattcattcctcctctcattctcaacattctgttcttcaaagagaaaagctttaatgtctttaactcttccttaatcttcttagatttctccaaaatataaggcaagtaagactcaatcaccatatctctatgcttcttatgaaaactcaactcaaagaacccaagctcagacttaacactccaattgtacggaccacgagaaccaggactagaaatgtacttagatttgatctgatttgaaaagaatctccattttagtttgaccccattaaaggagtcaacaatctcttgatttctatccaatgtgattgaaaagttttcatcttttttgggtaaaacgactttgaatcgctttgtatcggaagggacattagtgggtctgagataaatctttgcagccttgaagatgtgattatatgtaagaccatcgaactcgtcgatgaccagggtgagttgggaagagagtgaactcgtgaactttcttagtttcaagaagattaggtgttgaagctcgggagggacgtattctctgacgaatgaccggactaccatggcgacggcggcggcggaagcggcggtggatatcatagttgtggcggagggtatttgaagattgttgaatgaagacattgttgtgaggaaaggaagggtttttggtgagtttgagaggattttgaagatgggttttggagaaattgatgaaagaaaaggtgggttagtgttggattgttgaattgtgttatgaattttgatctgagaaacgagtgtgaagtttcttcagtctcgtctttgactttgacttctttcatacccatttctctctcataaacgaccgactttggttttgttgagtcaatcaaaaaatgaaatttaattatcttatttctttctatttattttttatttttatataatataattaaggataaaaaagcttgtaatatgccccctaacgtaacgtttgatttgttttatgtcacgtttactatatagtattcagaatcggaataaattaatggagaaatataacagaataaatgaaaaataatcggaatcagtaatatgttgtttactaaatttttttgaaaatgaaatagttgtcatttatcttgtttactttattaggaaagataatcggaaggcttatattgactaaattactcttttgaattaaactataatatgtggtagttattttgtaagatatattttaaagcacaaaattatcattatatatttaatattaaaaaatactaattaaaattaattactcttaatggcattccttataaaattggtggggaaagttctccctttcttttctcccttatttaattaggttctccctttcctaattttaataatgtaagtaaacaaatgtaagtgaatgattaccttaccattgattcccattcgttagtttctatgtgtgttgctatattaattttggttgcgatttaggttgctctgttagttgcaataggggtttctatgtaaaattccgta

SEQ ID NO: 21304 - DNA, 4144 bp, Cannabis sativa
  modified_base (1236)..(1239): a, c, t, g, unknown or other
  modified_base (2655)..(2655): a, c, t, g, unknown or other
gagcattccattagaatgtcattccaatactctaaaatgcaaccaaacaaaggaatgaaatgaaaattattttttttccatttcatttcattacctccaaccaaacgccaccttaggtattacaagcgaataccaaacctaaactcaatttatttattaattctgttaaaaattaaaattcaaacccaattagtttataaataggttaacgtgtttataaaaagtttaacatgtctatgacccttttatagtatatttataagtgatttaatatatttatgtcgtatttaactaatttaatataatttatatgataaattataataaatatgaagatgtatattttaaataaattattgtgtgctttcagacaaaaataataataaataaattattgtgatgtcatttttgagttaggcatgtcaacaattgaaaatgacttgtttaataaaatgcatttttcgtctatgtacaactaaatttactatattataatatatgtgcaaaaaaaaacttatttacataatctaatacaaaatagatactctcattataaataatgtgttgtgtccattaatacaattaattatagaacttactatatataatatattaaaaagaaataaacatcatccaaaattaattgcataatattcatattattattcaaaatttaaattaattgaagctataaccacttaattatttaattatattaaacttatatttgtatttctaagtaattctagaccctattaataataaacatagttgttaattatttttcgcataaatgtttatttttataaaaattaatttattaataaattatataaataaatttataaagtatatatgtttgataaacaatatcaatatatgtttattatttaaaattatacatccttacaaaaataataaaaaaaaaaagtataaacgctttataatataataatcttactatacaatgtttattaaaattaaaaaattttaaaataaaaatatcaaaaataaaattacaaaccatgtgcatgttataaacaatattatgtttattatttaaaaatattcactatttctatttcaaattaaattactaaaaaataaatactaaaatttaaattataaataattatatttatattatgattattgtataatattatatttactaaaacatttatcgtagtattagtgaaatatatattttttaatttttaagttttttttttaaannnnaaaaaaaagaaaaaaagaaaaactcaaatagttaaaaccattgcacgaagagctgctatattgtctagtttctattaaataattgatataacatcaattggttaagttcatgctacactaaaaaaattgctacttttagtaacaaccttttagtcataacataaaaaaaaaaatttaactaaatgagatttttagtcacaataaaaaatttattgtgactaaaacatagtatttttttttttcttttttgattgttggaacctttgaacaaacacaaacggctcaaaagccacaagagccctgcccagcagggaaaaaaaaccacaagcagagacatagcttcctacatgaaagcaaacgaaaggaaaaaacaagctgcaaaaaacagcagacaacaagaaaccaaaggaaaaactgaactaaaacagaaaggaaaaactgaactaaaacagaactacaacgtaagactaacaaaaactagagaagactaatcagtagaatgaccatctgcagaaatcgtctgcaggaaatcatcaaaagtggtcaaatgcaaaactccaaagatgttgtttcgatttgcctattgagccacggagtgggctacaccattgcacgaatgaggggtccaaataacatcatgaatgttgaaattccccgatagttcgatgaacctttttaccttatcttgtatattgaagtgcaggttttggatgtcggtagcgctggttttcaaagcgctgactgcatttagcgagtcgctctggaagatgacattcttgtaaccgaatttgactgctgctgccgccccctctaaaatagcagagatctctccaggcagcgggtcgcagtgattcgatttgaatgtgatgacgcttagtatagtaccagttgtatccctgaacacagcagcccccgatgcttgggaatgaccaatgccgatatctgagttgcaagcaatccatccttggggagggggattccattgagcattgggaggatcggaaggctctttgattgcagataattccatgaatctgcagttaatgtgctcaatgtgcaaagacaaagggattggctggtgtccatggagactaaaacatagtatttagttacaagttgtcactgatttagttttagtcacaacaaatattgtgactaaaaacatatttagtcacaacaaattgtaatttttgtaactaatacttttagtcacggacattttaattagtcacaacacaataatgataatttataattaatcacaactttttttttttttttatctttagtcacaaattttataaggagttcattccttaattaattttaatgttgtgatcgtgtttatgtgttgaaattaatttagttttcccattagtattgtcttttggcatggttctttagtcttgtcttttnacatggttttttagtctttttcttttagttttttctagttctagtcttgtcttttggcatggattgtgtagctcagaatcatcatggtactatggtagaagcattcaagaaggggaatatcggtacttttatgccttcacaatttgtgttttgtaaaacgatctgcaaataagttggctcattgcttgacaatagactcttgtttatctacagatcgtgtgcttcagttggaagactgttcctctgaagtgcgttctattattttgaacgaattaattaattaataaatcttatgatttttattcaaaaaaaaaacatttattgtaaaaaaaaattgtacagattatgtatgtttgataaataatatcaatttatgtttattatttaagaatatgttgattatttcaaattttaattgaagtactaaaatgtaaacacttaaaatttaaacatataaacatttatgtacatatttacattataataaaattattatactaacaaaatattttatttataatgatatcaatattaatgtttaaattattataattaatatttataatataataatgtagttgtttaatatagtaatattttagaatttttttagtaataatataacatgtttataaaaagaacaaaaaaaaaaaacatcaacagttttacacaataaaaatactaaatattttttctattataatataaatatttatgatctattttaatacagtttattataaatttatgtttattttatattgtattgatttgaaaggataggatatattataaatataaattatttcttaaaaaataaataaacatattttaaataaaattaaacaaataataaatagtgtaatataataaacatattattttttattataatataaatatttattatctattttagtatgatttataataaatatatatttattttaacaacatagtttatgaaaataataaacaataatgttctaataatttatgtatgtatttatttaaattaagaaaaaaaaatatacaaataaatgattagttataaatatgttttctctataattttttttttatattttcttaacaatatatatctttattagtataatatcaaatatttattaaaaattaaataaatattttataaaattaattaaatagtatatataccatgtttttcacaaaaataaacataataaatgaattattcattttattatgatttataataaattaaatatatatatatatataaagtaaattataaacaagtaatgtatacaaaatatatatatgtaactttattaaaaataaaaaaaataaaaataaatattttatttttttttatcaaaataacattataaaggcttaatataatgatcaagattaatccattaataatataataaaaggaagaggtttcaatggttacatttttattgtaaccattatggttacatttttttaagccattggatta

SEQ ID NO: 21305 - DNA, 3165 bp, Cannabis sativa
gtgtcaacaaacaattcgaaatgctttgacttttagaacatgtccgagtcaaatagttatgatttgaagcacttctttaaacttgatgtaagaaattgataactatgttactaattgtagaagttttatgaattttagatctcttaactttgttgtccacaatttcgctaagtacccgtttacttaaaatgtaactagtaactttgagacttcctatcatttttatttatattaaaccttataataatgttagacattataaataccctttaatatttttcttttcatagtagttaaataataattaactaaaatgaaatatgaaacattaagtatgaaattaatacctgaacttattaaggacctgaaattaatttgaatgaaattatacaatttcacttttcatatggatatatattttaattgttttaacacacgagtgactgattatttcacacatgactttaaagttaccaatcttataaaatcattacactctctataaataccaatggaaagcaacaacattcaaaggatatagataaatcttctatattatatactattttcaggtttgtttagaaaatcagaaaagaattagaattgagtataattgaaggtaatcatataattttgtatatttgtttaaccacgtaattatactataattatgtatttggacgtaatatattaagagatctcaattacactttataattactaataattttaacaaacaagacattaataatttataaatactaattaccattttatatctaaatacgttttgtatattaaaatttaatatatttactactctactaattaccctagatattatataaagtaacaaaaacatttaattattgttgttaataataacactaatttatttatgcttgaatttgtttaatcttaccaaacttattgacagtaacgttgaatgatggcattattcaataaaataatttattcttcttgatttagagtcaaagtcttaattatttatgagttttggtaatatatagagaaggaccaaaccaattaaaaacaataactagtttaatttaattaatctaatataaagatatgatgtaatttttctaagtattttcctttctccttcactataatttcattttataagcatgtatttgcataggaaaatttcttatattgtatatttttctagattgtggggtcactttcaagttcatacttttttttttttatttaattataattttggggaattgatcatcatccatatcattatctaaaaacatttatatattgtgatattaatgtaattaaatataatatttataaatataatttaatataaatatataagacctatatttattttactatatactaagtggtgatatatccttagttattaaaaaaatagttaatattattttgatttacgtgttatataaaagttattgattcaactatttattttgtaaaataaattaaattatgtattttttaaaataatataaaatagtacactgacctcaattttcaaaataaataaaaatttactacactatatactacacaaattttcttatttagtttattttatttgagtgaaacaaaaagtgtttcttttaacttttaatacttaaaagtttagggtgagtctacagtgcacttttaaatgagtgtttcagtagattctttatttattttgtcttacaagagaattttttagtctattttttttttcacgatcgtgtatgttataattatttaggtttactactaaaattttagaaaattctgagtagtttataattaatgtcaaatataaaatttatacattttgttgcacgcgcgactgttattcttatacgcgtggtaaataattgtttaaactttattttcaacactgtaaattatttaaaattttttaaaaatttacaagtggtcttacatagctacaatatatgagatcaaaacaatcctttaaaaaatctactacataaatttccaaaaatttatataactaacaaaacctatgcatcatctactataaaaaatttaatatgaagtacttgagattgacctaacaaaatataacatacacatgtcaaaagacaaccaaagtgtgttcataatacataattttcttctaaagtatgtgaaaaaaagaaagattgctaccagccatcatactatattattaaataatcatattaacttattaaattttaaacacaagaaccatacaactatttgttttagttatttttttgctgggcaaagattcacaaattagattagaacatataaagggtctttaaagttggaatgagagttggtatttgattgagtcaatgtaaacataaccttcttatcataatagatttcttattagcattaaatatacacacattataaagatgacatttttataatcaaaaaataatttgtggtgagaaaccaatgtggggggtgaccatcttagcttcacttaagtcaataatgatattttttgattgttttaaataataatagtttggtcaaatgtctaatgtgagtgagtttcaaactttttctttgaattgattatattgttttagagaattattaaaaggtatagcaacttctacaattttatattattattagtgcaattaaatatcgtattaatttaataaaaagaaatgttgaaagatactaatagtgcctaacacctttatatatatatatcaatatcgttattgattcaactaaatatttagtctaatataatttaatgtaataatttttaagaagtacgctagctaatcgcaagatgatacgtctagaaagtgctaaatactactgatgcctaatagcaatattttttaataaaataatttttatagaatatcgctaattaattgcaagacgttacttttaaataatgctgatatcttataacaatactcattagtctagagcattgttattaagaactatatggtgtccaatactataccaatatgacacattgtgattcgttaatgatttcttatattatttattaaattaaattatgtgaaactcgatattaatttacagtaataataatataacatttatttatttgtcctttagtatttcttcattagtctattgatctcattgacttatggctccctc

SEQ ID NO: 21306 - DNA, 4452 bp, Cannabis sativa
tcgaacacctttcaaagacaaactttttagagatggaaaactaaatgaatgagaagtattcaactttactcgattcaactccaaaaaattggtttcattgagttgaggattaaccataccacaaagtatcaaaattcacacctaaaacacatgatcaacattaatgcactgtgattcagccctggttcggtgtcttcatcgactcagctcaatagtattcctatcccatatctcatctaaaaacataattaatcaatgatttgatacaaaacagaatagaccaaatcaaagaatgaattagtcacatatttgaaaggcaaacttaacactttaatatcaatgatgaaatcatttggctaatatttatatatagatatgtacattgaatttagaatgttattatgtaacaaactaataaatcaatgaagctcgttattctcattttcatcaaaatcacatcagctaccacattgattaagaccaatattagaaaaagaaaaaacagaataaaaatgaatatttatagttagaaattaattaatttaataattaattatcactaatcaataaataattaattgtttgttttggtttatagattcgtatgaatgtttcgaaagagaaaaggtgaaagaatggtatttttttagcccgagagtgtgcaaaaatggaattcgtgctactcgaaaagcacacttaggtttttggagaaggtctcaatcagcaaagccaatccaacataggcgtagatattggcctaaaaaatgttctcaattttcatatcggagacaataaaaatagcatcaagacggaatggattatgcaagaatacataataatcgacatcaatgattctaataataataaaaatgattttggttgtgcaaaatatacaaaaatccaaaaaaaaaaaatataaaaataataaagatgaggagcgaccacggcaacaactacaatcagtgttattatcagaagctcaaaatcaacaagaaaaactacaaataaatgttactactagtaatgatgaacaacaacaatataatcatcatcaacaaccacaaccacaactacaatcaatgttattattagaagctcaaaatcaacaagaagaactacaaataaatgttactactagtactgatgaacaacaacaatataatcatcatcaacaaccacaaccgcaactacaatcacagccattcatatacaatgattattattcgcaaccacaattaatgcaacaaggtgatcagagtacttatgaagaactcctttcacacaacagtcattatcaaccacaactacaacaacaacaactgctacaatcagtgttattattagaagctcaaaatcaacaagaagaactacaaataaatgttattactagtactgatgaacaacaacaatattatcatcatcaacaatcacaaccgcaactacaatcacaaccattcatatacaatgattattatccgcaaccacaattaatgcaacaagttgatcagagtacttatgaagaactcatttcacacaacaatctttatcaaccacaactacaacaacaacagcaacaacaaccgctacaatcagtgttattattagaagctcaaaatcaacaagaactacaaataaatgttactacttgcactgatgaacaacaacaatataatcatcatcaacaatcacaaccgcaactacaatcacaggcgccattcatatacaatgattattatccgcaaccacaattaatgcaacaaggtgatcagagtacttatgatgaactttattcatacaataacagttatcatcaaccacaatcacagctactcatacaacaaagtgaccagagtacaaatgaagaactttcgcacaacggtcattatcaaccacaactacagccgcaaacacagtcatccatacaacaaagtgatgaagaatccagcaatggtcaataccaaccacaacaacaacatcagttcatacaagaaggtgatcagagtactaacgaagatcagtcccttttatataatggttatgatcccattagattgttttctactagacaatatctcacttaagtacaaattaaaaggaaaacaaaacaaaaatctagcttcaatgtaatttcaatttgagtatttgtaaacatggattcaagatcattgtcaaagctttgctcaactcttttttaaatcaccttttgttgtaatttacaaataaatgaacagaggaataaaaactgacccttttagtattttgccatgtcaaatggtaacatgtaataataatattcaatgtttaaactcaatgaagtaccattttccacatattttcattaacactattgttgatcactttcttgattacttgattgaaaactttcaaaagacagaagagcaaatccatatcgatctgattatataatatgtcaaatagcagtgctctttcttttatgtcaagagcttgcgcaataggaagaaaaataaatctacaatattagtactttttggtgatagaaaatctataatattgtcactaaatgagccaatataagaagaaaaatctcattcttatgcgaagtattcaatttgcattagtacaaagctaggaattaataaaacacaatctgaaaaaagaccaaagaattaaccattgttggaagaaaactaaaatatgtcatatccgttaatagataatgtctctaatcttcaaatatttgaaaggcctagaatattatcctcttttaccaacactaccaagatctgagcttaactaaaaaaaaaaacaaaaacttgaatgaaattagctggaggtatttttctttgattatgtaattaaggtgttcatcatgttcaatctaataagtgaaatcttcatgacaagggtcatcaaaatacatgatatactccttgtaagacttctcctcaagtctcatcatcccaatttcatttagggtatgatcattcagtaggataatgaaaacttttctacaaatagttttctctattctcaactcaaccaattgttctcgggcttgtttcgatgaatttgtacaccaaaagacaaggagacaaacgaacccttgatcgagttacatcgatttacgaaagtttgaactggaatgttgttatactaaattcacaaataacaatagtaggcaatgtatttattaatggattattataattaaagaaagctccaacatcaaacttttactgtcatgattagcataatctattttcgaaaaggagccattcatctaggttgaattctcgagtctttgacatgaattgatataacaaatgaaaaatgatgctaagtcctgaaaatttacatgaaaatttgtgatttgttgtatgaattctctatcgcccctcgagagctgttatgcttaaatttcctgattggggccgaatagaggaggaataatctgcatccgatgaatatgtactattgcaataggctggcggtttgggttgaggcaacaatttctcaccactcaacattagaacaacagaagacatatcaggcctatcaataggcatttgttgcacacacaaaaggccaatgtggatgcaacgcaatgcttcttccatgttgtcatttggatcttttagtaagcacttctcaataagcttaaattcattgccttccttcatcaaagtccatgcctaacaaatataaaatcaaacataaataaaatggacaaaattcactattaatgtaacattaattaaatattttcgtatgtacacttacatatccaacgagattgagagtactattttcatcataaagggatctacttttactcccgcttacaatttctaggatcaatatgccaaaactgaatacatcagactttattgagaaattgccatcagaggcatattctggcgccatataaccactacatttgcataataatatttataattagtatacaattgattaatattacaaaagaattgagttttttaaagataacttactaggttcctactactttgcgtgtctttccttctatttggtctccaccaaaagttctagccaagccaaagtctgcaattttgggattcatgtcttcatctagtaaaacattactagctttgagatctcggtgtattattctcaatcttgaatcatgatgaagatatagaagccccttagcaattccacatacaatttggaagcgcttaggccaatctaatagtatgcttcgactttcatctgcaaatattagtttttctactttcattaatttgaacaaaattggcaattttcacaaattgaacatcacatgtgttaaaagaacgaggaaagagtgtaaccaaaaataaaatagtcaagacttttgttggacatgtactcataaattaatagcttcatttctctatgagtacaataaccaaatatcttgacaagattccgatgttgaagcttagcaat

SEQ ID NO: 21307 - DNA, 4087 bp, Cannabis sativa
  modified_base (532)..(545): a, c, t, g, unknown or other
tttgcaaaatacaaagtccaaaatagtatttaaccataataaaatgatgttttgaaaaatacaaggaaaaagacacaaattggtggctattttttttttttactttgtgatgtttaacattattatatttttgctctataaattacattttttacttttctcttcatattctaatttttaaatattatgaaaatttaattctcataatcgtgagttatgggggaggacagatcaatttctttcaaaatattatagggttactacatttaaaaattaataaataataataataataatagtgaaaagaatcaactacatccaactctattataactaagcaaattacaaccatcaaatgcaaaatcaatggctaagaaattactctcatgtataggagcaaaaagatgccctcacttaagtaataccctatatttaatatcatttttgtttttgggacttctatatgtaccccgtaaaattataaatatacttcattattaaaaacagtataaatttaaataatttttaaaannnnnnnnnnnnnntttttttaaaaaaaaaatttcctcacattattttatgttaatttttatacttactttgattccattttcatattttttttctaactcatgtatttatgtatatatatttgtttttatttttttctaagaaaattttatataattttttattttatttttttgtcatataatttaattttgtttaataggtatattttttaagaatataaattagaagaaaaaagttgaaaaaatttagtacaattaaagatttaatttttatataaagttaaaattattaaaataaagtgtatttaaaaaattttggggtgaaataaatttcccttttgtttttgattaatgacattttttttttttttttagaagattgattaatgacattatatatttactttaataaaaaaaataaaaaagacattatatttacaaagaattgcaagtataaaaatagaatttgtcagtaacagtagtagtaaacgagagtgaagacgaagaagaagaaagaagacgacgaccgagacggagacgattaccatccatttggtgttcttctcagatcagagatctcccgccactctcttttggtatgcaattcttcatgttcattttcttctttttagggcttccattcaattccatcacgatcaaccatatttcaattttgcatttcatccgaaacgatctctatgtttattgaatatcgcagtacaaagaaaacaaaagatgggggaagggaagctagcgtaggtcacttcatttcttgatttctttgtttgagatttgagtttatcactacaaaaacttgaaaataatggggtttttcttggggaattttgttaaatatgtaaaatttatttgtatgggctttgttttaaccaaagaaaaccgtctgattattttctttatgctacgttatatcccttaagaagacaatgcagaatcaggaaggactaccagcggatggggaagtggagtcatctttttccaattccgacttcggtgaatgggatacttttcctgatgacgatattatgaaccaaaaatccctaatccagtctgatgaggccgataaaattccatttgttggtaacaaggcaaggcaaataccatcatttcctctccattcttgatcgcattcattttccccagacgctaattttataatcatcatcttggttttaccttccttgcccattttcatcttgttggatatccatactgatgataaatacaactgcaggaacccctttcctcattagccacagaatatcaatcgggcagcactatcttgttggaaaaaattaaggtttttattgggggttgagttctgtatgttttcaaaggttgtgattgatgttattgggatgcagagaaactgaaatgctacatatcacttttctcaggtgcttagtgaacaatatgcggccattcggagaacacggggtgatgggaattgcttctaccgaagctttatgttttcatatcttgtatgtataagatcaatgtccactctgcatctttctacattgcatatttgtccactgctgacattctgtttctgtaacaattaaaagtttcttggcttcttgactgatgaaggcagatatgttgaaaataacttctgctactaatctgtctgctaaaacaggagcacattttgatgtcgcaagatcgagttgaagttgaacgcatcaaagccaatgttgaacaatgtaggaaaacactccagagcttgggttatgcagagtttacttttgaggatttttttggggtaagtttttatttgtatttaccattgtttcattccgttatttttagaaggaattcgcaacaagcaagaattactccatttcaaaaagaaaaaaagaaatacataatcaatcattggaattagatattggaaaggactgtggctttgtagatgtctgcatcttgtatgttttccatcatagtgactcacgaacatattatttagttctagtgtattaattacttaataaatcctattctttgtaaatgtaataatattcaagaatgtgttctcattaacacctgttttagtagaaaggaaatggaacgacaattgctttagatttcgattgtgtttgtcgaaaaaattgagattcgtttttcttatgtcatttgtgaaaaggaattaggaggcttttgggtatatataggcttttgaatatactatttaacagaactataacagtctaacagaaactttcaacatttttcctggtgaatttttttcagctctttcttgagcaactggaaagtgttctccaaggaactgaaacttctgtaaggtattggttactaaatgtggcagttccatttgacagtgataaactagcagatgctggattgagcaaaataaaaacctaagtgatgctacattttgagtttgtgtatattgatataatttttttgcacagccatgatgagctactatccaagagtcgggatcaatcgatatcagactatggtgagtagcttttaaattcacaacggttgtgattttgctcttgactaaatttcctgacagatttggttggttagtcgtaatgtttttcagatttgttacttctggtgaaatacgcaagcgctcagagttttttgagccatttatactgggattaagcaatggaacagtggaacaggtctgtttgatatcctgaacctctaacagtcaattcaatagtaacagtattatttaaaaggcaatttcaatgtttcctttcacgctatgagcattttctcccttttaagaatgatctttgttacagttttgcaagttgtcagtggaacctatgggggaagagagcgatcatgttcatattacagctctctcagatgcactgggtgtgcccattcgtgttgtgtacttagaccgcagctcctgtgacactggtggtgtaagtgtaaatcatcatgattttcggcctactgttgctggtgataaaccaattgctagtagtagctctgggacagctagtccttttattacgttgctgtatcgccctggtcactatgacattctctatcagaagtgacactcaccttttcttgtaagtttgtctgcaatttcccttttcttcattactttaacatgggagcagtgcaccttacacaatgcatttcagtataagagagaaagcaaacttaaatgcctccaattgatagattgcttcatccattgaatattcttataattggactttttacgttagtaaaactttgttattggtaggtggtactaataattgtttgcttatatctccatatcacaggttagtgaataaggttttgaagataacaggttgacaaggacattcagtgttgtgcaatgcaaatgccaaagttggttaagttgtgatgtaaaaactcaacactctcaggtgttaaaaagatactggctaatactgtttttcaagattatacatttcagtgggtgggaaggactattggataacaaaaacatgacacctttcaaaatgcattttattgacaaagttacttttagctttgagccaaat

SEQ ID NO: 21308 - DNA, 2545 bp, Cannabis sativa
aaaacctaaaaacaaaaaaataccatataaattagccaaacttaaatgtgtcatatttatcataagaacttttaaaatctcatactaagtgtaatttcctcttttggatatctattaagattgaaacaataataataagaagaagaaaataatgtaaagtaactcaaaatgaaaaaaaaaacaacaatatattaattttaaaataaacaaacattctacattttaaaaagtctttattacactgtaaattaggaaaaattaatagtaaactttgtaagtatagctaataactttaatacgtaatatttaaaaactatatagaatgtttagaaactatatatttgggttgaatatgggttgggttgtatcactcctaatcccgctccgaaaccgcttcgggtatataaaattacactccaaccccgccccattacttattaaagcgggtaatccccatcccatttgaagtgggtgcccgttctcacatgtcaaatttttatcactaattagaatgtcattctcatagaatgactattttattaaaatatagaaagaccattcttataataatgaaagatttaaaaaaataataataattttatttatacatattaaattttattatatttttatttccatttttattcctctcgtactcttaaacttttataaagtaaattctcattttgtaaaaattataattctttgctatgtagattttcaggcagagtattgaatttgtccaaggctctactttgtaaagaattatcaaaagattattattatgttactaaaaaaaatatcttatgatcagtttcaagtataagcatatctaacctgtgcttttcagtacttattgaaaataaataaacatcattcatattaatcaaaactcatatatcttactttgattggagcttctaatattttgggaccatttctgatttcatacacctatcaaaacatgatttcattatttggattataaattaatattgtaatgtttagttttcaagactcaagtggacccaatataactgatttggatagtgaagtttggtaatggaaacatatcaactcttaactaaacatttactttttataaatatacaaaaatgtaattccaaaccaaaaatagttacattttaatcttcttaaaagggactgtgagctgagctaagatgagttgatataatgtttagttaaaaagagacttaaaagtggaccccaataactgtatttggataaagagtaggtttttaaatttggtcatcatgttagaacttaaaactcatacaaaaaataatatattaaaagtgtccaaacaactaaaatatgacctagtgttaggtacattcaaaacaaaaatacctgagacatgagtttatattgtttaagtagtaaatttgtactacctaatagcttagataaaagggtgtttttaggagttagagaaaaacaaaaagaaaagactatatatatatatataaatatatatatatatatttagggtgtagcagaaggacagagccgtatgaggcactaaatcttagctttttgcagactcatttaatctgttgtgagccttagaacatggaaagctgaaaatgacttagctggaatggagccaagagatgatgagttataataagtggtctatatttgaaggggatttatgtctgcattaaaactctttgctcttttgtggtactactttcaaatggaccacatattggaaatctctattttacctctgtatatatatttatatatatatagatagatagatatatactgttatggtggataactagatttgttgatacataatatataaccataaaagaatagttttttctttttgttttcaatttgcaatttgcagagaatctatgtgatctatttccacactcttcaaaaaaagaaaagtatatggtgattttgtaatatagttggaacttgtaatttacatttttaaagaaagaaaaaacaaagattttaaatacaagataactgtaccagcaagctatgataatataatgtagtcattgactcattgatcaaggttaaattacctacattttatctatttttgatattgtatggaaacaaaatatctatgttttgtaaaaatagtaaccaatataccaaacactgttttataaatatgaaaaacataatacactaacataaatgatataaaaaaaaagttacatacatatgagggtggacaccagtggtccaacataacattatctgaggtgttaatgatagttgtccaatttactattgagtcttatattttaatttaacaattattataaaaaattactaactattgataaagtgttaccttaaaataatattaagtatcataactacttacatatcaaaatatcatacacactaacatgacaaatcaatccagaacaaaaaaatctcaaatattacaatccattataaaacagttccaaaaactacacacatctatcaggcctgatctttgtaacatccccgtttcaagcctccattgggtccttacacc

SEQ ID NO: 21309 - DNA, 5724 bp, Cannabis sativa
  modified_base (3313)..(3320): a, c, t, g, unknown or other
tcaaaaggtccaatatacctcggggctagcttacccttcactccaaatctcgttacaccacgcataggagtaactttcaagaagacataattaccaacatggaaagtcctcagggagataaactccattgttttaacattgatccccaagattaaatgccctaatacagtgaaggactttagacctatatcatgttgcaacgtaatttataaaattgctacaaagctaatatgttataggctaaagactgtgttaccaagtttcatagcacaaaatcaagggggttctgtgcatgggaggtatattggacacaacatcatgatttgtcaagatctcatcaagcattatggaaggaaagccaagaaagccaacttcatgatcaagttagacctacaaaaagcatatgatacaattgaatggggtttcattgaggagatattagaagtttttaatttcctaactcagttcacacagttggttttaaggtgcataacaactccaaattctctctaatgtttaatggagagatgcatggtttttttttttttttgcatcaaagaggggactaagacaaggtgatcccatgtcccctttcatatttgtgctaggaatagaatatttgaccaggataatgaagaaagttggtaccaaggcagattttaagtaccatgacagaggcaaagaattgcaactcaaccatttgagctttgcagacaatgtcgtcctattttgtaatggagacttcactagtgtcttatatttgctgcaaggattgaagttgttctcacatacttcaggattttccaaatgcagccaagtctgcaatttgttgcagcaacatgcctcagcaagacctcagcagaattttagcaatctcagggttttctcaacaaaccctaccattcacaaacctaggaatccctcttttctcaaagagaaattctagtaaagagtgtgctattcttgctgaaaaaatggctgcaagggtgagaacttagagcacaaggtatctttcatttgctggcagggtagtattgattaattcagtgctattagccgttcatgcctattggagtcaagtcatgatcttgccacataaagttgttaaagaaattgaagcaatttgcagggcatttttatggaatgggcaacatatgttccaaggagcaggggctgtagcttgggccaccatttgtcagaccaaaaacagaaggaggcatcagttttagaagagtaaaagagtggaatagagcagttatgagaaagtatgtttcggctcttgctaagaaagaagagaacttgtgggttaagtggatacatgctgtctacataaagaataaagtgtgatggagctaccctattccaacaaatgggagttggtattgaaggcaattggtagctctaaaaaaccagatatgccccatgattaatacccaacagtttgcacaggaaaagtaccaaattgcagtaggttataggttgatatgtccacctcaagataagaaatattgatgtgcacaagtgtggggtaggttcaacataccaaaacatcgttttaatttgtggttggcacttcaaggaagactaagaacaagagaaagattacatagatttggcatcattgattgtccaaattgtttattgtccagcaatggtgtagaaacaactaatcacttattttttgagtgcagtaaaacaaagcagtatctaatggaaattgcacaatggctcggctggggtggacatgccacggctgagttaaactgagtctccaaatggattaatcgaaccaaaaccagtaggttttcaaggaaaatgatgcatgttggtttagctagccttgtctttacatgtgtggaaagctatgaatgagttaatatggcaaggaaatgagccaaattgggtacatttaactgccagggtcaaaagaaaatataaagcaaagggtagttcttgtatggtctaagaaagttagtcaaaaggatgagatttggttgaacaatttgtaaatttatgtatagatagacataacaaggccttagcaacattgttaattaaggtgctttagtttgtataaacatagttaaaattagactgattcataaaaaaaaaaaaaaagcgatagttggtggaactataaggttactgctgaagatagttggtattggcgccaaattatgaatatgaatagtaaaatgaagctttagatgacagaatatcagttacgacaatgtaaatgcacaataaaatttggctatgaatttttgagtaaaggaggagaaagtgagttggtatatatatgggcaggtttggaggcactttaatattcccaaatactgaatcattctctggttggcgatgttggaaaaattgcaaacaatggataaacttttttgttttaaagtcagtaaaggctaggtacattttatatgtggaagtgtcataaaatcaattgaaaatttattttttgaattctattataataaaatttatatccaatccattaaagatttgatgggttgggattacaacagaactaatatgcagatgttgctgaattggcgatttctgccgtttaagaagaaattttttgccttagccatgacaaccatgcatggtttatcatgtatggatgtgcctaaatactgtgttgtgggaatcaaaattattgaccattacctctactatatatatatatatatagaatataacaggatgtgaagaataaaatgtgtatgattttgctaaaaaaatgaaaaggaaggatataatttggtgggaagtttaatttgtaaaagggggtatagtcatggttgaaaagttttttcaggccggtgattggtgcaggttgattgtatatgtgaaagtttttgtgaaatataagcttaatgctgatttagaaagaaaaaataaataaataattagtacattctatgtatcaaaacgaaaaacaaaaaaaaatacacgataatgtataattaaattatataaattctccgaattcaaatacgctctaaagatgccatacaaatatattatataaacatatattagattgtgagatcacgtgtgcaagaaataagtgtggaccctggaaggtttacttatataaatatttaaatgttggtgttaatagaatagggtaattaataatataagaagccatagcccactgctttctcccatgcacttgtcgtgctctctcccaacatcacttctctacttctcgtcggggctttccttatctctctctccataacttgtctcataattaacactaccccgatattctctcatctctctctctctctcnnnnnnnntctctctctctctctctcctcacaattaaaattaactcacttatatatatatatatagccacacccctcaacttccctctcacaatataactagctagctttatatagttcattacttgttctctgacaaaacccacactgactttctctctatctacccataaatatattcaaccaaaacaaataagaaaggaactgatatatttatatatctatagctagcattacttatatatatactagtggcctgattatatatatcgatccaacaaattaatattatgtctagcagaagatcgcgttcaagacagtcgggtgtttcagttaataacaacatcactgatgatcagatcaccgatctcgtttccaagttacaacgccttattcctgagattcgcaacagacgctctgacaaggtttttatatatatatatatgatttagctttgcttatttctacatatattagtactggccatataaaaataataacaagactttttacttataattaaattcatatatattattattgtgtggtcttcattttgccgtggtagataagtcacgattgttttacagcctcatttatttcgcaagttgagagagagtgtgggactcaattgttccttattccttctcacaatgagatattgcatacattgtagtatccctattacaccctccatcacatatttgatcaaaaactcaatattgctctacaagtcttttcttttttcttttctaaataatgacaaagttattaaatgatttctttttgctgctatttcactttgtgtactaacaaattaaacattaatttgctatataaattttgaatatttatatagcaaatgtttaatgatggtactcgtaacaactattttctttgtacctatatagctagagattttgtaaaaattaatatcactgtcaactaacatgtttaaattttataggtatcggcttcaaatgtattgcaagagacttgtaactacattagaaatttacacagagaggtagacgacctgagtgatcgactatcggagctcttggcgaccacagataacaatagtgctcaagctgcaattattagaagtttacttatgtaaatcactattgcacttttagtactaactcttctagtcccaatatataatatttatatatctatcgtttcatatatataaatatatgtttttgtttctattttattttatttcattttttatacatgtactctaattaatatcggttattggatgggtacgtgaacgattgaaactgtctcattaagtattgagtctatatagtataatgttatgctagctaatggtaaggtgatatgtctaaaaatgttaagtactattagtgcccaataacaataacaatgctattaggaaaaagggtttagtcataaatataaaatccatatgaacatgccttttccagaacccaagaatataataataattttaattcataaatgaaaggtcttcaatcttgatcaacttttaatggactagtttctcattttttgcatcaagactaaaatagagatgctaagaacatctatctatcttaaggtgttaagcactataagccatcatgacatattattaatgcatttttatatcaaaacttatatatcttaatttaataaataatataaaaaacaactaattaattataaggtatatactatatagtattgggcacaagtgccaaatataaataagaatgctcagaataatatggtgtggcctttgccacccggggttaaagttttttaggttatctgaatattgctgggacacttttgtagttaaaattgttagtataatatttgtattgttttaataagtagtatatacttttaaatttccatatattaaatatatatgtttctcagtttctctatacattatccacttccagttggccctcctgttccttacactattatatgtgtgaacacgggacatgataatttacaagtcaaaatataaaataaatgaatgagtaaaataagtggattcataagaaataagccaacctctacatacgcctatatatacctaattaaacataaccaagtagaaagttagtccacgagctaattaatctttatgaaatgggaagatcatttatgatagaagaagtcaattaaatagataaaagtaatgataaatgataaatgtaaatatatttttaatataatataaaaaagaattttttttctcttaattaaatagaaaattaaacgcataactctaaatttttttgttatcggttaccagattaaaatctcaattttaaaaataaatatgtttaaattaaatttccatttcttaaaacttctcaaggtaatacctatgaaattatatacatctattctatataaa

SEQ ID NO: 21310 - DNA, 5287 bp, Cannabis sativa
tgtttatagtacatctttttaagggtgttctggtagatccactatatatctagtttggttgagctttctaatctaattattttttcaagatggtgtacattgtagttatttagggcttcttgtaaatttttaaaaaaatttaaatagatacagtattaaaaataaagttcaaatactttgttgtacaagtgatatttttttccttttatttattgtaaacagttggttgatttttatttttaacattataaattatttaaatttttttaaaaatttacgaattgtcctaaataattaagaccgtacaacgtacacgaattttagattaaaaaactattttaaatgtcgaaacagatacagattttattgaaatatccttttagtgaatgcactacacatttttcatattatgtcaaattgagaaataattatggagtgatttttttaaaaaatatatatattttggagtttttttttttagaaaaaaatagatattttggagatttaaatattatgaaatggtacaattcaaaagagaatagcataagatacttcaattgatttaatattaaaatattatacaatagtatcaattgagtcgtttgccaatttttcaacaaactctaccctttaattcattttagccataagatataggagtttgactttaagaatcaatctaatggttataaatgtgttaatgcatgacacacctcataaagaagtgagggactaaatacttcatttatgtatatattgttatgtggcaagtaatgcatgtttgattttattttaagttatatttatttaataaatataatatataaacttataataaataatatttgatttagattgataaaaataaaatataatagtaatttgaaaaaaaaaataattaaataatatattgtgtaaagttttaaggaacaaaagttaaatgcaaataataaaataaattaaatgtaataataatgagttatgattttgtgtaattaaacaaaataatgtgaaagtgttcatattcaaacaaaagttataataatttttttaaaaaaaacaatgtacaaagtttgcaaaatcataaagaaacatatgatgttttgaaaatttaacgtggtatttagataattttgaccatttaactatatatgtaacaatatttgtaaatatctcaacaatacaaatgtacatatgttgtaaaatttctcttgtaattttaatttttttaatttgctaaatttttaattttctagattataaattgaaatttatagcctcaagaaaatataagatatggcgttcagttgcttcttttgcttcatcattatcaatgtgagtttcatctcagagtaagagagccattccttagctgagacaagggtgtacatcatggtcattcgaaggttttcagttgcctctaaaaaagttctattttttttttttatttgaaaggggttgcctctaaaagttagtatggcattaaatcaatcttatatgaacgaatacatgagttgttcacatagtaaactaaaatgaaatatattaaccgactgagagatggactcataaaaaatccttatttgagatgaaaaaaagatcactgctaaacaaaattatactaattaaacactataattgaaagacattaatatgtaattgctaccatgaaaataagtagtagcatcagcttgggctgccagaatcttctgtgcctcttcagggatatagtcaagttgatacccttgctcttgggaagatagatccatggttttgtaccaatttccaaacttatgatcaaaagcatcctgaacgtggatggtctcaaaggtgcccttgtatttttcggttctgaaacacaattacatatgcatggtgcttaattttatatagaatccttaaatatcaccgatcagaaagataagataacatcagtgtatgttggaaaaacagtaaaagaaatacaagcttaaaatctaaatcaagaaaatatctaatgcatagaacccatttaatttgcagagaaaccaaccttagcctcatcattcttgaatgagtgaaggcaaaaccgaccctcggtatcgtaaagaaagttctcgttggtttttgggatagaaaccacatttgaaataatacaaaatatcttaatgttcagcgaaattatcaattacagaaatccaaacaatcatttatcataataatcgtagttacaaaaaaaacataagcacaaaataacgagaaaaaaatattttagtattagtgacttgagcagtcagaatgtaagtggaggctcatcatgatatttttctatgtgccaaaatgtcaaacctagctaaactgccaacagactatttcgaaactacaacggttaaagaaaatctaatgatgcagcaattaaaagaaaaatgtaaactttcaattttgtaaaataataacctggagaagactcatgttgagattgaggcatagcttctaaaaccatgcaaacagtgagattttgattgagaaccaaatcatgggcataatgaatacagtgattgaaatcaaattgttcttctgaaatttacaggcagtagtgagattttgaatgcctcgattgggaatggagacgggaaaccaaatcatgggcatagctaaccaggcattttgagatttcaaatgcccttaatttggaatgactactgaaaaccaaattgttcttcttctttttttttaaatgtgagtaaagcaactaacgttttgtttattttttccaaaaaaaaaaaaaagaaaattgttacaaaaaaattgttaaagtaacgaatgttattagatagtcacttttaatatataaaaaaaaaatgtaaagtttatattattactgaaataagaaaaaaaaacaattataaccaaaataataggacatttttcactacatgtgtactattaactaaatgagatgttttggaaacattcttgatatgttattgagttgacgtgtactattcagttgaagctctagcttttagggtgtcctgtttgaggaagttatagttttattgtctaaatttccgaatatatttttatctcatgttgtttgctgactttagccgttcatgatttgacaaagcatgtttttcgattagacgatgagttatccaggttcaacgggttcctgagctagttgggatatatgcattgtcaattcataaatgattctaatcactacgttagaaaacaaactaaatgagagagtatttatattaattgaggagagagaattaatcatatatgtgttaaccttagttaattcttaccaatttaatttatattaaatagatttagatgatgtgtcttacaataattagtgggacagggaggagacaataaattggggatagtaaatttttttccatatttgaaaactaaatgcttgaacttcaatggtaattttatggttttgatgtctttgtgatttctgagttcataaaaatattataattgtgattataaattgttttagaaagtttggcaaagattagataggtttggaaggaattggatttgaaaaaccaaactttagatgtttctgcagagaaaatggttagtcgtttttacagggtatcgtaaaaacggtgaaccatttttcccagaaaaaatccaaaaaagtggtgagtcgtttgaggtgattttcgagagtttagatttttgtgttttatcgataattatatttttgtcacactatttatcgatagaaaaactttcagtttttagtttaagtcttagatacggactatattgagattgtttaccagattattgttgttgtgatatagggcccaggatcatcgagcgttttccactcaagttgactggcacgcgtgaatttggatttgaggtaagaaaaatcaaatgtatcacatagcatgtcaatgtatgttattactctttcgagttatctcattaggcaacaatgtaaaagagagtactactctaattgaaatcgttgttaggtttcttacttgtcgattacctcattaggtaacaatagcgacattagatgtttggttgggcttttcaaggtttctttattaagcaacgatgaaaatagttactgtataaagtaacgttaatatcttatcttattagacaaatatatgtgttatactggatgcttgtatacttgagatcatgtgtgttagttatctgctattatctgagtttgtgggaatgtttgatatttgattaagtttggtcatatttgaactaaaatgtatgctgttatgcttctacttttcttggtgagtctctgtgactcatgagtgctttgtggtgcagatgaagaaaggactgaattagggcaaccatgagttagagatcttccccaacaaatgtatatatcagcttatctggtcggcggtgccaagtagtcaggatcttggttgtaaatttttaatggaatttttgtaaacatttttaaaggggatccccaaccctaatttttgtataatgccaaaattaattttatttcttattacttattaaatttttaattaaattacaatttttttttatatctttaatttattattataagctgatttattaaaacacacatgtgatgtccctacgagttagggcattataattccaataccactggtgaatgttcactaagaccctatgtggcaggtttccccatttacaatggggtgcaacacatcaaccccaaccgaatactaggtgcatgcatgagtacccctaagatagatttctagagtgactagtaaatattgtcctcacatttaagactcccaaaattaaaggagctacccaaattcaaacccatgaccttaagctcaaaaaacttgagagtaagcattttaccactaaaccactcaatttgaatgaagtttaagatctcagtccaaaaatttatttatccctataatctaaacattaaaggatattatcaataaatagctctatgaaatttagttttttgataaatttctaaccaagtgctttgtggataaaaatagtatttttagataagatatctatatatattttagttaaatcctttaaatttcaattttcaccaacctcataattgattaccacacttaggtaggatgtttatgaggttaaatagaaacattttgaagttacaaaattattagtttccaaatactttcaagtagctcctaataggaaattataatatgagatataccagtaatatatattgtctagaactgttgtattatttttttactttcggtttctaaaagctgaattgatttaa

SEQ ID NO: 21311 - DNA, 3439 bp, Cannabis sativa
cgctcttccgatctatgtgaatgaatatcattgaagaagaaatacttgagtagtggtaggaagatgaagataaaaactcagatggtaatgaagaattcaattgaagatgaagagagctcatgggagtccaaccaagtatattttttttaatgataaagaaaaatcaatattaattttatttattatattaattattatgtcaattttaaaagaaagctattttgctaattaaaatatttaaaaagtcattttactaataaaagttttcataaaggttattttgccaactcactcattagaacctacccacacacgaagcaccatgttgtttacaccattgagccaagacgaagcaagtttgaaggagcctagcccagatctgaccgatctcgacccagatccaaccaaactcatcctagatttgttcgacccctacctagattcgaccgatctctttccagattcgaccaccgcctataagaagtaaagaagatgatgaagaaaaagcaaaagaagaagaaaatataaaataatttaggggagagatttttttttttgataatcttgtgcagagataatatttacgggactgatgtatatatatatttttttaataattttaataattttagttatttttttcatttaattatttttttttaattttttttatgatatttaaatatggataattatatgaaccaatatgaacgcgacacatgtatatttgtttacatgtgagataattcatgctggcacataatcactcttatagataacacatttagtttatcaatagaagtagaggttggtgagttttaccgataaaatttaaacttagaagattaagtgcaattaaaatgatagttaggagaatttaatcgcaaaaaattcttacaaaaacaaagtatatttgctttttaacaatttttttttttctacttacactcaactcaaagcaagcttgaatattaattatggcaaagcaaacttgaaatattaattataactttaatatatatatttattaaatatgatttaagagtcctcatttttgatttatttataattggcaccaccatcatgtgtatattaacgtgagttgtcagtatgaaagaagacaacatccatgtgtttgagagataaaagagattgtggtgagttgttatgtgggtgcaaacaaatatagaaacttcttccttttctccttcttctttataaaactctctagtttgagaaaattgaaggagtgagaaaaacaccagccaaaaatggagaaagctctgactaaagttggcagtttttggatttccaaaaaggccaaggaagagatctccaatattactgaggacctctctgtatgtaaaccaacactcactctgtttttacttttattgtttaggaattggattgtttcgtgtaataatgctggttccaacagctttgtctatttcatgggctttttatgatctgaatatttttccatgtgattgaaaataggttgaaatttataacttttatgcattgaaaaacagagttgaagatgcactttttttctatccttttcttttaattttttttattgcacatttgatcaagttccaacattttatttctgtggataaattgtgttattactaattagtttctaattaaatggtttctaattgtgtgttcttttttttttttttgggaatgcttacattcataaaactatatcaaattgttccttattgaatttttcaattaatttcatgatttcagtcactctccagtactgttgaagaaaaggcaagatgggtattcaacaagctaaaaggtataatgggattgaatataaatatatataaatatatatatactgcatctttgtaagcttatgaacttcagtccttgttacaagccaacaacaatggtgtaattttcttataattgtttttctattaccttcattttattctgtataaatatatatatatatttatagatatatatatatatatgcagaattgaagtatgaagttacccaattagctttagctttctcgatttttgaatcttttgttctaatcttcacttgctattaattaatgctgattttcacacctcccttaatgaaaaattttagaaagaaaggaaaaaaaattaatgggaggcattaattgtgtttggtagggtgtcattaggcaagcattgctaatctttgattacaagttgctttgcatattcttagatagtgattattagaccttttgttactttagtgaggtactgagattgacttgttaccagtccctttggtgctttgaatgcagtcatcaatttcaccattcagaagtacaataccatagtattgagtctttatatctatctttccactaaaacattcatattgtgtcaagataccaataacaaaaggtctataatattttccctgtttagtaaaattctaagttatgaaactagctacgtaattagccattaaattacttttcttttacagaaacaacagtaacttatttatactaaaattatttttaatgttggtatctaattttagcttctcttcatctaaaattccaatgaaacacgttgtagagtttctatgatgaaactttcaagaaagattgatgccgattgttctcaattctaagttgatgactaaaacgaaacaaaaaattcaatagttcaaaaacattaagatggtttctttttccaggaaaaccacaaaaagcgttggctgacctcctccgagagtacaaccttcctccgggcctctttcctcgaaacataacatgttatgagctcgatgaagcgaaggggaagctgatcgtctactttccatcaccatcggaggtgtgtttcaaggactcatctgtgataaggtatgcaactagagtaaaagggacactttcaaggggaaagcttagtgggatagaaggaatgaagacaaaggtattggtttgggttaaggtgactagtgttggtgttgagagctacaaatctgataaagtttggttcactgctggtgtgaagaagtcaaagcctaaagatgtctatgagttgcctagggaggccattaaagtagaagagttttgagtttgagatcatttcttttacttaatacttcaaattctattgtaatttgtaaaccccatgtgcatgaacattactcaatatttgttattcattggccactaaaagaaaaataagtttcatatgtatatgcctttcttttggttgctacagataatacttgtatgtatttcatatgaacatatttttataaattatatggatgtgtttggtaacttgtttttaattagttttttatttatttattttttgattaaaaaaatgattttttctcaaaaaaatcattttttttttattttttaattttttaattgacaaataaaattttgaaaacaaaaaaaaa

SEQ ID NO: 21312 - DNA, 6743 bp, Cannabis sativa
ccccttacggatcacgggactacgtactgacagtcacaatcacccccttatggggtccgacgtcctcatcgaccacacttccaactgggtcaaggctctgatattatattgtaacatcctgatttctcgagatgttacacacgatagtccatataaaataatttgagataaagacaatgaatatcttctttattgaaaaacaattaagtatgagatctcattattttaaaataaaaatacttaattaatttataaatttttaaacattaacttttacaaaagtattcgagtcataatcttaacaggatatttttaaatggtgaggcaattagatgttaataatgcatttctaaatggtgatctgcaagaagaaatatacatggttcagtcacctggttttgttgatcgatcaactcctcacaaagtatgcaaactacagaaggcaatctatggattaaagcaggccccaagagcttggtttgataaattgtcttttgatttactctcacttggctttgcttcagcaaaaatagatcattctctatttgtcaagattaattcaacatgctatttgtgtgttctagtctatattgatgacatcttgataatagagtctaatgctactcaagtctctgccttgataaccagattacttaagtcttttgctcttaaagaccttgggacactgaattactttcttggcattaaagccttgtctacagctactggtatgctactttttctcaaaataaaaattacatacaagatctcctttgcaaggctaagatgcaagatgccaagactcatagcactcctatgaatagtggcctgaagctttcaaactatgaaagtgatcatgtgattgatcctaccctatacagattcattattggggctttgcaatatgaaacaatcaccagacaagatattacctttagtgtcaataaggtatgtcagtttatgcataatcccctacagtctcattgggttgcagtaaagaggatcttaaggtacttggctggtacacttgattatagacttcaattgcacatagtatctaattttcaacttgaggcatattgtgatgctgcttggacagcagaccctgatgataggagatcaacaataggattttgtgttttctttggtgaaaatttaatatcatggcagtctaaaaagcaaccaataatctcaaggtcttcaacagaagctaagttcaaaagtcttgcagctatggtctctgaaatcacttgggtgcaatccctattaactgaattacatgtccctattgttgctcctcctacgatttggtgtgacaacattagctctgtcatgcttgctaccaatctcatccttcatgctcgaaccaaacatatagaaattgacctatattttgtttgagacaaagtgatcaacaaagagattcaagtgcagcatgtcccagttgaacatcaagtagcagactgcctcacaaagccaatatcaagcaatcagcttcctcttctcagaagtaaactcagtgtctcttctccagaaaacacttcgtttgaggggggctcagggctagctatcaaaagaagttaagttagttggtttcacctaactaactttctagctcatatatataaactctaactcaatgctatttaatcaatgtaaaaaaaaaaatatttcctcttctctttgttttgttaatcattacacatataactaaatacaattcataaattaagtttaattattaaatttaaattcaacattaaatatatacgttataagtattattcaaaatacttttaattttgataaaacccaaataccaaataaatacatactcaataaactttttttaaaaaataaaataagctagatcatcaaacttcacatatccattgaactattgaattagagtatgagaataaagaaattgtacatcatagcattcaaattcatttcatatgaaacaaaatgaatagataattcactccacttttcattcatcaaattactcaataatgacactttgaccctttttggcatctctctccattgaaacccatgctagctagctactagtggtgactagttaaagagagacttccttccgcttcctgaggggcacacaccttgatgaatttcactcaaaataaataaattaaataaataattaagtgatggtatgattttttttaagtgaattattatttattagataatattattttttacctgtattttataaaagttctctctctattttattaattaattaagtgacaatttagacatgtatttctttaaagatattacaaaactttgtcaaaattaagcttattaatagcttgacatgaatatgtcattaccaaatttgttattttttttttttcagttgttcatgataaattttgttacagaagaaaaaaaaataattttagagtattattttctaacattttaagaaatatatgatcatttaatttgttatttaataaaataaaaaatctaatcggtaaattttacaaacataaaatataattattatttacatttttaactaatagatcctattcatttggtgagataaccttttatttaaaatatttgttaaattatatataataatgatcttttttttttttacaaaataaatataaggtctaaagtagcttaattaaaaagttaatgcatatatatcattataatttaataaatataaattaataaactaattatcaagttagaaatatatggaccaataaatattaataattattggatacacactatgcatatttatatataaagttaattttgttaaaaaaaaaatgtaattaataattataattatagattataaataatgaaattttatccaaaaattaaacaattatactattaaatattgaagtcaatttacaatcattgaataataatagcactaaacataaagtaaataacaaaattcataccaaaatgatatctaattatataaattaagaaaattaattacatggaagttaattaagggcatcaatcatcatacgtaggcatatagctattgtctctttatgagcactatatataatatataaaaggccaaagatcaccaagttccaatgtgtaaaaactcttaaaagtcttcttcttgtatagatgtgtgaattagtgattattattagtagtaataatattatactttggtctagcttattccctcctcatcatcatcatcatgaccagaaatgaaggagctaatttccatggttttttgtcttcctctaccaatatcaaactcctgatttgagggtgctacctagttagattattattattattattattattaattaattaatttcatcaccaacaacaagagaagagtgtattaggacaaactatagtctctatacttaattattatcatcactactatcaatacctatattttgtggtcattaatattcatttcaaaaatgtcaaatatcacagcagcaggtgaggaaggaagtttctcttcagggaacaataataataataataataatattcatattattaacagtagtactacaactactggagatgaagaagttattcagggaaataataatcatcatcatcagaaaaaacagataccaattagtagtactaatagcaacgattcttcttctcatcatcaacaacaacaatcagtacttttgcctaagaagaaaagaaatcttccaggaactccaggtaattattattattaatcgattcaatatatgaatttcacatatttttttaataaagagattagttgattaaattattgtgaattaattaagcatagataataataataataattattgtgagagagaaaaagttgatcaattattgatttgagatctatattgtgcaataattgcttgaaaagtactgttcgcagcttgaaaattcactttcattctctctctctttttgttgccaaatattgatatgtgtcactgttttgtactgctataaaattaatgggccaaatagatatattattgactgtgcatgcaataaattaattaattgatcatatataaataaatatatatatcttttttgttatatatatatattagatccaaatgctgaagttatagctctatcaccaacaacattaatggcaacgaaccgttttgtgtgtgagatatgcaacaaagggtttcaaagagaccaaaatcttcagttacacagaagaggtcataatcttccatggaagcttcggcagagaacgacaacagaggtgaagaaacgggtctacatatgccccgagcccacatgtgttcaccataacccgacccgagcattaggtgacctcactggtatcaaaaaacacttcagcagaaaacatggtgagaaaaaatggaaatgtgataagtgttctaagaaatatgctgttcaatctgattggaaggctcatcagaagacttgtggcactagagaatacaaatgtgactgtggtactattttttccaggtatatataacataataaatttgttcttaattaaatattttgatcaattcatatatggcatgcatgccatcctttatggaatacttttagatatgtatagatatatcttgattgggaaatcattagatatggccacaaacgaagttagtaaaatgtttatgatgaagtttgaatatgtggtgtgaaattaattatttacaaagaaaatggccgacaaatttatgtacttttttttttctcctctgtcttccaacttttcaatttcttctttttattgtattataatttaaaataatataataatacaaattatcttttcagaatagctagattagtaattggataatgacaaatatttttctttttaatttactcataacatatgcgtatgtcatatgaaatggtcttaataaaagaaatatgtgtgaagttggggatgtttaaataaacaatattattatttataatttatttatatagatataattatgtcattctcatgcaaaaccccactattttgtacaggagagacagctttattacccacagggccttttgtgatgcattagcagaagaaaacaacaaagtaaaccaaggactaatgaacaacaacaatatgaatatgggaccaaatttattatcacaacagacacaaatgccggatcttatgccatcaatgcccttgactactaacacatccattaatgggctttctgatttcaagtccattcctcaagagcttatcccaatgccttacaataagcccatgaacaatatggcccctggaggcatgttttccaccagctcaggcccactttttggaagcccaagaggcatttccacatcttcagcctccagtctccagcttagctccaatagctcctctggctttaattacctccaagacaacaaaaatgcgagcggcccaattcttgcagctggatcggcccatatgtctgccacggccctactccaaaaagcggctcaaatgggagccacagcaagcagtagcagtataaactctcctatgatacaaaagagcttcagtagtactagtagcatggctggcccacatattcctcctcatcatgaccaactctctcatgtcaaacaggcccaggcccaggcccagatgcaactccatcatattaaccctgcttacgatcaccactttcaatctcaaccatcagatccatccagcatggttgacatcaacggtagagaaggagggttcaatcctactcataaaagtcaacaagaattaccacattcttttggtcctaataatagccatgacatgggaatgtatagtcaaatgttcttgaacaatactagtgccactactattctagaacaagaagatagtagtactaattctagttccatgcatggaaaattttcaacagagaggaatataacagggttgtcaaggttcgcagagaccggtggtggtggtggtggtggtggtggcaatggtgatggtgatagaataatggttgatttcatgggcattggagagtcaaggccaacgaatggtatgcatgatcatcatcaattggaagtaatgagacaaaacagaatgcctccaatgatgaacaatcacacatttcagcaacaagtctcccatggagattctgggatggaaaagtcctccatttggggagatatatgaggaaaaaaaattaagcaaaggttacaatttaattaaatattaatgctatgacagtttcaaatgagacatggtaaaccttacaaaatatttaactcgaagttgggctatggctctagtgggcttttctaaagcccattttcagctaactatatacaagagatgtcttcttttcaatcaagttcatatgttacgaattacaatctaactatattacacaaccaacctaagcaaacaaaaacaacttcattcatatggatattaacaccaatattttaaaatatattacacttactattcacttttttggtaagtaagtaataaattttattttatttttgtgaataaatatagataacttactacctttaggtgctctagaaaatgttgaaaggatttataataggaagaaaaaatgatcattgctaaataaaattacttaaaagtgaataataggattcatgtatcaaatcatgccccctaaatttttaaagtcgttaaaaatgcctcctgaactattgagattattggatttaaggatttttgtctaattttattcaat

SEQ ID NO: 21313 - DNA, 11131 bp, Cannabis sativa
  modified_base (5383)..(5387): a, c, t, g, unknown or other
  modified_base (6261)..(6283): a, c, t, g, unknown or other
ttttttgttgcactcataattattattttgtatatgggtgataaataattgtgtaaaatttatttttggcactgtaacttattcaaaaaattcacggatggtcttagataagtataaagtacatgattaaaaaaaataaaaaagatattttgcaattgtagtagaaattacaaaataaaaattacattatttgtgatctagttttagttaaattaaatatttaattatatatctcaatagacaaataataatattcatcttaattatattttcataaatatatttctttatcacataaaaagataataataagttgttaaatatatatacatataatgacggtacattacattaatttgttatatatatctaaattaatacttatttataacactagttaattgaagttagctacacctatatttattgattaaatttttggaaatttcagggggggccagggccactttaccccatgaaatacgtccgcccctgcctggagtagtgttgggcctagggcagtggtgggcgcagttggccaataggcgcagctggttaggataccttgagcaacaatccattttatacccctttgttgtactttgaagaattgatcgcttgaactattgtgaagagaagtcaaaattctcctacgtgtcaatatcgctattggtgtaattaagtatcgagtcttatataacatataacttaatataataatttttaaatagtatcgttaaccaattacaaggtaacgcatttaaaggatgctagtcactactagtacccactaacagcgatttcgaaaataagaccttatcaaggcccaataaagatcatcccctcgtgggcctagaaatattgctcatgtcatcttgtaacttttagagataataacatctattaaattgcattcactttaattgttctcattacttgccttaatttgctgttatattttgttctattttaaaaataaatcttatgaattaataatattacacgttaaccaaacacattaaattgtaagctatttgttatttttgatatttgagataatcagaaagtgttcgctctcaaattacagctactacagtaaaagttcacaaatcaactacgaattataatcactacatatttaaaattgtgttagaattttaatatgaatatgtaatgttaattttgagtgttttataattgtaacagagtccatatatataatttctaatcgatgggggtaaagattaatacatgaaataaatttttggctctgaaaaaatatatttaattgcattttatgtttattgatcattatacatacaattatttaaaaataaatagaaagacaaaaaaaaaaaaaactagtacatgtataatttgtacttcaactggatatattgttctatatctcaataattgagtacaatgcagtgaaaataattaatctaattaacatgcctaaatatatatataatttaatctagctagtttttttagagcaataataattaatatatagaattatattgttatattgatcagttatttttcttttattttttctttttcttctcaatgattcttctctatcttgatcataactatctttcagttcttctctttttcttgtttctttcttccataatatttttttctccatgaaactgcataattgaaaccatgacatgttagtgtcaataaattaattaaaaaattataacttaaatttgtatatagtaggcattatgtttgaaattttaaatagtttacggtatcaaaaataatatataaatagttagtttcatacataccggtattttttttaaaataccaatgtagtctactattttcaattttatttttaataataatataatatagaatgtggttttaatgctctaaattatttgagatttttcgaaaaaacaagtgactatatattataaactacaataaatatacaatgtcatgtgtaaatagaatttggataaaaaatatgcaagtagtagatttaaaaaaaaaaaaaacaaacaaacaaaaaaatctatttagtaaaaataaaagtaatgtctataccctaatattaaaaaaaaatgaatacataagaataatattattaattaatatacctaattaatttgcgaccacaaccatactttttatgatatattattattttgctctaatttaagtctcctcatctcatcttccatagatttctgcaacacataattaaaacattataacacatattattaatttaattttttgaaattatgatcctcctttaaccttacaattaatttaggatccacaacactatatagtaattattatataagtatttcatgtttttgatatttagaacgttttaatcttaatgttttatatagtggtatatactgtagttatttaaaatattttataattttttttagaaaaattataataattaaatatactgaaaataatgttcaaacaatttgttagaactatattgtaaattattcagatatcaaaaacacaaacaaaatacatcagtgtatcaatttttagggacaccgaaacaccttattatatatattatttgtaatgaaaaataataaattaataaattcttactagtctgtgtgttaagagaagtggtgtgcaacgacgtcgacgagccttacattcagggacagaagagaatttatcgagaaaactatcatcgagtggcggtagtgaacaagttgacttactcgagtacgagttaattttaatattaaagtctgatgagaatgagttgaacatggttactactgtactactacttgtagtactcatttgtgatgagctcacaaaactcacatctgactctgccactgatacaatctcatcatctaaattactatcaccacttgatctcctcaccaacctacatacattgtatataaaatgttaattttggaaaattaggagtcatttttgtatgggtcgggttcattaagtgggggtcttaggtacaggcctgtgcacgcctatacgggttacaagcccgtcgcaagccaattgagaggtattgggcaaaaaatataattttttttatatacatgaaaaaatttaaaaatataattgaactttttttcttaataaaatatcaaatataatatttcaataaataaaataaatatttctttttagaaaataattatattttttaataaataatagtaaacatataaaataagttaaatacagtatttatagactatacaaatgaccaattaaaaaatcacaccaactcaggcaaggtattggtgggagtagtaacaagtcccatatatctcaatttaaaatttttaaatttaatacatgtgattcgatattaattatttatactaataacgatatataatgttggacattattaaaatagaagaagatagggcttacatgtcatgaggaagatgaccgagacaaggatgatgagtttgacgatgatggccttgattatgtctcggaataattggaagaggacaacgcgcgtttcttacgccgctcaactttccttgtctggagattatgtacacattacagaaatcaggtacccattttagcactgtgtttggagtacaacaactactcttcttgaatagcctgcacataaaaatttattaagtcattgtatagttaattgtgtcccctattttcattattaattgaattgtaattaccaccaaattacactctctaatttcaaacaataaatctgatagtaataatatggttcaaaaaagataatatatcgatttggtattagggatgacaattttactcgaaagctcgtttacttgcatggataagatattaccaaattagtatgtagtaacaatagttctgaataaaaattgtattgtgattaatgtataggctaatttgaattaataacatatatcaaattatgcccttgaatttttttagctgttaaatattttttttaaattattgagattattagatttgagaacttttgtcaatttcattcatattagatttctgttagtaaatttagaaaaaaaaatccttgaatctaacaattttaatagttctgagagaatgtttaatggcatgaaaagttcaagagatatgatttgatacatatcaaaattcgagagtcaaaaatattaaattagcctaatatatatatatatatattagatgaggtgtgctaattacaacctcttaatcaaccttcacgtccgaaattacatgccagaatatttttttcaattttttttgttagcaatataatatcatccctataaatttataaaaaattttgaatagtttacattgctaaaaatagagtttccgatattccagtccaccacttatgctcaaaaaatttcaaatctataaactattcgaaaattttaaaaaaaaattataagaatcatgttacaagtataacgaacactctcgtaaaaataattttaaaaaatatttctattttcagatacaaaaattaactaagatattataataaaagattcaccattttactcctcattacattttacaagtatagattttattacctagagaagccattggatgatgatgaggtggcaccaagaaacaaattctcaactcgatggtgtatggtataatcaatcaatgcttgtgccacatcaaaatcctctactacaactatctcaaattttatctgcattaattataatacaaattaattatctaaagctagctatagttaattgaattaattaatgatgagattaatgaataattacatacttgtctacgggcacaaaagtatctaaatggacttaacatttccaactcccaatcatttgcttctctttcaataaaattgcttggactgctctcccctaatcatcaccatcaccccaattaatttatatataaaaaatatttttttattttatgaatattattaactatacataatttttttttgaacatataaatcaattatattgctcatgtatatatacataaaagttatatgtataaataaaaagaaaagtatttcaaatcacatgaattataagattggtcaaaagaactgcatagctgctgacttgaccaatctcatagtgtcatgtgattcgttaaaatccctccacgatcggactaggcacaagcctaaggtccaccatgcccaaaggtctaaaacaagtcactttaaaaatacatattttttttaataattttttaaaatactatattttttgtttgaaaataactaaacaattttgttactacattataggcccaattaatctcaggatcgactctggatccttgagaaattataatatcataatacataaaatataaggtaaatactattttggannnnntgttttgcaaaagttaccaattgggctctatgttttgttaaataataaaatagacctatattttccaaaatggtacaaatagaaacctgaattgattttttgtcaaaataaaatttaataataatctaaaagtgttatgacaaactatttacattttctatatctgttcatgttaagaattgttttcaagttagtcatattaaaaaaaaagttgtcaaaagttaagctgaggttcctatttttaccattttagaaaatacaaggtttattttgtcatttaacaaaacagagagtctgattgataatttttgcaaaacacaggatcgaaaatggtatttaagcactctatcgaatcatatgacatcatagaattggttagatgagctacaaagttcctaactaatcttatggtgtcacataactaaaaaagattcttttgagaatatttttttgcaatgcatattatgcattgtttatagaggaaattacaaattttatgaatttttatactttttgtgaaaaaatataactaggtattcttatagtaattaaactagttaccataaaaaggtaaccaggtaccttatgctatttttctccatattttttaacttttttttaaaaaaaaagttttctcatacaaattttttttttgaacaaaaaaaaacaaccacaaatttttgtaagcttatactttaaaaatcataaaaatgagaattctccatgcttatacatttataaatgaatgaaagagaatgaaagatgtatacttacttgatgatagatcatgaaaatgagatagtagaggaaaggttggattgtgaagacgaacatggagaagaatgagactaatatcattattattattattatnnnnnnnnnnnnnnnnnnnnnnnttattattattattatttcttctgatttttctatttgttgagatcaaaaaacgatcaatagcaaatttcaaagcatgtcgacttgccttattgtctttctcaacaccaactactaacaccttcttcttctcattataattattattagtattatttcctaattgcaaccctttcttcttaatcaccacataatcatcatcttcattactattaacattaaaattaataatgttgtaatcttcatcatcagatgacattataattattaatattaatattatataatatgtgtctatatacactaaaatctgagaaagacctttctcttgacttaattaacttttaaatactaattaatgattttgattatgattatgaagagagaagagtattaaattattagttaagttgtttgggtgatatgcatgagtgtgaccattcaactcaaacaaaaatacttgtaattagtaattattattattagaatattggttatgataatattttactaattatgtagataaatctagcttgttatgtacattatctaactattttttaacaaagttttaattcttaattaattattacctaacttttaacatattcataaaatttctattcttaattattattaatgatcattaaattgatatgattgaataaaaagttttctcatatgtattaattaggctaattagaatttttttcatttgaaaatttaaggagtacgatttagtactgataattagttacaatcttcgtgttagtgaaattgaatgggcatggacaaaaaattttaaatctaataatttcaaaagtttctagaggaattttttaacaaatcaatgcaaaaattataatttcttatccaagattgtcttcatgctatataatataagtgaagtaatatatgaagaatgaaattcatttaaaattttattaaaaaaaatgaactttagacatggaaatcaaaagtaaaaactgagcaataaaaatgaaattcacaattacatatagtttttaatagctaaccctaacaactttttatgtaatcaactttgtaaattttttttgttttgtaactttttgtttatttcttgttgttgtaatttcgctgtctataatgtggctagatggactttcgcccaaaacatttcaggtcttgagccctcctcgataccctttgtaaggatcgaaaagtctaattttcctatttataaaacactttattttcaaaaaaattaatagctaaccctaacaacaagacaaaattattctttaatagaatcatatacaaaacataacttttatccaattaaaattattaaatgaattataaagtactctacatatcactcacatatgagtaatatgaaacaaaacacacacacaaatttttcattttttcgttgataaaaacttgaaaattcacttcaaattatgttccatttttcctctagcgactggcaaatcatatttgtacagcgtgcagcgctcaacgagtaattagaaactaaaaacaaataacaaaaacaaaattagttaaaagaaaaataatagaaagaaataataatttgtgtttaaaaaaagattaagacaaaattagagtttaattaattaccagatacaaaatcatcaatatggtaatctggttcaattttcccatgagccattacaccaacctgatcaaaatccatgcataataatatggaatcaaataacaatttttaataatatttatactaaaattaaattaaaaatatatatatatataatacattttataacataccacaaaaactatgtctctatcactttcaaagttatggacataatcattcatttttatcaacttgtttgagctagaagagaatcctgtcattcaaacataaaataaataggggttaattattatgattcttatagaattttgctcttcattttttctttccaaaaattctttataaatatttccttcacttacattctattattttttttttaaaaaaaaaaaaaaattactttatgtggccataatttaaaggtatcattacagaacaagtctatatatattaacaactctaaactattcaaaattcaatttatttatattaaacatacaaatattataactctaagtaatacattatatatattccaagaacttatcactagaccactttttataattatgtacttgtttggactcttaaaatagatcagattaacattatattagtgttacatcaacaaattatttttttaaaaaaaaatacactgaaagaatatatttccaacaatttttatagttgaaagacaaatcctattcattctcaaacatatatgtttatattaattgaaaaaatctagttaataaaaatactatatgataatacctattaaaaaaaacaagagttgaaaagctcaccaattctatgagaattaacaggcaaatactgagtaacaggatttttgattactcgcaaaagtttcgtgtgagttttttcatcctttatacttagcttttgtaacaattgcgctgcaaaaataaaaataaaataaactgtgaatatatttataaacacaaaactaaagaagtctataaataaggcaactaattatttggctcgtgctgcttgttctttttcaggtaatcgattcaattggagtttgtcctgaccgatcttcatactattttgttagcagattaacaaagaaataagtaacactaaattaaagaaaagtaaagttatatgatagtgaattagtagttaattagtgattacttacagatgagaccataaaaacgtttggatgttcttggcaaatgagtttgaggtttgacttgaattagaacccttttctcagttcttatgtataacccttttactcttcctgctttgttaagtgtactatctaatatggccaaaagagcctatacatatacacacacattttccaaattaattaattaattaactacaataataattaatctcaattaattaatatatatataaatatatatatatacatatgaaagaataaacaaacctgatggacaatatcaggtcgataatcactttcactttttttatgtttgtttaagaaatctttgtgatctgaggttaaaagctggtaactctgttgtcaaaaatatagaaagacaatttgttaaatataaaatagaaaaaaaaaaaaaagaatgttaatttcaatctctcattacgatctcttagtcaacttctacgatcgaaaatcacatgctaaaatatttttaattttttttcatagctgtattcggttgtattcatagttgcatattacagtctattaaagtgtgttcaaaaaactcctgtaaatgctataactactaaaataaaatattctagtattagattataataagaaattgactctaacagtaacagttcttatattaaaaatgtatataaatatatatacattcgcagaactaataaaatgcacatacataagagcaatatctgaattaaaatataatgaagggtgttactgttaattacaacctcttaattaattttcgtgtttgaaaatacatgtgtaagatttttttgcaaattttttttcatagtgttgttcattatgcttataagttataagttcgaatagtttatagtgccaaaaatatgtttgaaatttttcatacgtttatttttgttattgagaattttttaaaaatttacaaggacggtacggtaaccataacgaatactgttataaaaaaaaatattccagcatgtgatttcaaatgtaaaggttgattaagaaattataataaaatgttataattggcactcctaaaaaaataatagtaaaaaaattataaacctaattttccaatctaacaaaaacagagagtttacaacaatcaaataatatatatatatatgtatacctttccaactttggcaacttccaaagaagctttttcaagaacaaatataacaccaggttgtgatgatttgagggttgttattgtttgtaattgatgatgaggattactaattggaattccatcatagtcaacttcttcttcttcttcttcttcttctttctcatcatcatgagatttcttcatcttataacccttcatagcataataagttcgtaccatattctaatttttgatttgattctctgtttaaattttaatcgattagagatacaaaatattggagaagagaaagatgtatagatgatattttaaatgatataaaagaaaccctagattactatacctatttttccttttttatatatataataaatatataatgtaccgaaatactcgtattaaaataatttttttttataaagattaattccacctaattataattattaattttaaaagggaaaccgatcgagtatgtttaaatatataccatttttatcttattttattgccttatttatagtttgcctttaattatttcaaaaagtctctattttttgtcccaaaaaaaaatctctattttcatttttcataattatattaaaatgcttcataagaagggaaaaaaaaacatctaagctacataatcactcttatgttctcgtattttttgatacaattgtgtaatttttattgtgaattacaactaacaatgttgtattatttactccatcttattgatttttcttatatgaatacgaataggagttattgccttacattacgcaacaatatttaactcgaacaacttacaaaaatattggaatttgagttaatttttataaaaatactgtcatacgaattttttttcaaaaatactgtgcttttataaaacactggtaaaacac

SEQ ID NO: 21314 - DNA, 1357 bp, Cannabis sativa
aaaaaattattaaacttatatattatcaatcaaaagttcttagttgaaaatattaatcacaaaataataatttgtgctttttattaaatgtgtttataactgtacttattatgattataagactaataaattagtgacaactttttgtatcaaaatactactttttagtttcaaatatttttttagtgtaaatatggatctaagatccactagctattaatagtttaattaacactctaaaaactcgtttgatatactgtattgtattatattattttagtattatttaatataatatttggtattgacttgtattaataatatgttgtataaaattatatttttataccataaacttgaccccaatctcaaccctagtcctggacctggatccttgggctgaacctggacctggaccccatccccaaatcctgacctcggacccaggtctggggatctggggcctggtccgaggtccgaggccaagtctcaggttgtggtctaggacaggattagggtttgggtaccggtcagggtcttaggacgtgtctagggtttgggaccggtctaggatctgagtctgaggccaggattcaagttttcaactcacaacatctttttaaatattataatacaaactaatacaaattatttgttatgcattaatataagatttacaatatattgattttataattataataattaatataatataatatttttttcattgttatttaatataatacgattaaccaaaccatccattaatgatttatttataaatttcagatggtttttttcttcaaaaatgtgtcatagagattttttattgttggacacaagcatgtgcctctttcttcattagtcactaccattcactttagacaacatattaatatatagatactaaaactgtcatgacagtcttaaattaattaaactatatagatgttgatatataaaataaaactcaaatatgtcatttttgtagcagagactattggattttatagttttgtttaggtgggtccaaataaataaacaagaaaataaaaatattaataaggacttatttatatatgccaaattgtcttattgggaatgttcaaacaagctagtcaaagtaacctcttttttttattattattataaaaaagacatgtcaagtagtgcctataactaaagccaattatcttgatagttaagttttggggatcaatgtggtccattactatgaaagattatggaaaatgttaattgggaatctttgttgcagatttcttccctatttctatggtcattttgataattttggagatcacgtgctagctatagagattttatacttcaatct

SEQ ID NO: 21315 - DNA, 2633 bp, Cannabis sativa
aaaaattactaattaaattttttattttgttagatgataaaataaattttatattttataaaatggtacaaataagatcttgaattgattttttttatcaaaacaaaattcaataataacctgatttagacgtgttataacaaaattagttatatttattgtatttttttgtattaagaattgtttaaattatttatattaaaaaaaatgttgtaaattgaactcaaggttctattatattattttaaaaaatacaattattttaaaaaaaaaaaaaagactctaagtaacttttacaaatccaaaataatatttagtcttgtattatattgttcaagataaaaaatgaaaattaaactcaaaagtcacaaccatattttaatttttcattgtattacaattgcagctttttagtttttggaaaaaataccagttgctgttataaactgcaccaaataaataaatagtacattattgataatcaccaattataattttttattccaaaactttaattatatttataatagttctcttaatttatgtatttgaaaatatatgtcagaatattttttcttaaattttttatgatggtgcttattataattataatattaattttggaaatttttaaaaaattctagaaaatttagatgttgaaaataaatttgaattttttttaatacacacgataaattaaaatattaggaactttactttcgatactataaacttttcaatttttattttttttttaaaaaaaagtaacaagattacaacacaaaaataatatgaaaatataaatagttcgtagttgtgtaaataaaaacttataaaccgtaaaattattctgagtgcactgattagaatcttctataacaatttctttattaagaaagtgttgaaatatttcttttcatttaatatgtttgttatgttaaaacatcatcacaataaaattttaaaagattaagaatagtttattgtctttgaatttttttttaacatgtacaataaattaaaatatcataaactttatttttaatactttaaactatttgaaatctttaagaaaataacaaaattacaatattaaaacaacattagaacgagaacattattagttcatactttgtaaataaaaacataataaattttaaaaatattcaaaattcaataaacctcatttttgtaattgttttaattttgctaggtatttatgaaaatatctcaaaaattaaaggaataattacatacaacactaatttttgtaaaataatttacatttttatgttcaaagtttttttttttaaatattttatggtattttataaaaatacaagaaaaaaaaaacacataagaataacacaaaataatataaaaaataattgacacataactaaaaatcaattacaaaggaaaatttgattttttatccttacattaaggggaaattttttccttaaacctaaaatagcctatattggtaaaataggacaatatttacttaattctcacattaccccctcattcaaatttgactccacaagcatcgtacccaacacaatttttttgaaaaatcactcaacacaagcatcggacccaaccccatcagactcagcatcgggtgccatcggaccccatcgggtgggtccccatcggacccatcgggtcttcgtcttccccaacccattcacatggagcatcggtctgaatcggactgcatcggacccggtggttcgatagacatgggttcgtggtggaggaggtggccgatcgcgcgtgggtttttgttttggtctgttttcatggtggtcacggcgtcgagcggtgcggtggttgcggcggtcgagcggtgcggtgcggtggaggaggtggatcagcgtgggttttgtgcggtggaggaggtggctcggcgtggaggctttgtgggttttgggtttattttgagagagaaaggaggaagagagagagagagaggttaagaaaaatgggaggggtattttagggtttagagaaaagtatacccattttttcaatagttatacctattagtttggggaacaaatttaagtataaaaaatgcatagaaaattaaatttcccataacaaaataacaagaatataatataaaaaaattgtagtttatgtaaataaaatataaaatatttgtttcaaaaaatctaagatattgaaaattccgtacagaccgtatttttgtaatttgtttttggttatttttcgttttttttttttttgaaatcatcccaaaattaaaagtgagaaaattgtattgtatacccattttactttatctattttaattttcactctcatttctatatttattgagatatacccacttttatatatgatgttcctattatattccttaaattaatataaatcatgtgctacacttaaatggaggggtgagtatattaggcaactcacttacaaaagtagatagattttaatgaaatataatatgatagtatttttgattaatagataaaaaaaaaaatgtattcttcaacttatcccaaatcaaatcagatttaaactcgaggaaattaaatcctgtaccctttttaagttagactctcttgtttttacctttagttttaaatttt

SEQ ID NO: 21316 - DNA, 4215 bp, Cannabis sativa
ctacaaacaaccaaaaccaatgaccaacaaattttaaaagagggcaacactattgcttactactatatattatcatgtatatgtaagacttttattttaggtttacattaacattctaattcatcaaatcttccttgttaaagtgaggatattttcccaagtctcatcacaattgtattttgttctgattacaaagatttagaaagaaaagacttagttaaaaattgcagtagcaatctcaattatctcaatggatcaatcaatcagacatattttgtattatcattgaattactacaaaatttgaataattcatcaatcaaagaagtactaagtaacaacacagctgatttagatcaaaaggtttctactttcttcaatctacaatgagttagtggatatagattatttaaaaaggaaaactttttgaaaaacccaaatagaagaaagattacctgaagtgattattcttctttattcgaaacccatgtatgggtttgcgccaactctgcgaaattcatcaaatcatcttctacccagcgccacatgcaaactctgaagctcaactcatcagaagaaaaagagattcgaatttttcactttgagatcagagaaatttgtaaaactaaacatttcaattactaaaatatgcaaaatagccgcatttaatttactggcgcatgatggtgtcacagtataaatttattttacaatgatagtatatagtcaacacagtataatttatattatttttagaaatttcaattgctaaaaaaaatttagaaaattacttcttacactattttttattttttttttttaaatttacagtttaaattattccaataatttttacgtgagttgttatataaattttgattacaatttaaattattccgttagttattatatgaatttttattttgatttctgttaaaaaatatattttgaagtgtaaatgacaaaataagccttattttttaaaaattatactaataaaactttaaactcaatttttgataatttttttttatataactaacttaaaaacaattcttagcatataaatataaaaaatttaacctgttttatcataagacttctgacttattttatcataacacttctagattagtttattattaaattttattttgataaaaaatgaatgatatatttactctatttttaataaatcttatcacaagatgaaatccaagccctacatataaatacatacatacataatgatgatcatgattattatttgtttaagccaatttaactcatttggtttctttacagaaggatcattactcatagcactaaataaagtattgtatcacatatttatttacaccaccttcaatcccatggtaatataaaacacataaacatacatacatacgcagtgaaaccgaatattacaacacagtaagcctaaaatcgcgccatgaattggtgaagaacccgccaacatgtaatactacatggttgacaagagctgaggagaaccaacatttgatgatgatgacagtgagcatattgccccaacagccaatgtcttgataacgcgccgacacggatcacctccaaatgcaaggttcgaaatttcaacagaacagctctttctgcctatgcaggcctgaataaggagatcgcgatcagctcggttgtaggatcaaaagtgaatatgaagcataataaagtcaatcttactttcaactctcttttaagtcaaaacactgagcagcttacaagagttacatggcataattttttttatactatttagaatctttgcccccgaactatgatttatgcattattgtactcccagtaaagtagttcttctgccaaattttatcacacgtgacaaatagaataatgacatggttgtttagactattgccatgtctgcaccatgcgtgtaattaattaaacttgacaaatcattttacaacagacactatgaataattcagagatcatttttaatggactgaaaaatttagaagtacaataatgcataagtcatagtgttgaactcatcttggaaattattacaatggctatgtaaaattcctagaagaaactcgaatcttagattttgttgtactcatcttgggtaagagtggatgcagtgttatcatatgcaaatgcctgaactgaataaacacactggaagaagtagttgagttactttaccttagaaacaatggccaatgagttagatgcatggcattttcctaaagcaaacttctgacagctaccttgaggagttccgtagctcgcgaactctatggaagagattgtatagccattttcacaacgcaattgcatttccggtgtcaaatcgtttttagtcgaccacttatggagaggtggataatgagactctgaaactagaccacaaatgtatcgagtcgtacgagtcttgacagaaatctccaaaggatttcctcccgtttcctcgaaaagaacgagtaagttatttgaatcctttaaccatgcccgtggtatgtggtacctgaggatcaataggtacagttagcaaatcggaatgatttttagtaattactagttcgtgttgcctaagtttttagatagaagcattacaaggtctgagtaggcttcccgcaattagttgtacatttatcggagttgtatgctcctcgatagtcacagacattttgacatccaccttttggggcaacgatagtccagtatcttccgatatggtggccattgacccaagcctggccctttcccatgcttgccaaatctaaagcaactggattagtaccggctggagcatcaaaatatgactgcatagattttgtgaaagaaaaaaagaacatttgtgagcaaagagatcgaacttcagacatcagaaactctctctagtataaggcttgagaaacaagccgctcatagaattgacttgaaaaacaagcagcaaaaaatgccttacatagtcatggacactctattctcaagcaatgtaaaaaaacatgtgaccccccttatgtttatttgagtagcaagtagaaatggctagaattgatttacatagtgagaacagagccaagcatactatatcttgtgagaataaatctcaaaataaaaataaaattacatttgctattttcaaaaattactcttttagaagataaatttaccttgtaccaagtaaatattgatggatcagcatctggacttaaatcagtccactctgccttgtcattttcttctgcagcatatatcttcaagaattctcccttgagcccaacctggaaccaagttaagcaacatgaaatccacttgattaaataatgatgactttattaaagtgtgtctagaatttttgcctataaaaaatagtctttctttatctttttcgaaacaagtcattgacttgtattgaagaaatgtctactagaccattatctatggttaaaaagtgaatttaggtggaacacgatttaactgactagcaaagcatgagaaagagaacaaaagtatattaaaggtagccaacaacttttactttcatggccaatacaaagaaaatgaaaccttgaaattgaatacatacctggtaggtccataaagactttgagagatctatatccccatttcgaaatccagtaagtttcacttctcctcgaaaccctgctccgtctttctccaagaaagcgccataattctgtatcattaatgcatcatatgataacaagtgtcaatatatagtcttcgtgttatagtacttaaaacttcaataaagaataggcttaggttgggttagtaagaaataaaattttcaatgaggtagaaaaggacataagatttatctgagaaaaagttaaggcttgggttggctggctctatggttttacaacaagaaagcattttatggcatactctttctcaatgcttctctgtaattggtattttaagcagtctttcagaggctttctaggatgtaatacaaaggaaatcatccattgtaatacaaatttgtaccattaaaactgataaggaaactacatgaaagattcagaaagaaattaaaacactggcttggaacgtgctgaatctacctgcaagccgactgtttgagataagaagactagatcattgtatcctttgacaaactgtacaggctggaaaaccttcacccaacggccgctcacagtgccttcacttcaaaaagt

SEQ ID NO: 21317 - DNA, 2652 bp, Cannabis sativa
tctgtaggagttggaatgatagtaaattttcattgagtttactattccattagcttaacaagaaaatagcttacttttagacggtagcttgaacatatgctttctttcggtgtcgattcagtttctgttgttcttcatctttgctttaatttggtaaagatactgacaggtgttgaaacgcatccctggtctgattcagagatgcattataaaaaaatgtggaatctttattgtgtaattttttgttctagatatgacttgtttgattgcaagtgtcccatatacctatttaatttgcaaaatttactattttacttttagctcattaactatattacttcatgttcatgaatggttgaatgtaatttctgctttcttattggtgtttatttctgttgatactttcaaacttcgtttctcataaatttatttttttctacttgaatttgtaggagtttctttgaagactcaggaactttatgcaattgtctttgccacacgatatttggatatatttactaatttcatctcattctataataccataatgaagttgatatttcttgggagctccttctctattgtttggtatatgagacgccacaagatagttcgcagatcatacgatagggaccaagatacttttcgttatactttcctcatgttcccttgccttatttttgccatatttataaatgaaaagtttactttcaaagaggtattttagcttgtttgtttgttttctgtttttaatttttctatgctcatatagtttgccagttttgtgtttgtttctaaataaccatagactagtgttgtcctattatccacttctatgtggtgttccctcaccaaatttgattgagcaggtaatgtggacattttctgtatatttggaagctgttgctatacttccgcaattggtccttttgcaaagaacaagaaacattgacaacttgacagggcaatatgttttcctcctcgggtaagctatttgtcattttaatcaattacccctttttccaaacagtttttctgttattcttcacctttaaatttgtatccccttatcactacttttcattttatttgtatgtctactgaaaatgttatggcaaatcatttacacgttctgttcatatttacttcatattttgatgtaatgaaggaaaaatgaaataaaactagatctatctataatcaggattagaatccctccccctcccacacacaattggattattttcaaaataactgagaacttgtaagaaaaattcatcggaagagtctagaggcaacaaagggattttttcatttggttgtttatgaattttgcaaactaactccatctctcttagctgaacaaattctgtatcctgatttctttcatcctagatatcatgcacaatgggttgcctaattcaataatttttgtattgtgttttgatggatattattacttagaatggaattatgttatgttttcaaagtattgtatgaatatatcttcaaagatgattcattagtcaacatggctgttttagatcgcatctgcatgcataacagaaagggtttatcatggatgagctgatttcgattttcatgtctgatcacttagtcattgtaggttggaacttgtcgaaactttttcacttatttgtttttcttgttgcagtgcgtatcgagcgttttacatattaaactggatttatcgctactttacggaggaccactatgtccattggataagtatgattctttcccttcttgcctactcacatgagtttattttgttctcacttttttattattattataaatgtaagctcatgctcatctgtataacattttatgtcatggttctgccttttcagcttggatagccgggcttatccagacgatgctttatggcgatttcttctattattacttccagaggtaaaattctatgtcacaaaaatattattttcaaataaaaatgtttataattgcgtaaaatggtgtaagacctgtctcacactttatgcagttggaagaacaatgttaaactcgagctaccggcttgagatctgctgaatcgtgactgtgagttatatagcacgatcggtgctttggattcagcttcttagttagtgttctcccccaattgtaccatagcaggctagtttattaaagaaaaagaaaaagggtttgtgattctcaatgtagaattaaccagttacatatacccttgtatccacattcaacagaagattttataacatctttttatcacatgtagctcaaaataccttacaaaatgaatgattttccggaaattatacttattgtaccatatgttaaatagttatttaggattattttagtcttttatattagttgaatgctttttaattagttatattcttttacttttaactttacaattgaatgaaatcttaatttctctccatttcttttcttttttatttgttatttttctctttacaaataatttatttttctaacttttttattttggtcacatatcattactatcaattaaggtagggggaattttgattttatatgcttaaaaaattaaaaaattttataattaaaccaaaaatttaaaccctaaaaaaactatacttttttttttcaaaaccccaa

SEQ ID NO: 21318 - DNA, 1845 bp, Cannabis sativa
ttttattaaaggaaggaacatagcgggaaactctatgatttctagagagatagtccactccatgaaaagaagaagaggtaatagaggcttcatgatgatcaaacttgaccttgagaaagcctacgaaaaaatggactgggatttcattcttctagttctgtcgaatatgggtttcataaatcctttcctcggatggatccgagcctgcatatcgttacatgaaatcaagctccttctaaatggatccatagcggtcaaagttaaaccagagcgaggtcttcgacaaggtgatccgctatccccctctctatttatccttgcggctgaaactctctcccgtcttcttcaggataaggaaaggaaaggtcaaataaaaggcatcaagattggccgtcagggaccgttcattcaccatctcatgtttgttgatgatataatgctttttggtcaagccaccactaaagaagccaaggccttcaaggaatgcttagccacttactgtggttggtctggtcaatcaattagcctccagaaatcttcggtctttttctccaagggggtgcctcgggggcggagccaggaagttactgaaattctgggaatgaagaaaatgaatgagaaggctacctatttgggactgcctttattcaccaactcaagaagaacggataactacaatcacttggtagaccgtgtcctgtcgcgtatcaagggttggaaagccaaactactatccagtgcgggaagagcctgcctcatcaaatccgtaggctccactttatccaactatgtagcatcctcagatgtcatccccatatccactgccaatagaattgacaaagcccttagagacttttggtggggagatacggaagaaaagcgagtcctacattgtgttgcttgggagaaactttgcaaacccaaatcgtttggtggcctgggattcagaacaacggaggcaactaaccaagctttccttacaaagtgggcttggaaggcgctaacagatgactcaagcctttggaatcaagtaatgggagctaagtatctcaagcataacaacttcctagatcttgaagttcaaccttctgactccttaatttggaaggctatcctcaaagctaggactcatctccaaaaaggcgtttgcaggaaaattggaaatggggaatcaacctccatctggtttcacccgtgggttcccttaggcacccttcagcctcgaccaaaacttgacgcaactcacggtatcagccttgtctccaactttatacttaataattcttggaacgaagatcttctcctccaatggttccaagaagatgatgcaagaagaatcatgaacatcaccattccgaaccatcctttggaggattcctggctttggacaccagaaagcaatggaaaattctccatccgatcagcctatcgtactatcaagaaccttgatcatggagatagcaataatgaaaaatggaggataatctggggagctaagatgcattctagaccaaaaatgctctggtggaaaatcctttcaaattgtttgctgacgagaggtaaactccaactttttactggattaattgacccctattgccctttgtgctccaaggtcgttgaagactcgttccatattttttgggaatgccctatggctcgatctatatggtttggctgttattggagcataaggacggattccttcagtttctccaattgggaggaatggttaattggattcaaaaacactgctaacagaccaaatgatcttagtttccatgctttccttgagggtgctgcattaatcttcgagaagatttggaaggagagaaacatggtgat

SEQ ID NO: 21319 - DNA, 2935 bp, Cannabis sativa
  modified_base (40)..(52): a, c, t, g, unknown or other
actattagtagaaataaataaatacttattctcacacaannnnnnnnnnnnntaaaatttaaaatatatgtatatttttaccgggtattacagagatgaagttgttcaatgctgtaatattgttagtggcaactatgatataatcaacataaatgagaattgcaagaaaattgtcggattgttgtctaaagaatagggaatggtcattttatgactgtgtaaaaccctactgcagtaaggtggtgcttaatttagcataccattatctggaggcttgttccaagccatataagcttttttttttaatttgcaaactgtattttttgagattactcattttggagtgtaatcttgaggtagtttcatgtaaacatcctcatgtaattcaccatgcagaaaggcattattgatatccatgtgatgtaggtgctaattgttaatggcagctagagcaaacagtagtttgagagtgttgaatttagccacagggacatatgtttcgaaataatcaaaacctgattgttgtgtgtagccttaagctactaatcgagttttgcatctttgggctaagccatcatggttgaatttctttctatagacctatttgttacccatggcatgttgtccattaggtaggggaacaattatctatgtgttattttcctctaaagtatcgatttcatcatccattgttgtgttccagattgtgtgtaatttggcttcagcatatgtgacaggttcaggaagttgagctgtagcaaatgcagctgctctaaagtttgcactcaatctgtcataggaaagaaagtttgtaatggggtgagttgtgctaaaagaggttgttggttcacatgtgtagtcattcatcaagtgagaagatttctaaaatattctacctgatttggaggtttttgggagctactggtttgcagcaggagaattgaaacctagagtgtcaggttgatgtgtatctgtagggttagtagcagtattattggaaggaaaaaacatgtcaatgttggtgttgatgttagagtttttgtaaggaaatattgattcataaaaatgacatctcttgaatgaaaaatttagtttgtttggatatcaaggagagtgtaagctttcatgtttttttggatatcctagaaaaatgcagggtcttgctcgaggagaaaatttatgaatgtgggttacatgagatccataagcaagacacccaaaggttcttaagtgagcataatttggtttcttggtatgcaatattttataagaggttttatcgtttaaagtaatggaaggggttctcttaagcaagtaaacacatgtttttacaatgtaactccaataaatgagtggtaggttggattggaaagctaaagcctgagcaacattaagtatatgttggtgtttgtgttccacaactgcattttgctggggtctcccaacatagaaattgtaatgaataagacttttgctactgtaaaaactggttaaagttagttctttagcattgtcacatctaacagatttgatattagattgatattgagtattgacaaagatgaaaaagttttctataatttgaggagcttcatatttagcccttagtagatatattcatgtgtatcttgagtggtcatccactatagttaaaaaatatttgtatccttcaatagagggtgttggatatggtccccatatgtcgaggtgaataaggtcaaaaatagccttagagaaattgttgttggattaaaatggtaatttcttttgttttgccaagtgacaagttggacaatgaaaaggagcaaaaatatcatgaggaaattgtaattgtttattgatcttattagaaatcaatacaaaaggatgaccaaggcaattatgccattagtttttatctgttttacaagaaattgaaatttgagaatcagagctggttacttgatgcatgtaatagaatttccatatcttttagttgtcccaatcttcaaggtccgagaaggtccctaaatgtaacagtcattagaagtgaaaacatgtaattagaatttttttttccattaatgcagtaacatatagcaaattaaatttaaattcaagtacatataacacattggaaagtgtcaaatttaagttgattatgacagtgccaaccttttttttatcttaactgaagtgacattaggtaattaacaatttaggaatatggattattggtgaatgtttgaaaacatgttaaatgagaacaaacgtggtgagtgacaccactgtcaatgatccaagaattgaaagaaagaaagagggttgattttatcagtgaagttgaatacacctggtgtgtcgattgatgttgaagcatctgttgttggttgtaattgttgagtcaacattgagataagttgttgacattgagatgttgttagttatgattgggaaatgtcaagattaggggtcgagacttgcatactttgagggtttcgagttgatcaaactggatctgtttttctagtgttgctcgactcaactggcttgaaatttccataaccaggggaaatccatttaggaaataaaatttgtctttgtagtggccaaatttttggcaatgggaacacatgggacatattttttgtttcttggagtctgattagttgcaggagctaaatcagtattggatgctgctggtgtggaagtagtagcagtagtaaacgttggaatggttcgatggctaatggttctttgtcgttcttggtgtatgatcatggagaaaactttgttaagggtggacaaggatcaatgagaagaatttgatcacgaacagcatggtaactttcgttgagacctttgagaaattggtgaacctgatcatggttgagatgatcatggtttgcgtggctacaacataggtgtagggtaatctgttgagttttatgcccta

SEQ ID NO: 21320 - DNA, 6591 bp, Cannabis sativa
atttggtaaattaatttttcaatagtaatattacatttttatgtgataagaatttgatatatttttttttattgattttgacaaataaaataaaaatatataaggaaaaaaataatacattattagttcttaaacaaataaattttgggaaaaaaatataaatttagatataaaatatattttttttattttaaaaaaaaaaagttgggtcggatcagatccgattcgtataaggcgagtcggatcagatctgatccgagtatcttatccagcggggcggggcgggacagatccgtatatgatctggatcaggtcggatcagatccgacccgccccattgacattgttaatttttaagtgacatgtaaacgatttgaatcggtttgggtaactgacgtaataaccgtaaacacaaataatcttatttttggcttcactttttaatcgatgctaattttttttatttcatttaattaataactgacgcaaactaaaaaaaaaaaagtaaatctaatcgaagatggtttcagatctgagatggtttgatgcactaccccgaactcatcatcccagaaatcagtcgtgggccaccaccccaaacctaaaaaaaataccagatctagttgtgacaaagagagagagaaagagagagatcaaaaacaccttatgtgtgccacggctctgccatggtctggtgtgtgctgcaacaacgacaccaccaccccaaacctaaaaagaaaaaaagaaatcaaacaaatattttcgaaataaatgaggaatgagagagagagagagagagaaagagacccctcatttttctcatggagatgaaaatggtggcagggtgaggaccgagagaagagggtcgaagagcgggtggttcaaaaccattgagagaatgaggaggggcggtgttaatggaggtttttgatttttaaagggagagagaagagtggaggaggggtggcgttaatggaggtttttgaagagagcgagagagagattctctcttggtttcggaatggtgaaaaatgagagatgaatgtaataaataggatttgttaaatttaaaggatatagcttcagttattattagacactaacattgttagcatcagtcatgaaccgacactaacaatgtaagcgtataataataaccgacacataatataaaattttttaaaaaaataattttttggcgtcagttttcaaattcacttcgaaatagccaagcaaaatattactcttctacgtcagttgataacattagcaaaagttccacctttattttttgcatcaatcattgttgttgacccgtagcattgaccgacgcaaaaactattttttgtagtagtgcatgggcacctaaggtgtaacccagcgctcacgttgacattcttatattaggtttcagattttgggaccgtcttagtgcaaagtggttaaaatttacatcgagacatcaactagacatatcacaaacatgtttgaggcatcaaaatcagattcacagcaaattgatttttgagaactcagcgccccgagcacccagtgcccaggttgacaatttatcaatttgggccccttccaagtgtccgatcaaagatctaacttttgcattgaatccgtcttcatcaaaagtggagaaatatgtctttttgaaagaaaaaacaacaaattcttggcacagataatagggcccagcacccaagttgacacttgtggttggtcttacaccgaggctgacacctggggctggccctgcacccaagttaacaatttgccaacttggggcacaaaaagtggagttttttaggaattatttcgagcatcatctatgtcttcataaaatattgagattcaactattttcagggaccaaacaaaatttttgaaggggcaaaactggcacccagccctcaggttgacacctagagttgggcccaccgcccaggtacacattctgtcaaccttggttgtttctaatctagttctattaaaaagtgtttcaaacattttcaccgtcatcaaaaataatgaagaatcaagtaaactcgaggagaaaaacacaaactcgagtccctagaaatagggcccagcgcccaggttgagaatcaacatgggatgctaccttcaattgctcaaatgttaaatctgatgcagcaattgaattgggcatgctcagaaatagggtaggagaccccgttctcaagttcataagccttagaattatcagaattagaatcctgaaagctcggcataaagggcctagcgcccaagtcagcatatggcctggtttgttggttctagtatccaaatatcatgtcatttcgaccatccatttagtttttcacaagtgcattgatacatgaagttagaacaatcaaattgaaaactttaatttttttggaaaattaactctctaaaatcagaagtttcgagtcttttgtttccgtagacaacaacatctcccaaaattagtgatcgatttgctagaacatataaatggactaagtggcgtcaaactatcacttaggaatctcaaaggatacccctttgacattcctacacttatacaatgtccaaattgacatcggatgtcaaccacggcactggaatgtcaacctaggcgctggatgtcaacttgggcgttgggacgtgaagtagctttaggaaaatagccacaattcactcaatttttatttgattgacgtgattcgacttgtattttgaagctatttatgcgctctataaagtcttgtctcacattatagatataattatgaagataaaattcaccccaaggaagttacaaaaataagctccaggtaacccacagtgggacccgtcgggcaccaaaaattggccatcaccaggagaagctaattttcactgttagatcatcatcaatagtggaagataaattatttgtatttttctcttatttttgtgggcctccttcacctataaaaggggagctcccttagcttatttttcactttcagaaaattatccacaaggtcacagcttctctctctagactttctctctctggagtttggattttttgatacttagcctattgttgaaattatcatctcgagagaaataaaaaatcaaagtagacgtagccccattactatcgaatataaggggtaaactactataaattttgtgtctcaataaattatttacttaaacttattagtcatcttgccaatctaccgagttgatgttagccagttttacagcgtcaatattttggtgctttcattgagagccacaatttgagtttctcatctacagtttgacttcctctattgagaactttgttctgcaaggaattcataagttcaagcaagcaatcaaccatgaacatgcaaagcaacataccactcctcgtacccacgccattacttagcaagtagcaagcactgaaattccccgtaaagaagtggattacgagcgaaagtctaaaaggactgagactcagaaacgtggatccataggatctccgcctgacacggaaaaatcacctgttaagaaaacgagctacgagcgagcatccaaaaggactcaaactcgagatcgtaggcttataggtctaccacacgtaggttataggaccaaccgcaattttgttcaaatcaattcaaataatgtgggaaaccgatctcctccatcggattctcttcacaatcctcatgactcaaaaccaccatgtgaccccgcaaagggaacgggacatggagtcagacttaggggaagaccctggaagcgctactataaaagtgaagagtatgagtttcgaaggctgaagatcaatgaactactccacactcggaaatactttcgtgatgaacaacgtgcttgatgtaggtacttcacttgaggtactgacggtcgacagtacgaatacttcccatgggttcatggagacatgttgagcctgaacaattggtccaactccctccacacatgataatatgaggaagactattttgaagagaatagtcggtaaagtactgtaagcagttgctcacgaagcaaacatataaaagacgacactatcgtcatacgggatagattcccatagtttccatcaaggcaacatgagcaggcaacaaccatatggccgaggttgatcaatgcctttgatcgacttggaggacaaaagagcctacataactacattagcaagaagcggccaactgatacacacatcaccatagtgtttagggctgaatttgactactcaaaggcaaacatagtacgaattagatcgagagcggtgttctcctctctaagattgaatcaattctttggggatcccctcaaagttcagaaatccatacactggcaaagaagaccttctctcccacatacacagcttaaaagtacaaattaacctgcaagacatttgagacaattctcgttgtcgaatctttccagccacaatattagaaacagcacaatagtggtatctttagctctccccgagatctattgattcttgggagatgctcaagaaagcattttatgaccaattctctccatcaaggcacagactaatcaagcccaatgatttggtctacatcaagcaacaagaagacaaacctctaaaggattaccttcaataattcttataggccaccatgtagatgaagatactgagtgaagacgccaaggtcaaggcaatgatagctggactaatagtaatgagtccattctcgaaagacttgaagctcaaattagtatacaccattcaagagcttctagacagagctgacagtttcattaagctcgaagaagccggcaagaaggtcaacggagtcgctcaaccaggagcaaccaattacactacttatttatttcctgagtcttgaactcaaattgacaaggaaggtgaagaagaatcaacaactaatgcctctactgaaatagactcttcttctatttcccaagaagaactcgagtaggtagatagtaatgatgactcccctactatttctgaagaagatctcaagcaaaaagaagtgatgaagaatctccccctacttcccatgatgactcaagaaaggggcagtgacaaagattctccttctatttctaaaaattatcaagaataggggaatagtagtgaagatgtgtcttataagtcttccaaagatagtggctaagaaatcgacattgaagtttcccaacgagagagggggggaccttatatcatcacataagcatttgaacctgggacaaataagttggagattgctatgactaccacatgaatccagtactggtaccaaggtactggaacagggagcatttgagatgagaataaagcaactgttctctagatgtttgcttcatagtgagattcactttaccttgtgcaagtgaatcaatcacctctcaaaccgaaaagatgcgatgaagtaatcttttggtttggaggtctatcgctaaggtatggcccctactattattcgaatagggtatgagtgcattgggatcactttaccgaagctttgatgaaaaacggagatctaaaattactatttctttttctttcaaattagctcacagtgatgtaattgaatttaatatctaatgaataagagcattgagtaaagctttttggtacttcattgttattaatcaattgaagctcacacacctgatgacgctctcaaacactgaacaaagcttgtagagttgcttttgaggtaactatgattactttgttagtgagttaaacacttccaacccatgaaactctagacaagtggaccagtgctcacatatgtaacaactctcggagacccaacatgatttggtatggcaagtggccaataaaggaatttcttcgatcacttggggcaaaataagacatagtaaatgggagctatgcacataacatgagcattcaaaaaaatcatggtacatgagagccatgtatgtcacacacaccttggtatacgagagctaggggttgtactgacatttcagacacatgcgttagtattcctatggtttaacaaaatgttgacgttatcactagtaactgagtttcttaatcataaaaattatagcacgagtgccggtaagttcattaatttgaataaatgcacaaatagactatttgcacaacagagttaagcattgttatgatttaagcgcttgaggtctcacaagaatataacgatcgagtttataaacctaaaatgcaagtgcaagtgttcctcctcagatcacaagaatcaaaaagaaaagaatatcatcatcaattactgaaagctctctggaagcaggacgctgtatccaggagagaatttctaattgatcaaagaaaaacttttgggaatgggacattgccccggtttcggtattcttttagtagctaaactcatcctaagtatgggatgatatacttagcataagtttaatcaaacatttattttttcttgttcctctcttggagtcttttctttaacaggggtctatgagttgaaatcatcaaactagattctcagccaacctgtgatttttcccctatatagaagatctggcaagtttttctgcactactcatc

SEQ ID NO: 21321 - DNA, 3968 bp, Cannabis sativa
cggtctcggcattcctgctgaaccgctcttccgatctaatgagttttatttagggcataaatcccaacactaacttgatttcctaccttgtaactccagaagtcagtattgtgtagatagacactgttgatccatctcaaccaaaggatatctttcttatttgccacagcccacacatatttccccattgcaaccttgttcaaagatgcaatttttttgaaacctatacctcctactgacttcggctgacaaatagcttcccaagcaattgcccatggcccttgatacactgctatacctttccacaagtagttcatgtaaatggcctcaatgttttgagccactttcttgggtaaaatgatgatctgactctaataggcatggatggccatcaacactgagttgatgagaaccaccctgccaacaaatgagaggttcccagagctccatattttaatccttgctgtcattttatcagccaaaacaacacactcttttcttgagattttctttgtgtaaattggtactcctaaataagtgaaatgcatctcttttacagagaaaccagcagcagcaactattctttctaactcattcctggccatgttactactatatgtagcagatttggagggattagggagaagagtttgaggccctataacatgtagtagacacttctaaaatccccttacaaaataatagtacatcatcatcaaaagctagatgattgagcttgatttcagcacatgtatcatgatattgaaagccttgtttttctccaatttttcccattatccttgaaagatattccatccctaaaacaaaaagcaatggggacattggatccccttgcctaaggccccttttttcttcaaaaaatacatgtaaagatcgattaaacattagtgagaatttaggtgtacgaacacagttcatcaccaagttaatgaatgtactaggaaactgcaagccatgaagcatttcttcaaaggaagtcccactcaatagtgccataagctttttgtagagcaagcttgatcatgcaactagctttattagacttcctaccatagtgcctaactagatcttgacatatcataatgttatgtcctataagcctacctttcataaagcctccctagttctgggagaccaaatcaggtaagatggatttaattctagaatataatagcttagtggtaactttataaataacattacaacaagctattggcctaaaatccttaacagtgttaggacatttgattttaggcactatagttaagacagtggaatttatttctttgaggattttacctgtttccagaaaggaggtaacagcatagtaaaggtcctctcccagaagctcccaattatcttggaaaaagaagcttgaaaagccatcagggcctgaggctttgtttctagggattccaaatagagcttgcttcacatcctccttagtaaatttttgagtcagcatattagcctatgtttaagacaataaaaggccccttctgactattttagatgatacccttttccttccttccatctgagacttcaataaggacttatagtatgtgacaaaggctttaataatctgatgtggctcattccatctagttccatcttgttgttcaattgagaagatctggtttttccttattctctgtttgatgcttgcatgaaacaatgttgcattgctgtcaccactttgaatccaagctgccttggctttttgctgcaggatagacaagtaatctttctgcactttgactaacttggctctagcttccagtctgcagaaatcagatcatgattgggaggatccagctgcaatttcccctgaatatcatcaagattagagctagcttgcactgttgttgattgtaaacttgaaagccctttcctattgatctccttgaagacttgtttaagggctttaagcttgctaacaacttggtacattttagttccataaacctgctgtgaccaaatctcccttagctttgtttcatactcaggatgacttttccacatcctgaagtacttaaatggtttcttccccctgtacattgaggatacaaggttaacacacctggggaatgataaaaaaggcctttatttaagaaggtttcttcagcaatagagaaacaccatccataaaaaaaattgtacaaggcttcaagtttgtgaaccttcgcccttgtctcaaggagaccaacaaaacccacaccctgtgccctaataaattgctttattagtctttatttttgttggttgttggctcctcggacgttccaacatagaaacttatccattgacaagagagggtactccccctctcttgttttggacctgttactactctctcgatcttcttgttcatttgcaacatcatcagtaattccaggattagtaatgccagaatctgcaagcatactaaatgtattctcaatcattgtttcaacaggcttctcttgttccttcactttttcccctttgtaactttctgaaatccctcttcatcaacttgaaccacatcaggggcctttcttttgtctttttttaataacccattattgcttgggttttgacttctttttacaatcagcagccaaatgccccataccagcacaatgagaacatgttggtttccattcatatttaactcccacatgagtattcgagccaaactcatcttcgaattccagcaaattttgaaaatcccggttcatcattacttcaaccagaattctagggtagttatgcctatctctttctttggtgacatcatctatcataataggattacctaattgacctacaatcttgaataataatttttttccccagtatttgaggtccaaatattcctgttgtattcatataggaatgagcttgacatcctccttcttaaaatttgtgctagggtcccaaggcttcatgattaccagtcttctactgaagaagatgtaacctccattcaaaatagagtctctgtccccaacagagcaaaacctgataatgaaaatgccataggcaagcattcgaaccctatccaccttatctttccaaattctttttgcaaaaccttctaagatatacaatagagggttcgatcccagaacatagcatacaatagaaggcttccgaaaattcacttcctctttaattcaaagagttctccagtttacgaactacagaatcagatgaaaaaattgggggagtcgatttcataccttgagcaagtgtactgttacattgctccttagctcgaatgaccttcatgaagtcctggtgtgcatccttaatcctttgaatctcctgcagtgaagctcgaggagacagtggaggctaaaacagatcatgttgagcatgatatgaatccacactccttctcccatgttgttctctaatgtcatcttccccatcctctgaatgctccaaggagcaacaccaatcacaacatccatagatttggttcgaataacattagaagcaatatttggtccctttttctttgatttcttgattgcatatttaggctttccattcatcttggatcttgttttagccatggctcaagctagaagctgcaagagcaaaacgagggaaaaaccttattgttttaaagtatccacgagtcaattcggtcaggatccttgcaacttggcatggatggttcagatctcttcatccaaatagcatctttcgatctgatggatgcgaagttgaaaagattgcatttaatactcacacctagcatttattattcatcattgcacgtctcgtgtactgtttgcattgaaggagggatcatcaatcatcctgccatcagagcaactcctcccaagaaacacgcccttaacacgtgtgtcgctaatgatttcattaaaggtgccgcatgcgtgccacaccaatggtacctacggttaatgatgttggaaatttattttacc

SEQ ID NO: 21322 - DNA, 4813 bp, Cannabis sativa
  modified_base (3487)..(3489): a, c, t, g, unknown or other
  modified_base (3518)..(3520): a, c, t, g, unknown or other
atacagaaaatgagtacagattttaggacatcgttataggagtacttaactgttaataatatcatgttagaaacaatcatggtttaaaattttgtttattattgtttagttatgttcactcactgtcttgttgttttttcctctttttatcattctttcgttttcttcttgtgctttcttcccaaatattacaattatctaaatatagtttcggaatattatttcattttttggtggggtagtctctgaatattacacaaacaacaatgaaaggaaattaagactgaactcgtcctagtaattacatggctaactaaatattgttgaaaagaacagacagacagaccctgcaacattcccaacagcaagaaaatcactagcatctgcaactaccgaatcattgttatgtatcggtggttacatggttgagattctttcgagtttcgagtgtcaaaatcattggtagatatttcttcaatgatgaattttcctacatacaatcaagttagaaaacagagctaaaattaacactccctccaaccatatttcacttaatgtgatcaaataacaagatataaaagatatctaataggcttcaatctatgattaaatgcattgaattatattttcatttcaaatacttactaattaaacccatctcttgtgtgttgttgtagaatctttgtgtggatttggtcttctattccttttggtttctccacttgatgataatggcctttgtttcaaagaagaaaatgtatctgatttacggttcattgataattccttgagaggacttactgatcgagatttcgaatgcttgttgtcttttgttggtctcaacatggggagctgcttaagctttgttggcaatgatttttgatgtcttgttgaatgaaaatcgaaacttggaggagggatctctggagttttaggaaccggtgactgtgctcggtctgaatctgaagatgaagaagggctagtagtactgtccatgtcgtaaagaaggttatctgtcaatggtggaacgcgtatactaggtgactctgaggaagaagcggagaaagatggcctgcgaagtctggtaagactcaccacctgtattttttgtttttcaaatgtggggttcaagacaacaatagcaaaaatccataagaggcataaaaaaattaggggtgacatgttggtgtgtcgtgttgaggtcttaaatttactaaaaaactgctgatccaaacacgacccgtgacacacgaaaaatttataaaacatgaacacgactcgaataaatttcatttcgtgtcgtgttgacaggttgtaagctaaattgttgtttttagtgtcattgtgtcgtgctcttaaatttattttagatagctgatatgacacgaacacaacccgtgacacaaaaaaatttataaaacataacagaacacgacctgcataattttcgtgtcatgtttgtgtcacatccgcgggtcaattgccacccctaaaaaaactaatacatcaacatatatctttgagctactttaccaagtctcctatgcataattgttccaaataagatgacaaaggtttatatgataccttttgttcgaggattatcatgtccttcttcaatcgagtaatcatactgttctttcttttaataatgtcttccagctctgaaattctctgttaagaaagaaaattagatctgaaaatggataaaagcataaaatagaaaaacagtacctttgagccagctacatcagatgaatgcagtaaattggtaaggtcttttatggtagcatccttgtcttcacaatcccttttgagattgtaaatgtcttgttctatagctaagttgttcaactgtataataatgatatgcatgaaatcagattatcaagaaagaaccaacaatgacacttacacatatttatgtgaagaaattctaaaatatagcaaaatcacatatttaagaaacctcacctggatttcagtttcagcagcagatgtgacacttgaagcccaatctgataaatcagacattcgacgctcctcttgctcaacaacattacaagcagacatcttatactgaagaatctcatctccactgttacctttacagaaagagttgccctgtttgtttgtttgtttgttcccaaattcataaagaaaaattaacaatttgaaatttcaaaatcaaccaagaaaagtctaactctgacaatggattaatgaattgttcttcttacttccaatttgttaaacaggttatgatgttgatcacaaagtgaacaaccacaagagacaagcttgtttttgtcagagccaaaaacttcaatgcccccaattcctgaatagtccttaacattgatcagctgctcacacaaacaatccagcttttgttgcatgcttgataaaacctgatcctgtacagtacactactactattaaaattcaaaataattgagctccctctctcatcattttctttattctgaaaaaaggagatcatgtggtgcaggtcctttccccactctttcagtagcttagctttgacaatcccgatgatcacgtaccaggtcttatacctcatcttactttaattgggttattagtatggacctcgagagtttccatcttattaaggatgatatcgacagagcaagctaccctcccaaagggccgaagcataatctctcctaatgaggagctgtggtgggattcgaacccttgatcccggcaaggaaggataccagtaaagtttttcctatcactacatcacacaacacttgatttctctctctctctttctctcatcattagtgctaagctaagaaaaaaacatgtttttacatgaaatacacaagaacagtttagacccttttgtctgaaatgaatttgaatgtttaaaaattactcatatcaaaatcacaatcaatgggtattaattaaaaatcatttctttaaatcatcatcaaaacataccctaaatgcgactgattttttgagctgtaaaatgatcccattcttcttagactcagcaacagcaaccccaatcacggctacaatgagaaagcgttgaatggggctaaagagttcccaagccacggcttcatcgggaagcaagccaccctttatggcgctagccgagctggcctcatcggcgtggaggagccgtccttgaagggagacccaagagagtggtgtagctgctggaacaggtggagtcggcttgatgaaggagctggagaggcggcgtttggaggagggcgtgaatggggttaaagagactaaaggtggagccgagttgaagccgagttgttgttgatgttgttgttccatggcataaagaagagagtgttagaatgcggaagatccgtactctgtcttttttaaggtttttacaaattcaaaaaagtgtagaaaagagggaaaataatgtaaagagacgttaccatagccacagttgttaacgttataatatatatatatatannnaacgttataatatatatatatatatagannnatatatatatatgtatatgaaccaactgtgtgtgtatatggagccgaatcctctgtctatatgtgcttaccatttttgtttctccaattattgcaaaacattatttgatttttgaattaagattttttttgaaagagtaataatgttaaaaggtattatttgtgtttaatattctcttttaactgtgatattgttattggtgtaattaagtatcaagttttatataatttaatgtaataattttaaaaattattgttaaactgtaatatgacacttctagaaagagttagacatcactaatttatcaaaaaaattatggatatacccttatttgtttcaaaatttaagaagtttttttgtgtaatgttttaatgcataatttgggcgcgaactacaattttcataattatgtttataattttggcgtcgacacgttcattgtctaaataattatatcatcatattatttgtatgtatgacaaaatttagtagaagaactactttataatattgtgaatagttcggtgaatatttttataatataatagtgatgacaatgacattgaatacaatgacgattatatactacgatgacaacagttttaaaatcatgtaattaattttaaataattttttatagattattttttttagatttctattttgtgtggaaattctttaatttctaaattttttttagtacaatatttgaatatatatgtttgtttgttattttttagaaaagaaaatgtataatgaatttattttataatattaatttatttttttaagtaaaaaatatttaaagtttagtaaaatagttactcttgaaaaataatatatcaaaaataattgttatataaaataattgttatataataattttttttttctttattttgtaaatgttttattggcaggttgaaagtcacatctcacaattttaagattttcttttttttcgatattaaaatttaattgtctaattctcttagagtatctcaacatgcccttaatttactccttgtctaacttcattacctttgtaaaaacaaaagattttttttttttttcaaaatcaaagtcccttattgaaagaaaacaattacaaaagattaagacaattctcgcacaaatgcaagatttgcacaaaagaaattaccaactttattagtcaaagcataattaactaaagcataagctataccattagcctttgatacattattaacaaattccgtatccttgtttcggattaattgaaccgcatgttaaatatttcatcaaaaaaaa

SEQ ID NO: 21323 - DNA, 2000 bp, Cannabis sativa
agagggtggtgataagggaagagggggagaggaagtatggggcggtgaggtttagtggtgtggctagtgatggtgtggtggaggagaaggtggagatgttgaagaaagggttggagagagatgggtttaaggtgattggggaatacttgcttgctaggtataacccaccatggactttgcctccttttagaactaatgagattttgattcctattgaatgagagagtcacatagtgtatgtatgtataatgtaatgtatgagcactatatataaatatgaattgagattggtagtttaactccaaacttgtatgttctgggttttgtaatatgctgttgttgtagaataagattgtatggttttgacttttcaaatgataagcatagcatagcttggttttggttcccagcagaaatgaagtgcctttttgtatgctcacttatctttaggtacatttaaagtgcagtaagagtaaacagataatgctctttctttccagaaaatagacaaatgcaatcatcagccaagtgcagctgactttaaagataaaggaacaaagaaaacaattaacaataaacaagtcaaaatcaaaatgtggtttaagaaaatggtcaactttgtaaatatataacattcagatacaacaatgagattaaatattgactgattatgcatttcactgaaatttgggatcaacccactaaattatgtctatcaaacacacactccctcaaagttgcaggcacaatgtacacacctgttttgagtttctgttgcaaatgatcaaagcctcatccagaaaacatcttcacaacaattattacaatattaaaaagtatgagtggtagtctcaagaactggcatgcatgtataagccctatgatctgtcccttcaatgaatttctccttcctcctccttgtacttctaacaaagtccaccctcttggagcaagaaaccggtcttcattcagaatcgccaaagcatttgcaaacagcagaaggccttcgagtaaagtccaaaaacccatcttctgaaatgacaagtgggttccaacaattcattttccagaagaacaaacctcaattataagcatagatgagttaaaacaagccgaatggtgtgtgcataaaattaaaatgcaagttaaggctccttcaaaagttaaacctttaatcaattaaagtactaactttacaaaatcactaatttgatttaattcaaaaccagcatcatttgctaattttaatctcgaaaagcttgcatcttagcataagtgaatcgttatcgatcaaattcacaactccaagagtttgacatccaatttctaaatgtgaacatcaactattgttaaagtaactcataacctgtaaaaaacgattctaattcaactactctgttaagatcatgtccatgagaagaaacagattttttttactcaaccaaactgataagattttgaaagtttctttggcactgacccttaggcttcaaatgaaaaaaagattgagaacaagtctcggatcattattattaaaaagaagagaaaaagaaaagagaattggataataactaaatcaatttatatccctgtagaattccgatgtagaactcgatacaaaacagaaacaatcgcttgagaaaactcattagcaacctcaaaaccgtaaaaacagtacctattgtttaggccaatgagtgaaacggaattccttctctccgatctccgatcagttatcaaacgaggttgttaagatttctagggttcctcgtctccgatcagtaagtgacagaaccaaagaaagccaaaaaggccgatggatagattaacggggagagagagagaacatgaacgttgtgggcctgggcttctcgtattggactaactcaaaccatacacaacatatcttttgttttttttgggaaacttataaaaatactggaatttgggttaagttttacaaaaatactgtcacacggaaaagttttcaaaaatactgt

SEQ ID NO: 21324 - DNA, 1800 bp, Cannabis sativa
ttaactatctaccttccgaaaacacaaaaaagcaaatagatcaataatcccatttttaaggaccacttgagaactaaccatatttacacttaacaatgacacatatcaaattgcaataaatcaataggttaattacgtgtaattatcccttaatttattcggctcatcatttgattttctacaataatataatttaacctttataaataacaatttaaaatgtttctacctcatgtgatggattatctccccacatgtcaaatacgtgttaacacttgtgcacaagttgaaccacaaaactttatttgtaggggaaaaaagaataggggttacagaatttgtagtgactaatttacacgtttaaactaatacgagttttatttgcacgctctcgggaaaaactttttcgtaaattatccattctatgattgctcaatgtcaaacatacttaattttgatatttttaagtaattagctactgaaaaaaaaaaatgcatcttaatacccaccaatccattaagttttcatcgtctcacaattctatatagtctaaaatcattatagtatttgaccttccttaaataatatgagattgtacaacttattcgatttttcgttttacagatccaagactctaattatatgtatttatataattgatcacatgatcataataaataacatgtttaactatcctaatgtaagtaatgtttgtgaaaaaaaaaaaacgtagatttttttttaaaaaaaataattttgaatatttagtgaaaaattgtacaaaaaagaattgattaaacaaaattttccataacaaacatgaaaattaatttgtctccccctttttttccttactattttctttttctcaccaaaattacttccaaatacatagccttcatgttgattcattaattttgttttttgtgttttgttcgatttttgtgatgatactttaccatatattgtgaattaccaaagaatgacgtatcactattattattttactttcattactacaaaatttgttataaaagtgaaaaaaaaaatattgtgattaatgaaaaattatatattcatatgtacattaccaaaaaaaaaaatataaatattagttataaaaattataatttgctataagtaatttaaatgtgattcttagtaagaattctattttttcttttccatcaatgtgctacttattgtaagaagaaaaatgggctaaaatttcatcactatttttacggattgcttcgtcttgtccaagctattaattaaaaaataagtgtcaaattgaaatttggtattaatttggtatttctattcatgatattttatatgtttgacattcttcttcttccatttctctttctcgttgtaaaagggctcaaaatgctatagcctattcacttgcacgtttggctttatcctttgaattctctcatgttggaggcctagcttactgccttgcctataatctttgattttgtattgatcttttgatctttttggctttgtgccttttaataaaaaaaattattaaaaaaataataaattgtgtgattcttgtagtaaccgaaacaaattagcatgcaattatatttaaatattgatttttagtcgcaactagtgactatcgtttggtaggttgtataagagtcttattgcattaaataacaagcaatactatatttggataaaatattatattgtattaattattaagaccataaaatttaatacaatgtcctattagattaaaaacagagaaaagaaaaaacagaggaaaaatagaaagaa

SEQ ID NO: 21325 - DNA, 2199 bp, Cannabis sativa
aaaaatgtgttctataaccattttatttttcaattttaaaaataaaaaacaaaaatggggtctgtaaattttatttttatttttatttattgattttatttaagttggattcgaagttgggtctgaggtcgagaccaggggcgattccaagtctggggctgggtccaagtttgattttcaagttctaagttagggttggagtctaaactattgcttaaaaaaaatttgaaagtgatttttttttttgtttttacaatttagattcttaattaaaaaattgaaaagtaaacacaattttatagaacatgatttgaaaaatattcaattttttaattttaaaaacaaaaaatagattaaaaaagtgttaccaaaagtaccatatattttaacaaatcacaaactaaagaaatcaattacaaatatgttttatgataaaagaattaatttgacttttttttttctaataaacaatttagtttggcaaaataatcaactctcttttataattatatattattatcttaatacattttgatccaatttagtttttactttctaaacatggtgagattaagtaataaatattttctttttatatataaatataaatagttaggaggcccctcatgggaggttcaactaggaagaagagactcaaccactgcaagtaaagacgatgccaatctcaacattccaccttcattccttaacctaacacaactcatccaaaacttcaaggaccacggccttgatgagaaagacctcgtcttgctttcggctgctcacactctagggtttgctcaatgctccaccttcagagatcgcatatacaatgacacaaatattaatccaatttttactaaaaagatcaaaatgttatgccctagggttggtagggacacgaagctcgcccctttggacccaactccagctaaattcgacggaaagtactttgacaaattgattaaatacaaaggacttcttcactctgatcaagaactcttcaatggcggatctactgatgagttggtcaaacattataaccgaaatttggaagattttttgtatgattttggtgtttcgatgattaaaatgggaaatatcaaacctttggttggacatgaaggtgaaattcgtatcaattgtaggaaaataaactaagttattattttcttgtttattgatgtgtgcttaattttatatatttttttatttggattagtgtgtttaattaacttatctattgaataaatcaataattatgcaatgcataattatgtttccatttgtatatgttatgtgtgatgatgaattgaaatctttcattcccattgttaaattttttacaggttaattatcatttttaaaaataataatatgtctgcataggttttcaatttgccttcaaatatgtatgcaaaagcctttcgttataacacaaatataatatttatgactacaatataatgaggaaaaaaattatttctgtgcaaattaccaaattaataaagaataattgtaatttttatatgtcaattggggttttttaggaatgcatattttctttatgaggatggcctcacgggacccgcccctaatggggtagggattacccgtctaaatcgggaatgcatggggcagggtgagaattatttattgttcccgaatagtaaacggggcaggaacagggattacattcctcgtacgtcccgatggggacccacttaatatattagttatctttttattaatattttataatatgtatttgtattttttttttgttatattatgtcatttttattatttttaaagttgtgctttgtataagaagtagtatattgaacaataataatgtgtcatattttaatttttatgtaatttaatattttggtacattttaatttgtaaaataaattttatttttatattagggaatttcttgctccgtcctcgccccattagaaaattctccaccccatccctaatgtggaataagccgtgatagggcggggatggggacaggggaccactccctgtcaattctttacccgtgtgcatccctaagttttactcatcatttgaaatcctaataaaattagggaaatttgactttttatgcttacaaatacttaatattttttccctaaacacataacatgtaatatttgtgggatattgttgtgataaatccaacac

SEQ ID NO: 21326 - DNA, 2243 bp, Cannabis sativa
aagagaatattagataattgaggttagtggccttattttatatttcaaataaaactaatataaatgtcatataatgcttggtaggagtatcgtagcaaatatatgcattgaaaaatattaattatttctgagcttaaaagaaaaagtcaaaaggttaatataacagcttataaaattgttaactctcccaccctatgatccaagaaattatatatttagaaatatatattaaaggataagatttttaaattataatccataagtagcaatataattacgaattaggatccttattaagaaaatctaaccgaaaacatctgatttgtgtagataaaggtaagaagaagcaccggattttgaaacgtaaattactcgcctaaacaaaaatccacgcacttaaattactcgtaaccgaagaaaaaaaattactcgtaacgacagtgaaatttagattgtatgatatttaaattatcacgcgcttccttcgagcgtggaattagcggttattctaatattctttgttcgaaattataaaattggaagagtatagaccacgtgagacacacgtgaagagtgagtgtaagaaatattatgccccaaatgaaacgaaagaggaagtgttgtgttgctgtacaaaatgctcggacagtaacatcgtgtgacgtgtcagaccattcatattttaaagccgaaattattactatattaatatttttttaaaaaaaaattaagaaaaaaaactaggctaatccttctagggaaatatctattggtatttttattttatgtcagtagtactgtgcacttagagggcaatgcttattaatattattgaatcttaaccaatacacattcacataccttaataagataaacatcacacaccttattgtatttatcctattaaacaaattcagaaatctcagatcgtttcacatatttttttttaaaaaaagagttctacagcagtagcgtttttgttttctcttacgtgtgtttgtagcatcttaatttcaaaaaaaaaaaaaaaaaaaaaaaattagtttttggctcttaaactttgacatatactaaattatactccctgaacttttaaggtcgttaaaaacgccacttgaactattgagattgttgaatttaaatttttttgtctaatttcattcaattttactatttcagtgattattatgtactaaacaatgctccttaaattttaatatctaccaaatcatggtcctcgaactttgacatgtattaagtcatgcccctttttcatttatgttacacttttttattaaaattagacaaaaatttttaaattcaataatctcaatagttcgagagaaattcttaacaattttaaaaatttaaaaacatgatttaataaaaatctagcaaaacaaaaaaaaaaacaatttaataaaatagaacataaatatttaagtttttttaaataaaaaaataggttactgcatacttgataaataatgatgaacaatgattaaatgaaaagggtgagtaagtaagaaaacagaatctggtctgtccaagtatcacacgcaaaaccagcccaataagaactccgcgaccgattggttcgaggcattattaagtattatttttattttttatttatttatttatttttctctatttagatttaaattaaaaatatataataaataaaaggacaaattttgtagtgttattatatgcgggaaaagagttgtattgtatttctttcaatagcaaagaagatggaggagaaaaataaacgttgtttttgggtttcagtgaagtattgttaggcaaagccaggcagagagagaggaaggccggccgagagatacgacctgatctcattcgctggccaacccaaactaaaccaaaacaactcaacacttttcagatatatatatatatatatcttccttcaacttcaacaactcttttctcttcttctcattccttcctttaaataccaaaccaacaatttagtcctctgtctaatattctctccacaattcatacaataatccttttcttctcttttttacccttatctctaataacaataataataataatatgaagaagaaaagaaaagatcagacaaaccccataacatttggcgcaaccatctaccgtcatcatcgccgcctccaccgccatctttttcagcttgtctctgttttctccgcctgcttactcctttttctcgtcgctttctctctcctcgctcc

SEQ ID NO: 21327 - DNA, 2390 bp, Cannabis sativa
tctttcttggtggtgagagtataccccgatggggtggtggaacttcgtgatgcactttcaagaagaaaattcttagtgaaggccaaggagtgaagtttggggttggagaggtcaatcgagaaaagacctctatctctttgaaggatgtttgagacttgtaatttaggggttccaaaagaaaagaaaaagaaaaagaaaaaaagactgaattgaaataaaaaggaatgaaaagcaaaaaaattcaataaaggcaccccaatgaaaaaatagaaaaaaaaaagagaagcaatatatatatatatatattatataattagtttaaataaatgtcatggtgaaattgagaaagtgtttgctttctttgtgcagaaaatcaagtgaagaaagctgtggaagtgaagaaatttaaaattgggcaaagaaattaagtttggggtggaaaagttatacccagttgctatagcaatggcttagcaagtctatttggcagcaggtataatagttaatagcaagggtttgctattggggttctgaattttttttttttatatatataaagtgttggtctgataaagagaaacacggaaaaaaatgttttaatggaacaatcattgggtacaactctttttgctcggtccaagaattgagttttgttattggggtttgagtgagtattggtctgatgtacttcactggactcttgtgtacccaaaaatgccaaaatgatttaaacaaagccagatacaacaaagtgagttagtttctttatagggcttcaatttgtagataactgggccccattaaaatattgactcacaacccactaaacagtcaagtgacccaaaagctactctcaaaccctacaccatttcattcatcaccatcttccaccctcgacccagccaccagcctccggagtagttagcaaccgagcctccattcaacccgaactcaccaactccagtcgatccaccaccaagcgaaccacctagttgactccaccactctggtttgttggccaagctttaccattatttggattttaatttttctatggcaacgaaatatgtgtgagtaacttagcttgttgctttgaataatctgaatttcttggtgagcaattaatagtttggaattgttgaagtggttcaattggtagtgtagtactttgatttgagtaatgttgatactgtggaattgttgggagagtattgaattattggagtaagtttgaaaggttttgaatgtgactttggtgtggttgaagggtgccgtgatcagatggagtcttgataatttgtgttacagctttaaatttgaattggtgataatatggtggggtttttgggcaaattgaaatgattctaagatttttagtgtgactcaatggtggcttccgagtgtataagtttcattggagtgacattagaatttttggtttggttttaaacaatgggctgattaaggttgtgattgtttgtgtggatttggtgtagtttgaaaattattggtgtgaatttgaaattcttggtgtgatattggaagcttggtgtgattagaagtgttgatttggtgtgtggatagattttaatatatatattttgtgggaatgtgctatccgagtagttgggttgagtgtgggtgacttttgaagttggtgaagtgtgctgaaatagttggagtagttttaaaattattgttgtgatcttggatagattggagtggtggtaaaaaattcgtggtgtggtgttggacaaattttaaaaagaaaaaaaaaagaggggaatttctttgtggctatgtagtcttcaaccaaagaaaaatgcctaacattcaagagggtgacgccacgatttgagcccaatttcccgccatttcctcagcaagctctcaacccgtgggctgggccatcagcatcaaatccggaggtgccccacgaggacttcgagtagagggagtgtcctaatacctaagttatttttttttttctgttatgtgtcgtttttagtttgtgttgtgctaattgtgtgttgtcttttgtgttttgcaactttaatgccatgtcatttatgtacttgttagtttgacaatgagagatttaagaggtttttcagtggtctagtgttctgcttgatgatgatattttccgctcattccatttatgttgctgcctaattttatatgttgcctttgcatgttgaattgttggttatcatggatgcttctccttagtctctcctcaatggtgcatacttttattttcccaccatgctttgtatttttcatacgatttcttcctatgtaattttagcatctagaattggttagtgcatctcctttaagtgaaatcctagctagacttgtcccttagacatgatttaggccatctt

SEQ ID NO: 21328 - DNA, 2136 bp, Cannabis sativa
gcaatccaaactgtaaagttaaaatgaaaaaaaaaaaaaaaaaagttaaaaatgtaatatgtggtaatttattttttttaattaagacaaaatatgtaaagttttaatttggtttgcatatttaattattgttagtttttcaacattaaatactatatggattgtcactatgtacatgtgtcatactttttatttttgagtttactgtaactttaattacttaaatatttaaaaattattataaataaataaaaatgaaaattcttttctttttcttttattttctttttctttttccttttctcttttactttttcttttctttcttctctatatttcacaacacatattgttctttttcttatttctcttacataatctccaacagttgcaccattatagtgtatcttttttagtaagttggtacataatttattaattttagttcaactattccagtaattcacaccaaataaaaatagtttgcttaaaaaatcttacattttacattatttatattaataactaatattaacaaatttatgatataattatatcaattgtcaataaattaaataatatcatgactattagtaaaataatatagtaaaataaaatatttattaaatcaattaaacattacacataatcttagaaaaaactttaaataaaatcacaattacacgatttaattttttatggggttctctaatgcatctcaaaagacatagtgaacaagtgtatcattcattgatttgtcttttgggctttcattattttcactaaacataaagatggtgatggcgaatgtaatttatttcaactacccattaggagaaagaaagcaaaatcaataaggaaagatgatgaaaaaaattctgctattgtttaaactattagaaaagtaaatgaacaattcattgaaatgttcgatcgaaacaactcaactagagcacaaaattgtgaaatttagaagcaaagattggctttaaggagaatattaagaagagaaagaatctcattgaaggatttaaattctatagttaaatcctattacacaagaatctttttaaaatgagtaaacaaagttatgcaaaaaagaactcaccaacaacaatatcaaggttcttaagatacctcaagtctatgtaaactaatattttgatactcaatcatcaaggttagaattctcaagtgatcaatttgaacattgaatcatatttattgttgtatttttcttttacgctgttctttttagttttatgttatttcttcatttaaaattagtatttttattattattattttgcattttcaaattatgtagcgtttttaattaatgattattttgtaataaatttagatcaaggactaaaatggaagattatttttaagaaaatatattaaaagaagggttaaaatagaaaaataaatgtctccttatttgatgtagactaaaaatttaacatcgttaatagcgtgcaatttagtatatccttgaagtgaaatggtataaaaatttcgtaccaatttaataacataatgcattaatataaatacttttaatcttcttctttaccattactagagccaccatcattatcaccaccactataccaccaaaaccacactaattaataatgctacatcaacatttgaataatgaaatgactaaatttttataaatcaaaaagctgaagaaaaattattaaccggccgtatattttaaaagtgcaatctagtagcatcatgcgtttagtggacaaaaatctaattattctttcaaatatttatacttttgaattcaatgttaatggagcattttcctcacacactctttgcacattcacactcaaataaaattcacattgaccatgactttgcatttgattgaaaacaatgtctacaacatcatccttgacaaaatattttatactttgtaacataaaagtatgttttttctttatttcctgtaaaacaaaaaacaatgagttcagttataattagagtctaagttgttcttgaagatcattatttgcccaagaaaattctatttacaacatcaactggcaaagcataggctggatctatggctttcaatcctggatattcaagaagtgaaagtcctgcattgta

SEQ ID NO: 21329 - DNA, 3468 bp, Cannabis sativa
  modified_base (3159)..(3169): a, c, t, g, unknown or other
  modified_base (3355)..(3360): a, c, t, g, unknown or other
aaagtaggcatatttttcatagtgtaaaatgtattggttcaaaaaaaaaattttgaaaacttttaagtatagaaaatcaaatttccctaaatgaattaggtagctagactttttgcccaatcagcctctaataattaaaattcaatttgtatgaatgtatataatatcaccgccatgacaaacatgttggttagccatttgagaattacaaaacaataagcaaccattcagcctagtgtacaattccacacatttgattggagccaaaacaaggatccatcgatcaagacaaatggtactgtgagaagatgttggtttagattaaatatttaattaatatatatacatataaaaactaagttattatctaaaagcatggatctaatcatgtacgcttgactttccacaaggataatagtaatagtttatgggaaagtgactcaaacatgccctctcccaagtgcgtaaggtagcgtttgtttagacaattaatacctgaagagatcatcacagtacgcataattataaaattaaaaaattaataataatataaattataaactaatttaattttaggtgctgaatggtacgtacatgaataattttaagcaatccaaatggtcaaaaaagaatgtgataaccacctaaaacatgtcacgtacgtaatacgtaattaatataaatataaaattaacatataaatataaatatatatataaatttaaattaaaattgtggtaccacatccacgtgtcgcttctagtctcgtttcttctcaacatacatcatccacaaaaagactaaaggcatccatgaaagagcttgaagttatttcagccatgatcaattaatatatataccaacccaacataggagatgagatggaagaatttttttttttaacaaaagaagaaggattttattcgaagaaccacaaaactatattacacaaaaactcaaaaaaacccacgcacaatttaaaaattgtttactataagaattatatttttccctctagccttacacataaatattataaaaagtaactctagcttttaagctaaacttaatcaacatgctaatagccttaaccgaattacaaaccccttcaaaaacacatttttgttcctattacactaaatgtgataaacagcaaccgctactactggcaaagttaaatcaccaagcagcaaacatttccaacaagtttctcccaacttgttaagccacaacaagattcaagggccaatcaaatttcccaatccaaacagtatgacttcttgaatcactttcttagagaaaatgcagtcaaagaatagatgagagtgagatctataccctcaacacaaatcgagcaaagagttgactcaaccgaaaaaatcttagcgagcaggtccatggtcaagaggttttcattgatagcttgccacattatgaaataatgctttggcattttgagtttgtgccaaatatccctattataattaacctctagaactgaaaggagggagagatataatttcttaattttgaacactgctccaccatccatcaaatccatgtgatctaccattcaacataagagtgtaggaggtgccacaaagataaactaaaattcaattaaaactttttaaaagaaaataaaattccttcaataaatccaagacaaactccctaatcgaccgtgtcatacgcattgcttaagttgatctccatcaaacaacgagcagataaattctttctcatatagtctttgagcagatcttgaaggataagagcattgtgcgcaaacaaccttttcttgataaaagcgtcttggttactatggacaatctcaggtaagatttcactaagcctagtgcacatcatttttgagatgcacttgtacaatgtgttgcagtaggcaatgggatgagagtcggtagcagtggaaagataatctattttttggaattagcgagatggaagtctggttaagatcagctggaatctgccctttttaaaaaagagaaagaatggcctctatgattttattccctatctcagtcaaaaggccgataaaaaagccaacatcaaacccgtcgggaccggtacttatgatctaatttatatcaaacatagcatcctgaacctgtttattcgaaaaaggtctgacaagctggatttattgtttcaaagaaagcttgtttccatgaaccaaacaattgtcattcaactttttagaagaagaactcttggcgagcatgaagttcttgaagtgattaaaataatgagcaataacactatcatagtcatcaatgatcttaccattcaaaatgaatgtggtaatccttttctgcccttttcttttcttgacactagcatgaaatagctagaattttaattattttaatgcaacaacaagatttttgtaatacgttgcatgtaactcgcgtacctccatttagtagtaagaaatttctccttaaagtcaatctcaatagtttgaagagtagagtctttttggtttgtagcaagaagagattgagcttcaatgtacctctctatagcaaagttgtacatcataggaatgtctccaatttatatcttattaaacttctctaggaagtgctttaatctgttcagatttgccaaaattttatgtagccccattctagagatccttctattcaaattcaagagaacttaagatttatagtttgagtagtccatctaataattaaaaaatatgaattgtttgacacccatcttcctcaaatctaaatttttgataacacattaacaatggtcagagcacgtgtcccactgagaaagtgcttatgtgttgggaaaatgatccacccaactctaatttttaaaggccttattgagtttcgaataaatctaaactcctggatcatgtttattagaccatgtgtaatttgttgcataacacatcagatgattaacttgacgcaatgcgagccaattttgagcatctaaaagtatagaaccagacaccaactgcccacctgatctatcatctgtatggaacataacattaaatctcacaaaatgagccaagggagattcaaactgttgggattttatgccctaaataaacctatttcactctaatctgatttgttatcaataaaagattagaagtcatttatgttnnnnnnnnnnntttatgtttatggtttaatatatacaaaatctgttacgtccataacatatagttattcacagtcacaatgatgtcaacacagtggaatgcaattgtgattaaatgcttcaaaagacaatgtccctgattcatcagtgcactggatttgcactgattagatattcagcgataaagtatacttacacnnnnnntaagtgttatgttctttcctgaacgttggaaaagtatgctagtttctgatgtatggagtatacattggactgggaccgattttgatcttggtaaagatattataatct

SEQ ID NO: 21330 - DNA, 3737 bp, Cannabis sativa
  modified_base (27)..(28): a, c, t, g, unknown or other
agctttgttgtatttgtgatagtttanntatttggtgatagtccaaaccgtagaatccgcataaaccgcaccacaccatttttagcggtgcggttttttagttttacggtgcgagtgcagtttaaaaaattaaaaaaaccgcatttatagattaatttgaaaaaatagtgaaaaacacaccacccgcatcgcgaataatcccaatagatacatctttctcttaaaaaaaaaaatagatgtacacagtattttttttttaaaattcaattatcaagattccaattgttgtgatgcaaattatcaaagaaaaaaaaaataataataaaagaaataacagcaaaaagaaaaaaagaaaaaaaaatcgatgattcaatacccgaaagatgaccggttgcgatcctcgatcgattggaccccacccacccaagttccgatccaatacaaaattttattcattacttaacggggccgtcacaagccgtcacggccactcaaccctttcacggtactctgctaccgttaaatcatttctctctcaacattcttccaacgacgtcccactcccgtcttttcccctctccctaacgtcgtcgttccgcctcgctcccctaactctaaccctaaccctaacgtcgtccttctccctcctctaatggcgtcctgtgacgacgacttctctcctctcctcggtgacgaccccaaccccaacaacacaaccactgcccccaccaacccccaccacctctcccacctccaccagacctactccacggccccggttcaccggttctcgttggcgagaccgacgcctaaccagacgatcctcaacgcccgtagccccgataaagttggcgccgaggaagagcaggacgacggtgaggattacggagaagcagcagcgttctgttcgaatccgttcgagaacgatagcgatcagaatggaggtagcgttgttgtgagcgagaagaggaaggaacgtcaccatcatcatcaccgcgacgaacagctgagcgatgggggtggatctggaggtccgtacagttataagaaagcgaagaccacttcggcttcgggcacttctggtggaggtggagagtacaggaaggatcgggaggagtggagtgacgcggcgattgcatgccttttggatgcgtacacggacaaattcactcaggtggacaggggtcatctgagagggagggattgggaggaggtggcgaccattgtgagcgagcgatgtgagaggcaaaccaagagcgtggagcagtgtaagaacaaagttgataacttgaagaagcgttacaaattggagaggcagaggatgaacaatggaggcatttcaggaagccattggccttggttcaagaagatggagcagattgttgggaataacttgcccataaaggttgcatctgatgatgacaagggtgccagttcttctggcaatacgcctcgccaatcaaagaggtttcgaaacacttcgaattttcgcactcttttttgcttaaatcgatagctttttttcaacaattacatgttttgaattgttagatgaaggaacatttagctatttaaagtgttttggaggtttggtttttgtaaatttttacatggcgtagcttgttcatattttctttttcaaatgaacttcaatatgaaacacctttgctttaatttttgcatgtttttatttgtttttttttcagattgaatcaaatccaacttatgttccaagtccaactagctggtttttgttattttttatttttacattcttttattggttttttcagattgaatcaaatccaacttttgttcttccgagtccaactagctggtttttatttaaaaggacaatacttggtaatggggggtgtaccagattggtctttggaattcatccatgtgtcttggtattaccttattgtatacacttccttagtatgattgcttccttataaactcaggttgtttaggctattgtttaattttcatttttcttaggttttgtttcgtgctcattatattggctattcctctttatttgtagtgctataattgctgttgtagttttttaatctttatggttatttgttttattggagtgaagatgggttttgcaaagttacttaagaactcccttcaaattaaagttgaattctttggcttactcatctgttgtattggcagatatgctttgacaacaggcagttctgctggacagatagttcatgtgaagcccaaggcaacaatgaatcctagatggcgtagagtagtcttgaaaattagtggtgctgctcttgccggtgctgcaccaaataatattgacccaaaggtttgtttggaagcgtaggcattatttgtaatttttttttcctaattctctgcagtaaaagcaaattgtttttcctttcaattggtaggtggtcatgttgattgctagagaagttgcaatggctgctcgtgttggcgtgcaggtactgaaatctgcatatattttttaatcatgtaacctgtttgctgtcctttcagcattaacaaactacattatgttttttttttcatacctcaggtggctattgtggttggtggcagtaacttcttttgcggagatacatgggtaaatacaacaggtttagatagaactacagcctatcaaattgggtaagtagaattatcaagttttacgattgtatatatctttgaattgttatgtcatatatttgtcatgtatttcaagtcatatagagttttttcttttggtaagcaagttatattgagttatgactagggatgtgaatgtttgatgatctgatttatgagattgatgtaatcttattggattgtcatttgattatctgtaattttgcgtactctaatcccaatgaacttgaaatatatgattttttttttctttatataatagtcattaccgaatcatgttgattctctcatatctaccagtatgatggctactgtgatgaactcggtattacttcagtcagcaatagaaaagatgggagttcaaactcgtgtccaaactgcagtttcaatgcacgaggttgctgaaccttacaaccgacagcgggcaatcaggcatcttgagaaagggagagttgtaatatttgctggcattggtgcttccacaggaaatccactcttttcaacagacacagctgcagctttccgatctttggaaagtatggatcggtcttgatttttcgaccttctgtttgtagcctttatttactgagactatagtttttcctaatctttttatcacagttctctcaactcgcagagtgacgagatagacttacttattttcttgaacttaacatggtattactgttaaatcctcagttcatgccgaggcagttctcaaaggtaccaatgttgatggtgtctatgactgcacctctcaagataataattttacatttgagcacatcactttcagagagttggttgccagaggtgccacatcgatggatgccatggcactgacgtactgtgaagacaacaggattcccggttagtataatttgtgcttattaatttatatatatttgattataaaattaagttaatgaaatgacaaagttcaattactttctcttatgcacagttgtcgtgtttaacctcttagagcctggaaacatctcaaaagctctatgtggagaacaagttggtacattaattgatcatacaggaagaattagctaatatttatttgt

SEQ ID NO: 21331 - DNA, 2250 bp, Cannabis sativa
gtaactctatcaattaatgcaatggaccatatttcatcaatcaatctccgtctgcctagttggcctgacatccattgaattttttgtactgaataaccaactttaccatgctttacattcatatgtgtgagctcatcaatatcataagaaatattattatattagtctctaacattattacgagttgtaatactattattaaggttatcgaattctatatttttaaataaataaattggtataaacttttatatattgaccaagtttgaagcaaaatgaagaacaaaaagaggccggcattatcgatggtggccgaatttgcttttgagcgtgaaaggctcctcagagtgggtttgcttaaggcctaagtttgagaaagccctttttccgaaatattcaattcatgggacccttaattcatttcctttgctttatccaattattgagtggttgtaagaggaccaacttctctgccatctgtttcggctatcatttcataattctttttacataatatcactaatattattccaaagtcaagaaaaacaaattaacaaagtctccctaccgtctgaataacgtatggtaagtttatagtatacctattaggactgtgttatttgtattacatagcattgtataggtattatttaatatagtattatatttgatattaatttttattataggttgtataaaattgtactaactttatcataaattctgtttacctaaaatattggcttgatgacatagacactatttttagcacgtagcacgaagcaaacaacccttgagccaacaatgtcgtttttgagagttatccttcaacaagtaggtcaaaatgaccttaaaatgaataatgaaactgaggatgtcacatggacattccggtgatcagcctgggcccaacacaggtactgggtgcccaggctgacaacctgtgtcctggctcgcatcaattttggttgccaataacttcctatgtgagttatgcttagccattacactggaatacatgagagacatgccctagcctaattttagaccttggagatccaacatggagatacaaggtgcacactaggcaccccaagttgacattcaatcagcctgggcggcaagaaggcgagggttaaggtttttttgaaacttctttcgaccctcattcctcaaatccaaaaaggaacaatgacaggacatgagtttttgtcaatgacatcatgaaggcgcacatatatgtaggttgacaatgtgatttgggcaacaatttagctccaccgagtaatgcctgtgcaaattagacaaaactgaagtcaggttattagacatcaacaaaacatatttcgggaacattgccaaagacctgggcgactaatgcaggctcgcagactatctatagtttcccaggttaacacatgtaaacctcgagagctctagcacacttttcaaaaaaagtctcttgggtattttccttattttcataaacaatgaagatagtagtgcttttaggaagcaaatacattcatctaatgcccaaatgaaaaggtgggcacccagagtggcagttcccctggcacttattgcccaagttaacgtattccacacgtgttgtggttttgtcactcagaaaatgcaattctacgtaccttcaacattattattgttttgctcccaaaataacatatgagacttggaatcagaagaacctatcatccaagtggtggttaagcccctaggcatcaccagacatcatactgagtgctcaggttgacgttcaacttgagcctcagtgtgtcattgataggctagttttaggtgcattttacaaattattttagaggtttatttcaaattattatattcattttgtgcagaataaagcttgttttctatttgtttcacgttttaatggtaaaattcataatataaattaaaaatgagaagaaacgtgttaaacgtgttaaatgagatgaatatgatgaattatcatggaatttagagttctaggatataagtggtaaaaattctaagttttggatgctcaacacgctccgtttgtgattgaaaataaagtttgaagcttcaaggtaactttaaattgtgatgtgttcactttgaggaaaaatgttgtgaataaaagttctagatctctcttttagctttccaaaaatcttaaatcatccaatttggagcagtaatgaaagagttatggtcaaaaaattatcagtcatcacactaggaaactcg

SEQ ID NO: 21332 - DNA, 2691 bp, Cannabis sativa
tatacaacaaaatagtaaaaagcccccacaaaatagttataattttaatgtaaagtaaataataaatatttttataacaattaagcccccacaaatcaaaaattgtggatccgtcactggtcgcaagtgtttgggtttctcggccccgatctcgctagtcacggccacacaaactcctatcatacttcaaacccaaactttaagatagtgttatttcaaaataaaaattgaatgaaaatacaggaacatgaataagaaatgtgaataataatagaaattgaatataaaataaataaaaagaaattgtaaaatttaaattaaaatcattctattaaaatgatattataatactttaatatgcaaatgtaaccaccacaaaaagaaaaaatgaaatgaaaattattttattcaattttattatctccgacgaattccacctaattaagtgataaactcccatacactcatattaatttgatttttttaaaaaaagctgcatatatgtaagtttgctggattggactcttggtttggatctatttttgagttttgatattgattattggtaataataagatttttttttttttttatcttaatgatttttcatacttttatttgtacccatggccattacattaattattgagaatgttttgaaaaattccaactgtaagaattgatcatgactagaaggacatgaaaaagacacatcaattttatttttagtgctataaaatatgatcatatttcactgtatgtcatcctcatcttgttttattaatttgaaggcattaatgtttcaggttatgcatatgcatggatatcatctacagctagggagctcatttagtaagatttaagagctctgcagtacaagcagttggattatatgtattgcaaaacaaaattaagtgattgaaatacttcttttaagaaataaaagaaatgataaaaattaaggtggtttttggttggaaggaatgaaaacataaaaatagatataaaaatgagaataaaaatgaaataaaatttaaaatacataaaaaaaattgataaaaaatcactaattttttttttcatcatgcattgaaatagtttttctttctatttcaaaattgaatattcatttcacccaaattgtggagagatcgaccataatactttaatatgcaataaaataaccaaacgccacgtaattatatggacatgaattggatatttagtagacatatataaattttattgtcatgttaagttattaaattaatgaaaaatatttataaaattttattttaacatagtgtacattacaaaatttcattttctaggaatatttttttctcgttaaagaattatataattaaaagaaaattttaaacaagtaatatatataaattattattaattaaaaatagtatttaattatttttagtgaatttttttaaaaggacacaaaaaagaatttagttacattttcacttttaccttatataggtatatcttacattttttttaggaatgttactaaacaataaatgtaactaaaattacttaaaagtggaatgctagtaaatccatattttggtgtaataagtagctcatcacagttttcaatagaaatgtagtagcgaatgcgatattcgtatataatttgaaaacataaatcgattgattgaaacttatagttcatcgattgattgaaaagtaaaaatgttttttttttaatatttttaatctttcctgtaatataaaagaaaaagcacattttatattaattaatatgaattaatttccccaaaatacgtaacgttgattcccataaacacatcagaaagtaaaatgaaatggcattgtcaagacaactcatcacaagtgtcgcaccaatcccgaatcaacaccacaaaaagaaaatgaaattttcacgagaaacaaacacctttttcttttgaacggctcctatcctatatatctgatataataattattaggacctaaaaaaagtttcagtatataagtaggctatatgagtctgggactatatgtagtgtgtacatgtatgtttttgagagagaaagaacttttttgtttagttttcttttctttattgaaaataacaaagtaaaaatgtagcagcagggtatgtatatatagctatatatatctatatctgctagcgcctagcacagctttgataaatttatatatgtgtgtgtatgcatgtatgtatacaagtcaaagaaaaaaggtgacattattattgaacacaaagcgaacataacatcttttacaatgacaagtcaactggtgttttggggcaaaacagcatcaaaatgcacaaagaaacaagaagcaaaacaaaactcaatttccttcaaatcatcatcatgatcatcaatatattctttttcattttcttgatctgggcacttcagctttgttcttgaaattcagcttttagagagagacagacacccacccacactaccaccacaaataaaattcttttttttcaatgtgataatatttgatatgaaattagatgaccaatagcaataagtttcagtttggagatagtgtttaatatttctcaacttagaaatgctaagaagtactattcgtgtctaacacttatatcactataggtatatattaaataggataattatcttatatactgtttttttaact

SEQ ID NO: 21333 - DNA, 3591 bp, Cannabis sativa
attatttttcctatacttttataaatagcccaatccaatacgctgcctaccaaacatacaacccataagaaaattataaccgaccaaaaaaaattgtgattataagaaaacaaatcgtgcacacaacacctaaaacaaaataactgatagagtttttatatttgctgattttccacgtacaaaatccatctaacgacactcatatatatacatttataatttccctatagcatacatttcaactgcagctttatgtactttatttctatggtacaattgacaatgtaagaatattgacaccaatccatataaatatatatattggaccaaattcacaatcccaagcaagcctacatctacaattatagaatcatcatttttttttttttgatagataaagtagcataaattaattcatctaaaagaaaagacatgttactttatatagttctttttgtttctttcttttaatagtaatatagcttaattatacgcgtagttgttataaatgaaaaattaacgtcgttctaaatatagtataattttgaggtagctagctaatggtattcataaacaatggatttcaggatgatcaaaacctaatgtactataaataataataatagtactcattattaattaatgaagtaattgcatggaactaacagtagcggagggtgtagttggagcttgctggggtctgctatcctcacctacaatactcctcacaggcagtagcatatcagacaatatgatttgaagggaagaaaccttttccttgagctgagaattttcttggactatctgttgattggagtccagcaattgaataagcttctccgaaagctggcggttagtggtttgtaactggctcaccaagtactgaagctcttctatttgcattttcctcctcattctcgaccgccgagcagattccctgttggaaatcattctcttcagccttcttgtgtcgttcacggcgttgttattcacatcctctccgcaatttcgctcactcaattccatgttgtttatgtcgtcagtcgccaccgaatcgttgccattgctgccgcttccgccgcctggagacgatatggatgtgtgctggtgaggaaagttttcattagggtttgggaagagcctaccagtaatattattagtagtgatgcaaaatgggttttgctggggtaaagatgagtgatggcctaggtttagaacttcaaagccatgcctattattattattcatcaagcttggaaacagaggagctttttggttagctattgaagatactgatgagtttattgaattatgagatgggctatgactaagtcgaccctgcttgatattagacccactatttgattccattggttggagatgattatagaggagttgagagtctttaaaggaagaaagaaaagagatattttatatggtgaaaatgttgatcatatggcattgttgtgtgtacatattcattatatagattaatttagactgtgtgtttttggtagttttaggtatatatgttacgtttttcaatgttgggttccacgtattgtttgccgggatgtatataaaattttatatatcgagaaagatatgtatagaagtatagctcttaaagtgagccttgttttgtcaggtgatattcaatattatgaattatgctcgtggtgggacatttatttagacaaattaagacgcaaaaatatggtttaaaacttttgtcgtctacaagttgaaattaaagcaccgcttattgtgcttttcttgtataaatatattaataatacacttgtatagcatggcttcaattagtaattattcttttaataaaataatacatgtatatctaaacacataaatatggtaagaatttaggaaaaaaaaaactgcagatttagtcatgaaagaaatgatcataatttttttttctcgaaaataaattatgatcaatggagaaatcacgcttatatgtatatgaattatatagtatagggtgctattttggcttttatgattgtaggagtgtttctatttttgacatgtctagaaataatttatttcatgaaatactataaatagtacttataggatagattcaattaatttaaaaaaaaaatcgaataattcatgatgttaaaaaaattgtttaagtaattagttgagtgtattttttcctgtgcgcgtccaactgaatatcttcaactttgttttgacactgtaaagtaattatttagaaaaaaacttccccaaaactaatataatatatatgctagctataactatgataaagccatcatataaaaatatttggattacattttttcatatgccaaaaatagatatactctataaactttcgatacacacataagttcatatatgaaaataaactaataagcctagaatatataacataaaaggttgggtattatcttaatcttttctatgacaataactagagattaaaaaactaaagcaaaagtggtagccagtaggtacccccgttaaacatccttaagcctggacatcatggatctttttcatttagccaaagtgtattgcagggaaatttcacctaataaaattaataacattaaaactgtttagtaatacaatagaagaaatagaaactcaataagcctcctaccctaccccaaagggagagttcgaaccagcactatgctttaacaactatcttagagtccaacccaatcaaaacacgtgtccaaccattgtacaactcttctgattacaaagaactcaacctcaagaatgccactcactgtcatgaaatccagaatacttaaactcccctgctctttttggacaacgcctaatcctgctcgatccccttccattaaagcatcaacctcgagtgttatttgttgtaaaggagataaatcggcctgcatatcgctaccgttgagtagcaagaacctcatcttaatttcagttggggtattcaaattggttttcatattttgtgtacttaacttttatattaatcaatttaattttagaatgaaagttttctagctttattattggaataattacataatgcaccatttttttttgtaaaatatttatatttttacattcgaagaatatttttttttttacatttttacagttttttaaaaaataacacaaaaacaacataaaatcaacaaaaaaactacataaaagtaacatgaaaataatatcaaaataatagcaaaaaataacagacatataacaaaaaatcaacagcaaattaacaagattaaaacataaaaagaccgtattttctgtaaataaaattaaaaaaaatcgtaaaaatgtttaaaattccgtaaaatcgtattgttgtaattttttttgttatttttatgtttttgtgaaataatcgcataatttaatacaatacaaatagtattaaaaattaataattaatataaacttttaaatagtatcaaaatattaataattagtattcacatattttttttgtagtaatatactgatatgtaaattaatactatttaatattatttttaataattggggcttttctatttttacacttgaaaatagttt

SEQ ID NO: 21334 - DNA, 5039 bp, Cannabis sativa
gaagttcatgtaatcaatggaattaatttgtacaaattagtgaagggtctaaattttgatattgggggttttattaggggcaaaaaatgaaatttccctattcaaatagttgctttgagtattcaaattctcggatgataagaagaaaaagaaattcaaaaacataaataatggtaacagcaagagaaaaaaaaaattatatcaaacaaaaagaagtacaataatataaaataaaatgattttttttttattaaactttaattttttttttctttttacagaaatccatatagtaatttatagcaacctaaatcgtaataaaaaaattacataacaatgtacatagataccaccgatgcaacttaaaacataaatttaaaaaaaaaaataatatataaaataattctccaatgaattcaagttcatttaatagaaatcaaaagaactctcaaatatcttaatggtttcatcacattggtcttcacttgacaaagccacaacatcatgatttagttgcattttatgatgcagattgtgttgaagaccctaatgataagaggtcaaccttaaaaaaatttggctctaatctagtggcttggtattgcaaaaaacaacatagtttctcaatctatcactgagaaagagtataagtatcttaccattgttgttgctgaagtttcttggctgcgtttactaagatacacatttcaattctaaggccactttcaatcttgtgtaacaacttgagcatagttattgaatatgaattatatttttcatggaaatggaaagagtaagcatattgaattggacatgagtattgttgtaaatatgtgcgcgtcgtgctagctagacatattttttttaggttttttaaaatataggtcatgttatgttgggtcatagaaaatatgacacgtgtcatgtcgtgccgtgcaaaaaataggataggtccatcacggcccgcaaattcgatagtttcgtgtcgtgctttattcggaccaacctgttttctataaataagccaacttattatacgagctcaaattcgtattctatatttttgtatttttattacaattgataaactaaatactaaaatttgtgtattttatagttttaattatttttatataattcttcaacaataattacatacaatcgcataaataatgataataataattagaatttaaatattattataattttaattaataaataaatagattattattattatcaaattatcggactttttaatctgtagtagtaatagaaaaaaaatcaaagcttcaaacatagtgcgggaaatccatcttcatcatttgctcaaattagcgggtgaaagtaagaagtggtgaaatcaataaaggaaaacgaaggtggtcattttaaatttcatatttgctttaggtttccagggccttcgattttggacttggtttgcattgcaatgatcgatgatagaaggatttactgattcaagaggcacattgttaagggtgaaattggtagattaaagatgctcctgatctttgcaatgtctttactcagttgtctaacttgcacatggaatttgtacaacaaaacaaaagtgatattttctagtgcaatcttttaagagtctatgtgggagcatcaaatctgaccacataagtgtacccatagtgttaatgctcagatagtgtatccatatctgaccacttgagacttttcgaagcttagaaaagagttttaatattgaatattacattcctgaaataccagggcaaaattttactgttattagacctcaaacaactatacataaatattgaatgacatgataaagaaaacattcctatttagtaactttagttgaatgaaaattttcagtacttgaccagaatttgacatgatataatgcttcgccaaggaaagaaagacctatctgatgtgaagatcctctatgtctattaggggcagattctcgttaggcctccttttagattgatccaccaccagctgaccacaagccccacttatatcttgacccatttgcttacgaattgttgttcggatgttgtaggtacctcttaatatttgctgaaattcggatacactctcttcgctactggtgttgaactgacttagtgagccaattgggttgaaaggtattaaattcacaacctgacggacaagaaacagttaaatgcagaaggttattagaacacagtaaataaagctacttattgatatctgatattgaggtaatataactcaatacaggttaaattacatacttatacataagccatgatgtgttttttcaacctaaaatgttagcccttaattatttatggcaacaacacatggcacatggcaaatggcaaatgggacaatgtgagatatgcaaatgggacgtacagacacatggcatgcatagatgattacaggattctataagttcccttccatcaatattataagaataagagcttaccacttcaagtgtctctaacaatttcccaagctgatgtgcgtgttgcccttcatcgtttatcccgtcaagcattatgtactctattaagattttttgtttactaaagataaagagtgcaggtagaccaaagtgagatacgatctcaacgaaaacaaagtatattgcaaatattttaactgaaaaatgaggtccaacaaacctaattttttgatactgttgcagagaatccataagttttaccaaaggaaatgcacgagctgcaggcattatctggcaacgaatatcttgaactggtgcatgcagcgaaactgctaagtttagaccaggaagatcactataaagcttgttgatcgcatgaactataccaacctacaaaagattcaatattaatcaatacaacaacagatggaatatttactacagttttacatattaataccaaaggatagcttcccgtataacacctattgaaaacagaagaaaaggaaaaggagaaacacgacatcgaaagattagtaaataaaaggatctatcattagagtcctatattgatctcccagttatcattacattaataaaagttactagttatgtgcttgtgaaatgacagcactgtccagatttagaactcttaaaatctagagaaaggggtatacaactcttgcttataaataataagctcgtatagcgttagacacacgcataaataaaaagatcaatcatgtagaattaagctggggtacttctttatgatacccctaccttactaactagttactaaaggatttggcaattttttaaactagccaatgtataaaacaaggaacctatcatttatacacacataaatggcaaattcaacaaagaaatttgtgagggtcaccaataaaatcaacataataactaagagattgattataaaatgaataatcaaccttaaaaagggaatgatgcagttctcattgactcataaagaacaggaaatttaaatgatatcaatgcatccacataccgttgaaatagttattctttttggagacaactgaaagggagagcctgtcatgacatgaattgcttccaccaaagcattatagttatttagcggttcccccattccctgacaataagatagatgacactaagaaaattttaggtgaaacatcatatcgatggaaaaataaattgcaactaagtaatgacacattctatacactttatatattactcaatagtcacgtttcatcactatcctatcctttttactgtcctcttttaaaaaccacataaaccctccatgacttgcaagaactcactatcataagaacaagccataaatataccatgaaaacaacatttcgtataggcgaaaagcgagaggcatgaaccaactgctccacaatttcccctgaagaaagttggctcttgaatcccatgctcccagtggcacaaaatttgcaacccatcttgcagccaacctattacagaaacattagagaaaagaaaaccaaagccaggattcaaagaattaaaaacacattcaaagaaatgattaacaattcaattacaaattgaaaacatatgacacctgagatgatatgcataatgttgatctgagaccaccaggccgtggcttcccagcgtatttccccaaacgagtgtcgtacctcattataacagcctccaccagagctccattctaaacaaatgaacactaattctcacatgggaatttcttcaaacacatggtatacgtatataaacctgattaaaattagcaaacctgaagcttgataagaagcttggtagtgacgccgtcggaggaatcggaagcggagtggagagttgaggtgagaggcttgaacttggagcggagaagaaggtatgcggcggagggtaaggaagggagtggttcaaagtcgtcgcagtcggggttctgaaccacgtacttccatataagggggatgaattttgagttcagacccgcattttcaaactccgacctaatcgctccggcgtcgaatactgatcgaaacggcatcgtcgttcgatgcgggctttgattattttggtcgaatttgggattgagattgagacggagaccggtggcttctgattcgattatatgtgatgtgagtaattgagtttgcactgttgccacttgccactagtctgggtgcaaaataaaatacaatattacaagaaacgctgtcgtttacttatgaaagtccttaatatattttttaattttttttttcaaaaatgttttttatgcatttcagaaatttgcattctcatcacggttcacaaagcttggcagcgttctcttgtgctcagaagggctctcctccctcgttagtcaaaaaacttgtcaatcccaaccccaaaaaaattcctttggtattaagatcgcttgaattggcacgaaaatttctcaccttttctttactgacgatagtcttctctttgccttagcttctccaattgtggcacctacgagtgtacatcaaaccgctcaaaccgcccgcaccgcaaaaaaaaatgcagtttgaaattc

SEQ ID NO: 21335 - DNA, 4668 bp, Cannabis sativa
aacattcaaactacagctttagaaaatatttggaccaattcaccatacaaaagcagcagcaaacttaccccagttccatcttttgtgcagtaatcattcccataaactgtcaaggctggcctcctcccaacagcaacttgctgcacgaatggcatcaggttgtttggaattccgcgaggatcttcaccgatatatccactagggtgtgctccaacaggattgaaatatcttagcaatatgattttccattctgaatctgattggtatatgtcacgacagatttcctcaataaaaagctggaacaagaccatagtacatatgattaagctaaactgttatgaatgattaatcaagaatcagcttaaaagacacaactttacttaccttagttcgtccatatggattcactgcaccaatggggaactcttctgtgcatggaacctcctttggccaaccataaactgttgctgatgaggagaagacaagctgaaacaaacttccaaaatcagccatttctcactaaaacaagaatatatgaacatacttcgtttaaacatgtcattaacgagtcagtgttagctgtgtcaacacgaacactttcttaattgatttgctggccctaaccaaaactactaacaaaagtaccaaagaaagataaagcaaaacaataaaatttttcattatgacagaaatttccaaaaactaaaccttgttcaagtcaacattctaaaatgagtaccttcttgcaaccatgggcagccataacttccaacagagaaattgtcccaattaaattgttgttatagtaacgcaatggctctttcacactttcaccaactgccttcaatccagcaaaatgtataacagcatcaaatctgcaaccataaatggagacaactcaaaggaatgttatataagaaaaattaaagcaaaacaaaactggttttcacataattagatagatccttactttgtttcagaaaagattttctcaagtgctggtttgtcacggagatcaatctgccaatggaaacaaatatttattcaacaaaaacaatgatgaaaacagagaaaattattctttttaaaaattaacacttttaatggtttgttgtactaacacaatcatcacaaaagagagaagtaatcatagtacaaacagtcaaaacttaagaaaagccagaaaaagacaaagacaaagagagagagagaggaaacaattttgggacacttgaaaaacatataaaagggttcttaattccatgctttaaaacaacattttaatattgttttatggagcaaagtttagcataatgccatattacattacattcccccaaaaaaccaaaggtagtggcatttattattgtatttaatcagttgtaaaaaattcaaaattgtcagcaaaatcacatgaacaaactataaaagagggtcacaaatcacaatcacagaaactaacccaatatataattgacaagactaaatttttaatttttaattttttattcttcccaaaaaaaaaaaaatcaataacattgaattttgtggaacccaattcatatacgaaaattaattcaatatatattatatacaaataaaaattccaattaccttatgaaaagaaaggtttttgccaaaatcagcagcgagttctttgactcgttcaatagcgatttgagaagcgttatcaagattatcaacaacaacagtattaaacccaccaagcaaaagttgaagaacagtatgactaccgatgtagccagctccaccagtaacaagtatactcttcttcgccattaaagatacaaactttcgagttctgagaagttgtcgttatcaaaaaaccgttttctcggatcgcaacaaccaaagattgaagcagaggagtatttatagcgattggtatcagaattatgggtcttatgaatgaacacgacgaagaagaagaaagaatatttataattaaaaatttaaaaaaaatcctaaaaattaaacaaataaataaaaaatgataaataaaaaaatcattttttatttatcattttatttctttttttaaaaaaagaaaaaaagttataggaaagagaagtaaccacgtgaggcaacgtggcgcgattttgtgagctgtgatttgaatggacttggacacgtggcgctatttcgtgagctgtgatttgaattttggcgaatgacttggacacggtagcatctccattatagattccaccgggtgaagggatgaaattactaaaatgcccttgttctggttcttgcttgaattgaattgcaatgccctttgttgtctttttcaccgcctataatataatggaaccttctcaccgcaacttttggaatttcggttaaaccagtcaacttcttataacttattaagactatttcttaattagtttaaactaattacttggttaatgttattattggctttttttttctaaattttaagtttttttttccttaaaaaaaagataattttttttccttaaaaaaagataattttttttttttaaaaaaaaagataattttgattgtttttttatgttatgttagattttttttattttttatttggaatgattaaaaaattaaaacatgtgttacctatgtcattaatttcaggggaggtagctacactctaattgaccaaattttatggtaaaaataaaaagttattaaggaaaaaaatctcaaacaacttattttagtattttttttaaattaattaggattttcaccctcaaatttttatatgtatcaaattatgtccttaattaatagttcaagataatttttaaaggttaaaaaagtttagggatatgtgaaagtttagagaaaaaaaaaatctaattagttttttttatctatatatatgttttggtatttacaatgtattttaagttttgtttaaaaaaaaaaaagaaaattaaattttaagatctatttattgttatttttgagaaataatctgaactttttatttgagttggaatattacttacatataaatttattttttaaaaaaagaagataatatgtgatgtaattggtcatgttttgatgttgaaatggatgaaagggaatgttattaggatttaaaatctatgtattgcaaaataaaaaatgatttgctttatgtttcccttaaataaaacaaaggacattattctcactccacttcaaatatgattttttttttatctatattaaaaaaaaaatatgtatttttaaaacatttttcctattaaatatctatttttagtgcattataataagtgagtgtacataatatatgattttttgttgtaataatgagatatgtaaaaaaaaaaaaattaaatttgaaaattttaatacccttaacctaaacattaactttttataaaaataaataaataaataaataaaatatatccataattttacaatgacacaaagttttcgttttgaaatttgcaaggtatctttatcttatgttgtagtaaaagtttgagctttataactttcacaaagaataaaaataaaattacttttatctttatttttatcaagcatatattcttttttttttttctttttaaatataactttttaagccatttaagaacatattctatataaattatgttttgttttattttttgaaaacacttatcaacaatgattaaaaattttgattctccttttggagcaataatttacattcaaatatgattaaaaaaattagaaaaataaaataataataataataatgaaatgaaaatgtggtggtggacctacctatcttttaggtcacttaatttttatttatttatttatttatttttaaaaaagaggcgtgtattgactaaaaagggttcaattttttttttctcttttaatacgtaacttatgacactttattatatagttactcttcttgtgagatacatggaaaaaggcataatatatggtctaaaatgtcacaaatatttacttcactaaataaataaataataataaaaaacaaaagataagattggtcattctaatctaaacgtaatctcaataaaggaagtaagaaaattctggtaaatgctcgaaaaaaatgagatcatcaacttttggagtggagtgtaaaatttgtgatgcaataatgttatatatatatattaaaaatataatgttatattttgttattaattactacatataaaagagtttaaaattacttttattggtgtgttgagctaaaaaaaaattaactcaatgatgatatggctgtttaattagtttgatgtgtataatttaaaattaaaaaaaattaaaattatgtatttttaaaaaattattaaattaaaaaataattaatgattaaaaaaattatgtaaaattaaattaaaaaataattattttttaaattaattatatatgtagtactgacgatacgtggcaactgactaagtagtcatgtcatcatgttgtttgtcacgtgtgaaaaaatttgactaaaagatcaaactgaaaaatttagaagcacaataatacataagtcgttcgcgaaaaaattcaaacctttttctaacatttatatatgtggaggcttgaactcccaacaagaaccaacacaacaccaattaaacatgcaaagatcaggaatacaaaacagca

SEQ ID NO: 21336 - DNA, 2944 bp, Cannabis sativa
attacaattcatggtaataaataagtgttgttaaatactatttttgtagtagtggacatttctttttgtgaagcttgtcaagttggcaaactttatagcatgtctttttccaattctgtacctaagacaaatgctatttttcagttaatacatcaagttaatacattcagatgtatggggcctcttgttttacaattcaacagaaggtttcaagtactatattagtttcattgatgactattttaaatacacttggattttcctatgacactcaaatttgaagtcactacaatcttcaaacaattcaatgcctatgttgagaggagttttcaaacaaaaataaaagctttacaaactgataggtgggtgagttcagacctctgaatccattgctacaacatctaggaattgagttcaggcacccttgtcctcatacacatcaacaacaagagtgtgcataaagaaaacacaaacatgttgtggatgttagtctaattttgcttgcacaagctgaaatgtctttgagcttctcgtgggaagcttttgtcttttctacttatatcatcaacaggttaccaacattgtcttacaactcaaaacaccttatgaggtactctttcatcataaaccaaattatttatttttaagtgcatgatatcctttacttagaccttattaaagtcacaagctttcattcagaacaatttaatgcctatttcttggctacaacactgcacacaagggttatgcattcatcaggtcgtatttacatagcaggaactgtaaaacttgatgaacacaattttccctacaacactctctttaaatcctcaccaccaatcccaaccttaaatcccacagttaacccaactaagcaacctattacatacacaataccaactcctgttacctctccagatgtgccttaaccaagtcaatctcctatactaaatccttccttcccaatgcaaccacaaaatgaacatgttacacaacttcgaactccatctccagttcagatacattcatcaacactccaactgccaaatgaaaatattacacaccacgctgtgccagcccaaaatcaatcagaacctgatcacgaaccacaacctattcttacccctataccaacatctggtccgcaactaaatatccctgtggctgcacctctcaacacacattccatgaccacacgctccaaaaagggcataacaaaaccaaaagctttcactgatgtttccaaagtctttcttgaaccaacctctctaaaggctgctcttcaagaccctctatggtttaattctacacaaagtgaaatttatgctcttgttaaaaacaaaacttggtaccttgtgtctcattctccaagaataaaaatggtcactaacaagtgggtgcatagaattaaatacaattatgatgtcttggtggacagatataagtctaggcttgttgcaagaggctttcaacaaacaccaagtctagattactttgacacttatagtccagtagttaaaccatctacaatttgagtctacacttgctacttgcaaagattggacgattcaacaggtcgatatatataatgctttccttaatggggagcttcaagaatgtgtctatatgactcaaccactgggtttcaaaagcattgaccatccaaaaatcatgtttttaagtttaataaaactatctacgggctaaaacaggcacctcaggcctggttcaacaaactgaaaacttacttagtaaaatggggattccatataactcaagggctgacacatcttttttttttcacaaaagaaacaataaactcttacttctccttgtatatgttgacgacatcctaattactggagaggacattgctcaaattaccaagcttataactgatctaaactcacagtttgcattgaaaaatttaggccatgttagctacttcttgggctttgatgaagtcgccagaaactcaagtgggatatatctcactcagtccaagtacatcagagatttactcagctcaacaaacatgacaaatgctaccccaactcccactcctatggtctaaggtaccaaactatattaatatcaagtggaacacccttaacagatgccaccctatacaaaagtgtaattggggcattacaatgtttcacaatgtccagaccagatatctcatttgctgtcaacaaactctctcaatttcttaaagctcccacttctgagcactgattagcttgcaaaagagttcttcgatatttagtttagtacctgtgatcttggtcaatcatccaaccttcaattagtggcttactctgatgcagattgggctagctcagtggatgataggaaatctacctttggttactatgtatttcttggagacaacctatttgatcactagttttcctacaaacaaacagttgtcgctcgttccagcacagagttagagtatcgagctattgccttagctacaacttagctaatctggttaattacattctctatttacagaaattggattatttgatctttcttgccctattctatggtgtgacaatcttgagctacttgttttgcttttcatgccaaaatgaagcatatcaaagctggatcttcactttatcagggatcgtgttcttgtaaattagcttgacataagacacatctcaactgaacatcaaatgccacacccctttttaccaaatctcttcctataccacaatttgagcaacttaggtccaagttaacacttaggaatccttgtgtaacttgaggggggtgtcaggacttgttgtcctttgtatattagttagttagttggttttttaactacttcgtaactaattataaaagatgttttaacaatttctttggttagttttctaactaattctaccacattatttatttcattattctatataaataaaagtct

SEQ ID NO: 21337 - DNA, 3184 bp, Cannabis sativa
tagaaacaacaaatccttaacagcaagcaataagttatgctttaagttaagaaacataaaatgaacaacctaagaagtttcatttggccactattatattctctgagataaaaatagagagaaaagaaagcaaaagattgtcctctgttttcacgttaaaaattgaaacatcaatattattctaaagcactcatagaaactaactacatcattcaaagcactcaatatggtagcacgacatattgtgaaagaactttcccacattatttacaaacaccaaattttcaacgaacatgaacacaaaaataaacaataaaaaaaaacagacagggacaataaaaaaaaataatcataaaataaggaaaaggcaataataacttatgaactagctctctcttgtcatagactttacataaaagaaagcttgaggattgttatagtaattgagggaacaactggtttttccaccaatggattattcccttataaatatcaaaaaatgatcaacaccgaacaacggaaattcgtcctcatgcctggaggaaacccttctcttccaaaaaggaaatcacttctccagccatttcaataggtgaatcacagtcccctcctttgtgtttcaaaactatctgaaaagggaacaaaagagtttccttattaaataaacttacattttagattacaacaaaaaccaaaaaaacaaaacaattcatttttttaataatgaaaaacccaatgttcattttccagaattgaattcttgtagatactagaatattatgtaatacagctcatggacttgaaaaattggtgcttgcatagtgagcaaaaatacctcaatctatcttgtctattatagtattcaacgattatattcattgacaagtttgtcatctttattaaaacgaaaagagaataacagtacacaaacctcagaatttaatggttgctcataaggatcatcaatcccagtaaaacctacaaaaaaagagctggataaataccgcttgcgtatgtactatatggacacgaatctcagcagtaacaagagtcaagaaaataatactgctgtccaatgcagaatagtattcaatgtaaacaaacatagagaaaggcatatattacagaactgcctacgaatattatgtgagtgtctgtatgcaggtataagaagttcaaaaggatgacaataacaatgcagcggatgagtcgccattttttattttaagcagaattagcagtaagaatatccatagacgatagaccggaaccttgtatacatctaaaaccaaataagtcagaagatacagagaatgacagaaccacttaggtatcagcaggaaaatgaatgcaacacaatattcaaaatcgacaccattgtaaagtgggcacatggaaaaaaacttatcacatgccaaactcaaaaatattttgacaattgaaaggatgtgttgacatatagttagattattgtttagtgtagatttcattaatccagaaaaataacaagatagcctgagattgacctttgatctttccggcacgggcaagcttataaaggcctttagggtctctttcctcacaaacttggaggggcacgtccatgaacacctgttgaataaaagtttcctcaggctatgttgtaaactatcatctcaactttccttttccaagaaaaacatgtttaaaggcagcaaataaaacattgatagtacaaagtacaaacctctataaaatccccttcaggcagcaatgctcggcaggcatctcgatctcttgcgtatggagaaatcaaactagcaatgcaaatgaccccagcatctgcaaagagcttagccacctcacctacaatacagcacataaagtagaacctctaaatacaatgtttacccaaatgcttcaatgtatgcattgcatatcatgtacagcattgttcctgtaattatcaataaatagagtaatagactcaccaattctccttatgttctctgcacggtcttctgctttaaagctaaggtcacgattcaggccatgcctgacattgtcaccgtcaaggacataagacagcttccccctgctgtgcaagatctgacttaaagcacatgccacagagctcttccctgatatttcagttaaagttaacagggatagaggaaatagttgttgcatgaaaatttagctaacattatgttgttagttaaatttacatattaaacagttcaatatgtcaatactttatatttcataagcatcttctcatcaaaaataggcatgacatgaattcaaacagtagcataattaagtgtaagattaaacttaaactaaatctcacatgttggtatgcataaataagtttaaaatgtaactcattatctttacaagtaaatatatagttcctttctaactctataaagatcaagctacaaatggtgaggagaaccaagagggtgataggcttgtgctccacattgtaagagcaaataagaaatctaaaaaatgctttgcacaatcctctcatctagtcttataaaccatgcaacgaatatagttatccaaaataaatcatagtaaagccattagagcgactttacaataactatgctagttgatataaaaaacaagacacctaagctaaagggccaccaagtaacaacatccatttccaatatcaaatatttaattgtttttatttattttaaaacggcacctttgtctaaccctacaatataaatacaatattaaatacttgaggaacaagaaactatagtaatttaaacattggacttgcaaccgatctctaatcaataaaattaattgtaagatcataaatcttatgtttcttgtacctttcactgcagatcactatgcattgtgcattaacttggttcaacataaatggttccatgaaaaagcaataaaatgaaaaataatgaatgaaagcaacaaacctgaagcactaagaccagtgatccatatgacacatcccttttgtttcagtagcttctgtctttcaattttgttaacagaacattcatgccatttaatgttggtagaatttccaatgctagacagtagactctgattctcatctatcaattgggaaaagagaaaaaaaaaaacatttaaccatgtgaaaaatcatccttagttaatccatactacaactgcatctataattcataaa

SEQ ID NO: 21338 - DNA, 2968 bp, Cannabis sativa
ttgaaacatataatcatgattatattccactgtgttgacaacactataattatgaataactatatgttctggatttaatagaatttatatatttaacatataatcatgcgagaaatcatgtgaaccatgcaacataaaataatttctgatcttttattgattagtaaatctaattacattgaaatgagtttatttagggcataagacccaacatggttatctttctttttctgtggaggttgctgacagttttagacctcttttgttgtttagtcgagggagctttcttcgaaggttcaccatccctttccctttatccttgtgaggattagaggttccacaatctttaggatcaactcttctaagagcattagttgttggagttgtttggatattaaggttccgtttggtcaggcttgtcatcacgacatccattcacgtcattttcccaagcagtatctcatttaatttatcctgtcgagataacttgcttttatttaattgaagctttctggccataatgatcacgtgatctgactcgtcaagattgtccttttctctagcatcatcatcagtaaccttatcatggtgatccttgaggattatcttttgaagtgccttgaggatcatcttcaacatcatcagaactattctcttttgattcatcatctttgaatacaggagcatccatatatgtgtctttttcaagttgatccttgtgatagctagtctcctcattctaatcttttgtacccgttgccttggcattaggagcagtgaagtgaagaccagacttatttcatgtgagtaccatgattattaggtgtaatctttagatggtatcacgacctccttcaactctcaatgaaagtaccaaaatatttactgagatttttgaaaagctaattatataataaattaaagcataagaaataaataattctcaggaaaaaaagaaagaataagaactcacacaaactttttatgtggttggggcgttaagaagccttagtctatgagtcgatattattatgtatcttttttggaaaagcctttggaaatacaatgagcataagttctctagcttgcctgagaaaatattgtaagagagtttaacccttaatccgaaagatttgttgggtatttattgtgtcaagagaattatacttagttttctattttttcgtctaatggggagtttacatgaaaaatacataagtttggttgttctcgtaaggtccagctcatgaaagaattgatcagctgactagacagattaaatatggttgaactgtcaacaccgtgtcctatgtgagcaattaattataaattattaattgtttgatctttattttgatagtttttctttttggattgatactagcttctatcaaaatttgagaaggatttaattttttattctgtgtgcaaaggtaccttcttagaaggccttgtatgacttgggcttggcccaaatcattttttttagactcacgggtcaacctttgatcctgatttaaaatttatgtaaacacaaataacattaatcatgttttttttattcttttcttaaaaaatagaaccatgtgtcatgatagataatacatttagataaataagacaattgaccctaaaactatgaatcctatcttatccaaagtttatgaaattcaaataatggaatcataaaagagctaagtttgaaaggaaaaaatatatattaggccaaaccgaccaatactagctagtactgattggactaataagtattatgagtttttctttttaccaatcaagccgtaaatatatatatatatatatatatttatatatatatactttttctggatgatattggacagaaaaaataatataaatcaaaagtttcattttttttttggctgagcataataattaatgagataagaaaacgtacaacttacaagagtttgttaaatcaatattatgataataaattatgtattatacagcttgtgacaactacattatgcaatacctaaaaaaaagaattataaattacacaaacatcagaccccattcattttgatgggacaagattacgtgtctatcacatggggtaataatattttgtatggttatatctagctaacaatatacatgaactctattaaaaatatatatatatacattataattttatttatttatgatgtatagttgatagaatctttgttttgtttactaacatgttcttcttttggctagttgttgtaaagcacacatgtaaacacttaggatttatgtcgcatttgtaccattatatcaatttaaaacatattatttcaaaaaaaaaaaaaataataataataagaaaaacatgacatgcattaattagaacatgtttcatgatatgggacaaagattaaataaaacattatgaaaactcttttcaattgtgtttatttggtctaagatatataatatatatttatgtaaattttttttccctgtggaaagagcaaataaactttccaatgtgagtgtttagatcatcaactcggataatcttgataaactaggaaacaaacgcgctttacgtgtggttatattctctttagtaataactaaattatgaaattaattttttttaaaaaaaagtactaaaaatatgaaattatgatatttcactataatttattactttattaaatttaattcgtatgctttatttaatttatttacttattttttaaatttctataaggatcgatacattatatattattttaatagataaaatatttttcaaagttacatagaaaataaaatattaaaaaaataataaatctacctataactttaaaaaaaatttgaaagaaaatcatcatagaatttttagttaaaaaagaaaaaaattaaagagatatcttcaaatatctatctatctattctatataaagtgtgcctatataacagaattcttagt

SEQ ID NO: 21339 - DNA, 5191 bp, Cannabis sativa
  modified_base (5140)..(5144): a, c, t, g, unknown or other
aacaatctcaatagttcatgggaaatttttaaccatcttaaaagttcagggagcatgatttggtacatgtcaaagtttggggaaaaaaatcctaattagtctaaatatatttataaattaaaataaattaaatttagtgtaataaaaaataatacaattattgttgtgagacctatattaatttatataataaaattatatattcttaatcgggctaaattaagtaattgcagtcctgtacttaattgttttatttgaagttgcaattatttctaaaaaaaatgcttatctctttcctgtttatcaatcacatccaagatcgaattattttaaaattaattcaatacgatggtatgggtagggtaggggccaaatcagaagaatttacaggacactacactgctagctaggctgacaaacttcaacaaaattgaaatatgaaccattcattattttcttaccgattaagataaaaactactaattataacacacagaaatatatagaaatgattcactgataaatcatactctgctgcaattgcaaagttaaagaaacttagcaaactcaagtgctatagatagtgaatcaattaccatggagttgctgagttttgtccgttatctagatacgactatagtaggattattcattgccgtagttgggttttccttgttagtactaatccagcaaaggaataataattcaagaatcaacataaataaaccaccggaagccggcggcggatggccattgataggccatattcttcatcttcaaagaggatcacagcttccccacataactctggccaattgggctgacaaatatggacccgttttcaccatccgtatcggacttcatccagctcttgtaataagtagcagggacatagctaaggagtgtttcaccacaaacgatgttgttttttccactcgtccaaaacttatcaggtccgaaatcttgggatggaactacgctagtttcggcttcgcaccttacgggccttattggcgcaaactacgcaagatagcaacctcggagttactctcgaataccaagttggaacaactcagacatgttcgagaatcagaagtgcagagcttcttgaaagacatttacaacaagtgcagatctaataacgaaggctgtgtgtcagttgagatgaagaagttgatagcagacataaatctgaacgtgagtcttcgaatggtggctgggaaacggtattttggtggtgactcgagagagaagaaagagactgagcgatgccagaaagctatgagagaatttttccgtttgactggactttttttagtgggagatgctattccttttcttaggtggttcgactttggtggacatgagaaagctatgaaggcaacgctcaaggaattggatagtcttgctgaggaatggttagaagaacatcatcaacgaactagtcttgacacagatttcattgatgtcttgacaccgatactccaatcatcttctgatcttgcaggtcatgatgcttttactgttaacaaagctacggtcatggtacgtacaaaactaattatatatgttatattttaattaataatgttttttatatatgttttgtttgtgggcgtagaatcttatttctggggcaactgatacaactacagtaacgatagtttgggctctgtcgctggttttaaaccacagtagcgtgttgaagaagattcaggaagagctggactttcatgttggtaaggaaagattagttaatgaatgtgatataggaagtttggtgtatcttcaagccgtggtgaaagagacactaaggttataccctgctgcaccactctctgggcctagagaatccacccaagactgcaccgtaggtggctatcatattccgaaaggcacacgcctaattaccaacgtttggaagatccaagtggaccctttaatatggtcagacccaatggatttcaaaccagagagattcttgacggaagcacacaaggatgtagatgtgaaaggaaagcattacgagcttatcccttttgggtgtggtcgaaggtcttgtcctgggataagttatggccttcaaatgactcacttggtgttagcttcgtttcttcaagcttttgaggtgtcctcctgtacctgtacggatgaggcagtgctggacttgacacccacttttggtctaacaaatgcaaaagcaactccccttcaaattctactcaaacctcgattgtctcatccttctctagctttcagttcctttgataattaggacgtctttttgagttttttactctttctgttttcataaaccaaataatctctgttctgatctgtgttaccatcaacaccctttttctcgatgttttcataagagcatttttcttgaataaatatagctaaaactatgaaacacttttaattctatatgtgtaagtgtaactatcgatattccatttccctatgaaaatacttttagtatatctttttctctgtttgccaggtagcatttgtagtatctttgctttggctatattttttcctttgtcggcatagctttaggtttttttttttttagtagatgaaaatgcatattatattaaataaagagttcataatacaataagcatttaggggtggaggtatagcctccaaccaattaatacaaatagagttcaccaaaagagcatactttgctagtaaatgagcagcagtattagcaaatctaaatatatgaaaaatctgcactccaggaaaattagacactaagagagaaatattcgttaacacactatgaaaatcagaaacagaagcgtgagaagacgacaatcctttaaccactatagagaatcagtctcaatataatgaataggtaattgaagatctttaagccatggcaaaccatacattaaagccatagcttccattatttctggtttaaagttacctgggaaaggcagcgacatagcagcgataatatcaccaccacagttacgaagaaccgcaccaaaattggaggaattagtcatgttgttaaccagtatcagtgttcaatttcaacctaccagaaggagaattcatccaaggtgaattgttgttggcagcatgtgatgatgaggaagtagcagtagaggttgttttcgtgaggtgcatggccgtttgaaattcatcaaggtaagtaatagcaaagtataagagaatatcatgtgattttggtttcttgctattcttttctttattcctttcactccaaatactccaaaggattattgcaaattgctccaactgtaagtgattccatgttgcagaaacttgtaacaacaactcattaagcgtcatttgcccagtaagatgattactaagagaaaatgatgaagcttaatttccaaactcgcttaggacaagtacaaaagaatagagcatgttggatcgtttctttatcaacgtgggacaatgaacatacaggagaatcaacaacgtgtcttatatgcaaaatatcagccacaagcaagcagtcatggatggctctccatagaaaaattcggacctttgatggaatagttagcacccaaaaaattttctactattgttgagtttgcaaaccactaaccgtaggttattgttcctccaaatgtgtagccaaatagtatagcttgatttaaccgcataagcgccatttgattcgtagtgccaaatttgttgatcatgttaggatgttaatgctagaggaatactttgaattttttgaacatccgaaacaaaaaatatggtcttcaagattggtaaattccattgacgggttttggaaattaagctagagaccctcatattatgatcaacacctttgaaaattaatggtctaaaattggatatcccaggcaaccaaggatccgagccacatatgatgctatgaccatctcttactctccatcttaagcccttagctagcaactccttaccccaaacaatcccttgccaagttagggacggataagatcgaggtcccatatctaagaaagaaatgtttttgaaatatcatggcttaagtatacaactcattagagatgtaggatttgaggaaatacgccaagcttgtttggccaataaggcctcattaaagtgaacaaaactctaaaaacccaatccaccttcgactttagagtggcaaagtatagtctaagttttccaattaatacctgagcccgaagagtataaaccccaccaaaacttgttcatcataacttcaatttcgttgataagggatttagagagacggaagaacctcattgcataagttggaatagattgggcaacaactttaagaagaatttccttgccaccaactgaaaacaattgctcttgcgaggcagaaaattgattccaaagtttttgttttatctccccaaataaaacttttttgtcctttcctgagtaagatggaagattcaggtatcgctcatggcatggctgaattggcatgagaagtatttgttgcaaattagcttgaattaagggaagcgtatttggtgagaaggacagtacagacttctccacattcaacttttgtcccgaagcacgacaataataatcaagagagttttttatgacagtggctgaacgtgaattaacacgacaaaggatcaaactatcatctatgtaaaataaatgagatactgacgaagtgcctcttgaaacctttaaaccatgaagattaccacttgattcttcatattaaaaaattctagaaataccttcagcacaaatgataaaaagataaggcaagagaggatccccttgtcgaatcctacgactaagaataacttgtcctttgacggatcccttgatcaagaaagaatatacaacattttgaatccagcgtaaaataagagccaccacaaaaggatcaaacccccttgctaacatcatactttgtataaaatgccattccactctatcaaacaccttactaatatcaagtttaatggtagcataaccttccctccatctatttaagtgctttaaagaatgtagcaattcaaaatcaactaacacattatccgtaatgagtcgagatggaagaaacacactttgcgaatcggaaatacccagaccaagatattgttggaaattattttannnnnatctagatttactaccaagtatgcttcattaacatcctaatatgaat

SEQ ID NO: 21340 - DNA, 3056 bp, Cannabis sativa
aagagggcttaaatggattgattggtactacttatattatttataaggtgcatcttgttttctggtggcccattacttaagaactccaaatttaagtgtgcttgacctgaagcaatcttgggatgggtgaccttctggaaagtttttctaggaagcgtgcgagtgaggacaaagcatactggaaacactcgtattggtttttagggccaatcgtcatttcaggaagtagccaaagtgatgtgctcgtgtataagagtcataagtttgtgggggaagacccaatagaggcttgaagcaggggtgttacagatctcatcaataaaataatctagtttattaaatccattattactcctatataaatataaaatttcactcttagacaataaataattatatttatagaattctttctattagtccattaatataatcaatataagtatttcgtcctctaatttattagttcataattaaagctggttaaaattatcgttttacccttctaataatctctttattccttaagtaccattaatttatagtgagcatttaatctgtaatccaattataaatttgagctcaataactgaatttactcccaaaattaacattttaagagaactaaaattcgattctttcaaaaagcttggatcgattccacttattatataatatattctcatccatccatgttattaatctcacaaaatagaagttttaagaatcatctcaagagaaactttaacgagtgaatcaaaaaacctaatgaacacaaatagggttcatgaatactcatgatttagacagatttactaatgatcatcattatgatatatataacttttttgtgataaacgtcatgttgatacaagatgtttatttatataagccaaattatgcataattgaattatatataatatctatctacatatgtgatccgaatcaaaatcacatgtcactattatttggtggatttgcgagtcgtacttggtaattccatattaaaaattctttactttaatactccgacaagttttatccatatggttatagtcttatcagtaatatattatctattaaattacttgcatttatgacataaatcttaacaaatatctccagaatcttggcttgagctagacagaaaggtgattttaaatttcattagtgatgtaaagatttcaaattaaatcatccctgctttgcagatattgtacttatgttctatcttggagatcgtaagtccacctgcttgctattgttggggtttaaactcttctcacaatcctctagtttgcaggctaattaataaaaaccaaacatttattgtgaaaaatcaagaaattcaacttgctgtggatgtttctagttttacaaaagacaagcttccatttcggtacctaggcatacttatctgtgcaagaaggctatcaacttttgaatgtgaaagtttggtaaaaaaataattaagagaatatgggtatggagttcaagacatctattttttgatggtagaaatactttgattaactaaggtggcgtttggttgggagtaatgaacatatagatttatgaatgaaatgtaataaaatttaaaatgcatacaaaaaattgataaaaaaatcattaatttttttctcttgttacattggaatggtctttccttcctttttaaaatagaatagtcattctaccaaaatggtggaaagagcatttcattaaaatgtcattctaatacgttaaaatacaaccaaacgaaagaatagaataaaagttgtttcctttccattccatttcattttattatctccaaccaaatgacacctaagtgcttttaacaattcattcttactacgcgcaaatcatggttttgccaaagctagttttaaaaaaagataaatgcaatttgtggagcttttttttttttttttaaatactgtgtactgtgttaagttttcagtgttgttccactattgttttcagttattctgttttgtgttccactgttgttttataaaaatatagtatttttgaaaagatttccgtgcgacagtatttttgtaaaaattaacccaaatttcagtatttttgtaaatttccctttattttattgagaaatcagcccatatactattctttaaccttttgtttttatatatttttactatatgggttattctgctagtttttatgtaggttaatatatgaatttcagttataatttaagttgttccgttagtttctacgtagattcttatgtgaatttcgataaaaaggaaaaaaaaatattttaaaatataaaaatgaaaaaaatcttattttattttattttaaaaaaaattaaatgaacaaaaaatttattagtactgtcgattaatcatttaatattttcaatattaaatatttgtttattcgagcgtgtgatgctctctccttgctcccatagcgaagaggaagaaggttgcattgaagcttgtttcagttgctgcgagtgctgtgaaagagaagattgagctgcctttaatccaagaaaaagatgcctctgctcatatgaaggtcttcttggacctttgcgacgaactggagactggtctgaaggaggcaaaggatggtcccagcagtgtgaaattgacccttaggtctgctagttgggctgatgaaatggagtagacggattatcaagcttcggtaaaggttgtgtggagtaaatttaatgtgaatcaggtgagaactccttcttcccagtcaaattttatcgaagctttgaaaattggtgaccaggtggttgccatattggatttagagaaagttaaaatagaggcttcgtactggaggtcttcaattgtttatatagttttgggggcgaatcctccgtttagggtttttgaagggttcattaagagaatttgggataattttggtgtagaaataattcagaggatgcattctggatttactttggtcatctttagagatgaagtaactagggatgtcattcttgaaactggagtcatccattttgataaaaaaaaaaaaaacagtggttcttag

SEQ ID NO: 21341 - DNA, 1753 bp, Cannabis sativa
  modified_base (98)..(105): a, c, t, g, unknown or other
aacaaggaaaatggcaactaataaccgaataaaagaggtaagatttcgaaaatgaatgcaaagcaatcttaccataaaaggaaaaattattttgtcannnnnnnngccaaaaaaggactttacaacctcgtgcttaacagagaaaatgtcttaagagaagtcaaaatatccctttgatttatttatttatttatttagttatttttaacaacaccaccatagcaccatagcaccatagcacagcacctattactacactacaactcccactagagactgaactcctctacaaactagtcttaaccaaacctaaaacgtttaggatgaaataaattatattctaattaaaaaattataactaaataaaaatataccaataaaaaaattaaaatattaaaaatactaaatgtaaaaacattaacaataaatagtttttaatattatattataataaaattatttttgagtaaatatatttatacatattttggaataattattaataagataaataaatttataaattatatataattttttaagatataattattctttatatactttttttaagatttagagataaataattataatttgaaaattatttttatttataactaatttaaattaaaacataattttttataataaattagaatttatttgtaaataaaggttccacaagcagggcggtgagcttggtatttgctcatttattcaataattcttaattattattattattagtatgacataatccttaattattattgataaatagtctttttattaataaatgcatgccgtacacgtggcccacacactcaatgatcagatggtggggcaatgccagtccccgtgaatgagatgggtcttcttcacccatccaatcaaacctcaaacaaccccaccttttgtcatttgggcctcctcaacccaaaaataaataaataaataaacattggcatataatattaactatttatcattactaaattaattaattattaatgcatgtgcctatattaatactaaaacaaataatacttgaatgtccagaatcgacgtgcaataaggacataataagggtttatcttatgttcttatttcctttaatacggtaaaatgaagaagttcattcagaacaaaaaaaaaaaaaaaggtaaagctaaagaagtaattaatttgcttaaagtaatagattaatttatgtatctttatacataaaatatgattatttaatagtttttgttagtttaacaaaatattttaacaatataaaaatattccgttaaatttaaaggtgttaattagttttataaatatatataaatattaatattatttattttacattaatttaaatattatataaatataaatattatttttttttaagttaattaaatttatactaattttaaattaatttaaatacatattaataatatatgatttgtattattatttttattcttatttttaatattaagaatattaagagtatgttcaattttaatatttttaaattttatatttattttttaaaattttgaaaactttaaatattatttttttaaaaaaaagataaaataattaataagttatttcttttaatttataaaagttttaaaatatagataacaaaaataaaatttaaaaatattataaacatatgtacaatacacacaatagtctagtatctattctatataaagtgtgtctatataactgaaattcttggtttatg

SEQ ID NO: 21342 - DNA, 5983 bp, Cannabis sativa
ctcataatcacattgattatgtagtccaaccacgtaagttcctattgttctttactgctttctttaaggtcattttactggtttatttttctggtttaatgttgatggttttatgtggaatgtgttcttgatcattgtgtgttattttggtgttgtgttggttcttgttgggagttcaagcctccacaaagcctaaaagcttcacctccgtggacgagacatatttgaatcgaacaaggaaaacactccaaatgaacattggaacacacttagagaggtattccaagaggcacctccagaagccctttgacgtctggtcccaccaaatcagaccttctctcttatgtcagaacatgtcgtgcgcaccaccaaaagaaatatatcatctttgtccaaggatgcttatctaacatccttgtctgctgtagtagtgctcgcacttgacacgtgtccaaaccgtgtgggccccatctgtacgtacaccttcgtcccataagctagaattctgcagtgggccttaaagtcaagtattttatgtatttatcctaatagtgagctagtttgcacagtatccctagctagcgggttatgagtatgcccgggtccgaatcattaacctatataaataccctattatacattcacgtagggagcagattcattaaacagatttttagggtttcttcttctctaagctagaaaaactaaggaaaaatagtaagaatcgagggttttttaacttataagacctcattgtaatacattaaaacctttcgaccaatacattaacttgtgaactagggttaattaatatccaaaccacgtgaaaatatccatctctattactttttttttttaaatgaatctttattacttaattacttatttaatttgttaagctcttctttaatttagtttctgaaaatctctgtaaaacaattaagtttttttagaatgttattatatgtcagtacaacttgaatttgaagtgtcccatagtatatcaaaaccactctaaaataaaactgggtagatttttttggcaagaatttgtcaacttgtgaaataattaatgccaagtcatacattgttatttttttttcaaaagatattcattcatacttaataagtcttataagtttggagaaaataaccaattaattaatgtacaccttaactttttgaacacatgtacatatgctaataaaacttttagatgaaggcctctctaattagtaacagacatttacataaataaatctctatttatggtatacatcctatcaatccctatagattaattagtatatattactactcctttaacaccatgtcatcattattaagtttaatttattgaatagctgactcaataacacaaatgatgttttgtaccttttctttcttttttcaacaccacttcaattgaagagaataaaaattgggttaaaaatgtattctttgtgattgtcatgatcaataatattagcttcttttatttttatatgcacacatagcgataaatgtcaagctaaaaaagtttcacaattgtcgtttacacactccttttttgatctatagaggaaacatccttttcaatatataatatattaagaagttgtgtagttaggtattgtctaatttttgatgtatgggaagtagtggcttattgtctagctaagctacttattggtcatcatatatatcatcttctttgccattcatgtgttttctttttcaatcttttaagactaaaagttactttttatagtgttttgataagttatatataaaaccctatatatattgatttaaattaattaatagttttgtattttatatatatatgatcgatagataagggtagaaggtgataaggtgcaaaagccctattcaaataaacacaatcacttttcccactttattctttcatttttcttctctatttctcatgtgggtagtgtactatatcttataaactaactagcaaaaaggaatgcaaagtcactagctaggaagaataaagaaattaaactatatgtattaaataaaattgggagacatatttacctttttgtcctcaccaatagaggcttatatagttttagtatacggagaaaataattatatgttctccaagaatttagtcttcaagtgagtttttagagtgaaatagcatgagagagtgagagtgagagagtccctttacaattaacttcacaacctatttaacctgacatatcttttttcctaactataattacattaaatttaaaatataaaataataataaaatattatttcaaaataaatatctcaagaaacgataattgttgtagatattcttggactatagctttggtggcacacaaaagtgtaccttcacgtagattcaaattcgtatgagttacttgcacttcagagatagaccagcactgagtgttagcccaacgtggagcactgaaggtcgttggtcatgtgctctcatgactctagctctgaaggtcattggtcacatgtccttatgtgtcctcacgactctaactctgaaggtcgttagtcacgtgtcctcatgactctaactttaaatgttattgttcatgtgtttttatatcacaactctatgaccaatattcccaatgatttgttcgctatctagaagaagaatccacacacatctctttggattttgattttttgtgggataacaacatgtttttagtaaatggatatatatatggtgctgtaaattaatatagttatatagagcctttttcacaataagtttagaaaattatgaacaatttatgcaatattactaaaaataagaaatacgctgttttaaagatttgtgacaagttgttatatgatcgaatcttattttttacattgtaaattatttaaaaatttcttaaaattattccggtaggaagtcctaataatagctataccatgtatattatcacatatatatgtatataaatttctaatttattcacatacattcacttatttctaactttcataattaattttaattagatatacttaattaatatgcatatattctttgagtgaacactttcatatgtacaaatcccaaaaacaaatatattcttctaattgatatgcatatatctaattctcactacactacatacatttgagtttctattcattattgaattacacatcacataaatgtgcttaaatatttacttatgatcgatattccccatttcctctcttcactacaaaagtagtaaagatatattttgttgtgtgtgtaaattaaatgccttaattgatatgtgtatgtctatatataaataaacatgtacatagaaatgagatataatagagatagggaaaaccccttgaaaaaggaaataagggtcaaaagggtaaagtagttaagagaaggaaaagtacaaaaaattaaaaaaataaataaaaaaaagtggtgtgaaaatggaatagaaatgtatcattattattagggttttgttgttttttttaattggatgagtaagaagaagaggttgcatgtgaaggaatgcatggaaaggtgggttattttgtttggagaagcaaattaaaaatgaagaacaatccaaattaaatggatggtgaagaagctcctctactctgtgtgtgatattattaattaatttattttgagttatttgcggtaaaatttttttatgttttagttttatttaattttcttattatttttttagtgataaattttttttatgcttatttttctttataaatttaaagtaccaatgggatatcaatgttaaatactaatttgattattattatattgacttcaaaattttacttttacgtatacacaagtgtacatagttgttatttagttgatatttaacagtaataattaactgacgccttaaattatagagttaagtgtataaaaattaaaacataaaaaaatttcgatgccaattactctcaattatataaatatatatatatatagttatattgtgaatttgtgacgttaatcaaacacatgactcttacactgtcactgcaaattaaaacatttttatattgtttcaaaaaaaaaaaaacatttttatattaaatgagaggatcaaatttggccacaaatgttggcttaaacttcgagcacttttatttttgttcttctcttttatgtggttttcattacattgtttattgttatatatataatatataatatgtatgattgtttaagatgtagcttatatattaatcgtatcattataaatacaagtgtgattttgtgtctcaattagtatagtttttgatagtagtgttttttttcagatatgaaacatttatcttagtcggttgtaaaatttatggaagttcaaaccgacttaataaactaatatatatttttttatgttggtataaaataatatatgttattttttaaaaatatattttaattttttttaattaatttgtggagaaaaagaaaagagagtcaaaaggatgagccgaaatagaggaaatgaaaaaaataattaattaatgaaagagaaaataaatgaagaaaaatgatagagatgaaaaaagacaattaaatttttaattacaagaagcttttcaaggatcatgtattaaaaaaattaattattcttaaaaaatgttgaaagtattaactcttatagtcgcttataattttaaaatacaatttattatgtcagtttaaaagtatcacaaaatgttttgacatatcaaatttaaacttataagagtattttactaataagaaaattcatttgtattacttactataataaaaaataaataattatttatttattcatatgagattacgtaataatattatctccctgtgtcgaaaactacctttaacgtatgtacgttattttataacgtcaatcaacaatgttgtttgactccttttctagactaagattaaacgtgttaattaattagtccccgccatttaagtattagcatcaattaaaaattaatgccaaaacaactaagattaatttgtttgcgaagaaaaaccctaataacaactcaaaattacatatttattttaatattatttaaaaatattagttagtaggtttatctcatggctagtagcttggcaaaggttgaaaacaaaagatagacatatcgtgtctattatgtgggtacaaattaaatagagactcatgaacacttatcttagttgtagtgagaaaattgtttatgcttgagtggattggtttgggtacctattaggcattgcaaagacaataaggttaaaagtaaagtctttaaggtttttaattaatgcctctgtttattcagtttggagggagaagaatagagccttacgggtggctgaaattaaaactatttggaatattgtaaataatacgaaaaaaaaaagagaataattacatgagacaccattttttgttaaaaaaattatatttttacgtttaaagaattttttatttttttacattttttcataataacacgaaaataacgtgaagaaaactacataaaagtaatataaaaataatatctaaataacatcaaaacaacaacaaaaaataacttacaaataataaaaaatcaacaacaaattaacaagtaaacataaaaagatcatattttttgtaagtaaaataaaaaaaaaatcgtaaaaatatctaaaattttagtaaaactgtatttttgtaattttttttattgtttttgtgaaataattccaaaaaaaaatagtgaataagattcaaagtcgactaaatcatagcaatatagctagggaggaaagatagagattggttaagcaaaatttgcaatgtaattagtttctaaaaaagattgttcagggttggaaatgtttttttttttaaagtaatatacaatgacttacttatcaaaaaaaaaaaaaacacttgatactaggtggcgtttggttggaggt

SEQ ID NO: 21343 - DNA, 6235 bp, Cannabis sativa
ggttaatatgtagaatgtactagactattcataaaattatttttttttaataatatttttaaattaaataataattatttgaatagattattgatttattcttacctcctctaattaattattttttttctctctttttcaaaaataccatatttctgtttgttcatctacatttttacatgtttttttttatataagtcaaaatttattacttgtaaaatattatggtatcttagttccacttctaattattctcctctttttattttcttattttaggataagaaaaattttcactaattaattatttcaacaaaataaataattgtcataatcgttttggtcatagaaaataatttaaatgagaaaaatatatgtttagaagaagtttgtataataaaatctctcaaaaaaaaaaaatgaaaaatttacatgaaataatatttttaaacacgtggaaaaattattatttggtacaaaaaaaaaataatttaaataattattttcttgaatgataaaattaattttaatcggttgttaattttttttttaatttagtgtctacttttttaaaaaaacataaaaaatttaataagctacaaacaaatacatattacactgtgttgacttttaaaagtcatagataaatgattaaaaaatatatatatgtatagtataaagacaaaaagatagtcaccaccatgaaattattctaattattctaagaataatatgaaataaatatacaataaattataaatgttcccacttcccaacccgtaatcatcattggatatgtttagaatcaaatggtttgatttacatggcagtgattcgttttgcaatttctaagtttaattatattgctgtacactttatgggggaagcaaaggcccccgtgcctactcaatatcctttacagcatcctgtgccaacacaaatgaaaacgacaaccaatcaatatgcaaatatcatatataaacacaaaatttacggctacagaatcacatagatataacatacaatcattgactcaatgttctttcatcaaaaaggaaaaatactccaaaaataactgtatgtataaatggatagtgaagctgctttatattgacattattttaggggctttgtattgaaataattaaatatccaataaaggtaaaaaaaatctactaaatgagaaactaattaatgtatatggataattttatgtactacttttttcgacattaagggtgagaaattctaacaagggaacttctccattgaagagagtagagtaccgtaggcaacataagccttatataccattgttaactacaactatacctacaagtacaacgatacacacacacatatgtaaaatacatatacacacaacaaattcaaatcaacatgcaatatttttcaaccgtctatgctacatttagaacaagttactatccattctgaaaaaatatctaaagcgaaaaaaaaaaaatatatatatatatatatacaagcaattccctcccaatgccaagttctatagaattgtgtttcaaacgagtaaataaacacgggaatgaacagttaatgaaataattcctggattttcagttcaattatagtattctttgattgttaaatactagccctaatctaagttctaattattctatggtaaagaatttatcaaaacaagtagtacctttgcaagttttgtcacgtaagctgcagccaaagcagtggctaacaatccaaggcctaacgtcaataattgaccgttcccgctgaccaaaccaacctctgactcttcttgctgaaatattaattcacagtatataagaaaattgaaagatgaaaatatacagcaaatttgatccaactttcttagcttatattcatcatcatttgaacaaccgaaaccactcactattattgctcgcccaaatgcaccagcgctcacataagcccatgttcctggaagcatccccaaccaactgcattttgtcataacacagcatgtttaaatactttgaaaccatccccaaaataagatggaaactgatattcaaatcagtcaaatgatacaccacaatagtgaatttgaaataggaaacaagagatttaaagaataagagtgttttatttattaaaataaaaaacaagttaacacttgttcaaaacaaaacaaaaaaaaaaaagttaacacaacacagcaaaacgcaaaagacctactttcaaacaataaccatgcctcattatcttagttcaaacaaataccatacccttgttatctaaaatactcatctagtttattctcataaacttggccaaaaagagatgactataaaacaatcaaaatgatttataataatcaaatctttacttattatcctattccctaattattgttcggtacgcaattcgtaggtgtcatcaccccgctcagccaccttgtcttcaaggtgaaattaaggacactgctgttgtaagttgctgtattctcccatgttgcctaaaagaggggtaagtccttccgtttgatcaacgtaacattatgcgtaccgcacctctgctggtttaactatctgctccaaatcagacatgaagcagcagtggtgaggacttcagtacaccatgagcgttgagaaaaatgaaaaattgagtgcaacttagatggtgctggtaacactagcatataagccacctccccaatgcaagagaccgcttcaaagggtccaaagaaacatggaatgtttgttgctctgcctagacactggatattaataagatacaggacataaagagcatatatgggtcatcttactgaaaggtggtggatgagcttaaataggatagcatgtataggaggccataagaatggggaaatagggttgagtgatttttcgtaaatagctttgctctagggagttgaggtctcactgagtacctatatgggatgtaccaatggcctgcgtttgaggatgatatgaagtgctgaggctgtgccttgcaactggaacagctctagccagaaatggcttgtacaaacgtatcacgacctgaaataatctaccttgttatcccattgaaaccaatcacttctttttagaacagctccgtgacaatgcaagtagtagatggatgtttcaatggaataaaaatgggtgtgtttactcaacctatacagcacaaccaatatagtatcccaagctcaatcatcatttcatgaccaagccttcttatttcatagtaccttcatatgaccacttagttctccaactcgagtggctcttgcttgactctcacttcctcatggcaaaccaaggcctccttaatttctataatgtaaactttttgaagaataaatatcctaaagcaatggctaactagaacaacccacaatctcacttttgttggatttcaatttttgtcgagactaaattggtgcctatattgggcttgaaattttgctcccaccttttgggcaaagtccattggaccaaatgtagtaacctttaccccatcgcggattgtaaccattttattaaggtcgacctcaactccagcacttgctttgatattcattctaggtacaataccaatgacatgaagcaattatgatgatgcctcatggtggtctcttgcttgagtgccaagaacttgcggtacattgatcctaccaagaggttcaaaatgatgaatcacttgggccttcaagtcttcccaattcaaaaatggtcacagttggtgctcccattgaaaccaaatcaaaccctcatcttcaagaacaataactttcatttccaactcttatgtgttatgatgagttgaaaatagcattctacttctaagatccaaccatctgaattatgaccattgaatcatgtttgtgtatcccatctcagcaccatcaatgtcttaggtagaccacacgaataaatggtgcttccttcaacctaggtaaattttcgctctgtcgatatccttgcccatttgaccacatcaaatgataattgcacctcctcctaggtattaacgaattggtcaaacaactacctggccaatgtagaaaccccttgctccattgtagataatttcttcaatattgttcctttacaccataacaccatttcctccattgtttccacgtgtgcctccatatgtggctccaatatcacttgatacaccacaatagtgatcttcaataacagagatcttagagaataaactatcaatgacaaagaaatttgagagacctagttttcctcttgagctagtacttaattacaaaatgcagttgtacccattcccctacaccctaatcaaatttattctcataatcataccaaatatatctaactataggacaatcacaatgattctatgatgaacaatcaaatctttccttaattatcctatatgtcaatccctccaattatggtttcttatactgaatgtagcagtgaaggcttatcaccaaatataccctcacaccacaaatttaaaacgtgtcattcataatatgcattttcaatacttgagaagtacaatttggaaggtgaagaatgctaagagaactctcttttttacacatattactgttggaactctactaattcaatgcaaatatacaattgatgtgaaaatgccatgcatcattaagatgagaaaatgtgaaagatggtgtatttagcatttctcttggaaggaaataaagtgtaacagaccttcccaaaacataaggcacgaacttcaccgatgtcaaaccataaagatagttgcccaaagagaaaggaagcaaagggcttaagcgaagcagggtaacaactctgaagccattctctccaatagccttgtcaatagcaagaaactttttgtttccttcaactagtttgagaattctctcgcgagcaaaatatctagcaatgagaaaggcaacacttgccgctacctggaaagggttaacaatatataagccaaatcgtcagaacacatgtggcaggagtagtagttataattcctattaacttgcaggagaaactaactcactgttccgctgatagagacaatgattgtgcctattaaagagccaaaaagaagaccagctgacattgtcaatggaatagctggaattgcaagaacctaacaaaaacataaatcacttacattcagatgacaccattgaaatgaaaattaaagtgcatcgatcaatcactgtatttacatgagacccttaagtaaatattcaaaacaagtggcaaatggagcacacttaaaaggatgaatgcttaaaaagagattattaaggaatgagcatcaaatgcgtacttcaagtccggcatatactgctataaataaggcatatccagctggaccataacctgtttaaaaatcaataccaaaataccaaagtattaaatccataatccacttcaaaaatttcttcaaaaatatcgacatatctcaaaatccagtcaatgttgtatccacttcattcccaaattgaagaatttcaacagaatcgggtaaaaaaataaatgattgaagatcaacaccgaccaagaaaatcaaccacaaaattagcataaacccttgatagggtgcacaatttgttgattattaccttcaataaaagtagaaaattgagtcaaaaatgagttgacttggtccttgtagatgtaacccacagcgccaaacccacccacaacacccaccagcaacaacccagccaaaatggtccctttaagcgcagtgtccccctcggagccatcatccccgtctccgctatttttgtcgtctttgtcggactcggggtcactaaagagccatttttggctctggggaggactgttgggagtgccagtgttcttctgaagagtctgcttcttggtttgtttaagagaagaacatggcgtaaggaagtagaagcgcttattgggcctaaagctgtagagaaaagcagaaggagtgagggaggagaggcatggggacggtggcggcctaagggtgaggagagtgcgcattgtaagcaagatttgtggcgtagaataggatatgctgatagacaactacaacgagtgtcaccccatgtgtgagagaaatgaggctactgtttttggtgagatatcagaatggactagaagaaagtacatcttttttttttcgcaaggttattaaaaaaacacatcaatagttattattattttttctagagaacgactcttgatataaattaatgagagag

SEQ ID NO: 21344 - DNA, 4602 bp, Cannabis sativa
  modified_base (48)..(58): a, c, t, g, unknown or other
  modified_base (3789)..(3794): a, c, t, g, unknown or other
gtgtttattttcatcattttagagattcatatttaggatgttaaaaannnnnnnnnnngtaaatctagatcctagtaaaagatattccaacacatattacatatcatacaataccaacttttaactaggcacgcatacacctattgacaaggcttaatagatgactaagaacgttccatactagggtacaaccactataccacatacaccacgtacctcactctacgagtgttggtagggtttgttttgtaccctgagtaccactgagtgatataccagacacaccctatactttcccatacttgtgctggtatcaccgtaatgtactcctcaacaatatgcactataccaatgcactctgtaccgtaactgtacaagtgttggtagtgtaactaacatataagcatgtatatacttttaacatatacatacactcgcatattcatattacacattatacgcagttcttacctcctttccaaatttaagtgagttggtcgacctgaaaaaaaaaagtcttgtgctggatggatgtcctaatcacaaattaaaatcgggcaaatcacatgtccaaaaccctaattcgagaacccgaacctacaaatcaaggttctgttataatcactatggactacactatctcaggaaatagggaaacactcaactaaggcactgaaatggactaaaattgagaaaacaagataattggggaacctgccaaaaccggttaaccagttttacaggtactggcaaaccggttaacctgtttgtacaagttttccccaaaaaatcccaaacctgctaaaaactcaaccaatttaccaaactttctagagtacctaaaaaatttataattaacacattccaaccaataaatcctaaaaagacccactgaattcaaacatgccattaaagacctaaacttgagttttaaagttcaaacttgtgcaattccaacacgaaacactaagaccagctaccagaacttagaatcaacctaaaatgaatataaaaaatgatccataaccaaatcaaaccctaacagccctaattctcacaaatcactagttgaaattaattaaaaccttgagaaaaacatagcaaaagagtgtctagggtttaacttgattagaacctcctccaattcctgctgaaaacaaaaaaaaattagcaaccacctccttggtttcctagctggttcgaagagagagggaagggaagagagtgttctttgagtattttatatttttggtctttttcctttgctttactctaattgaataaaggttagcaaaattaatccttttctgaaattagaatagccaagtgtcactcccctcggcagccaccaaaccacttctcttggcgatttactaaaatgcccttaaacttataacttaggcattttcaagattaggggtaaaatgttcaaattttataactccgctcaatcccagtactctatttcctccaacatacataccactaagaaataaggttctagacgtacccatgtgattaaactagccatccatcgcattttccgttgtcgccgaacaaaaattgtaaaaagaacataattcagatataacacaaataatacacatagattttaataaaatctctcaaattgagaaattataactctaatagccatttctagcaatgggccccacaaataattaaaattcgcaaataatataaaaatatcacaaattagtgctaattgcctttacaaatctatattatgaaatgaggtcattacagtgagagtattagacttcagtcctacagaagcaagcaacttcagttccgaggactaagagacttatgattgggcaagactcccgtatcgtcgccatttaggggagttcctttcatgatggccttttcttgaggttaaggcttccatctttatggaacatcggtcaatcgagttgacaggccacttatcacttagtctttctaggttaggattcacgtgtcaaacttacaaaaacctgtataacatatttatatcttgactatatagtattacatatattatatatacatacatagtatatatgctctttatatctctactatgtatcatctattttatatatattctatatcatatatatactattagatatatatttttttatatagtttacatttatttgtatctttgtgttttgaactgtaactcttttttttatttgtattatgtgttttggaattgtaactctttatttaatatattgtccttataatattttgcttaaagttgtaattcttttgattttttattcatcttattttattcttccattgtaatctctcttttatttcttacattatatacataatgtcgtgcacaaaataaatatgaaagttttaaaaaaatttaaaggaaaaacatcaattatacatgttgtctactataagagaccctaaaagtaattgttcattaaatgggtgagccatcactaaacgctttagattcgccaaatcacatgaacaagaaagtttcttgttagattcccataggcacattaaaggttcttttaatacattctgttgtattatattatattgatgagtattgttattgggcactagtagtgcctagcaccttgtagacgtgtcgctttacgatttgttagcgataatccataaatgttattagagtaaaatatatgagacccgatatttaattgcactaatagcgatattggcacataggatggtgctaggcaccaattgtaccctttagcatttctctatatcgatagtagtgcatcagattatattgtattatattagtattatttaataaaatacaatatttgatacactactattattatattataatacaacacagtgtatttggtattgacttgtaatgatatgttctttaaaattatactatctttactataaacacatccccaaccttgatcatggccctagatcgaaaccccatccaaagactccatccccaaacctagggtttgagtccagtttttaagttcagggctagggtctggggctggggtctgggtctagggttttggttcgggtccaagtggtgtgttcaacgccagggtaactcagggtctaaggtttgggtctggtttggggctgggacctgggtctgattttggattcaattcagggtctcggtctagggtctgggtccgagtttgaggttgagtccaagctcttgggtttgggtctaaagttggggctaatgcaagggtcgggtttggcttttgctttgggtctgggttcgagtcggatctaagcccaagtttgggtcagatccaggtccgatttggggtgtgatccaaggccaatgtttgggattcatggtccaagactagggtcgggatccaagtccgtgttcgaggttgggtttgatagcctggtttgggtttgggtccgaggtaggggtcgaggactaggtgtgggtcaattatctagttccgatgctaagatctagatttgggtctgaggtctagggactaagtacagggctagactgggctggggccggggtctcgagctgaggttggggtgcatgtctaggatagggttttgggctaatgtaaagacagcatagctttaatttgggaattagcagataattagggcttaattatgaaaattattgattaatattgaattagttatttataattgatttatttgaattgagaatgcatttttatgtcacatatagaaatttcataaattttgcatgttttgtgcccgacaacattggaacgcggtgtttgnnnnnnagaatcacatcctagtatttttattatataagcacaataatttatacattgggaatgtcgggaatagtcaggattttataatttcccaaaatacccctttgttacctttagtggtttttagtatggaagggcaaatggtcattttggcgttttgtgttttgtctttttgtgagattacgcttagtttttaatctaaattttatttaattacttggctgtttattttagataaaactaatcattttttattcattttatgaaaaatcaaaattgagacaaaaatcacatttttttcctcaagctctctctctctctctctctctctttcaaaccctcttagagcccagccagtgtatgatttttcttcaacaattcaaagggttttacagctagtttcaagtgaatcaaagtcatggtaaagcctctagcaacttcctccttaatttcttagattttaagttaatagtttttgcatgaatttatgttttttaactctatagttgctgctgttgtttgatgttgtttctgatgttaaaatatggttagaaataatgtttagagctggtttggtggctgtatatgaggtttgttcaaggtttgagcttaagggctcaaactttgctataacatggtggattttgtttctgtgcatgttgaggtgttttattgctttagatttgttatatgtggtctacaaaacagttctggaaggtttcatatgttttggggttgatttaagagagttatgaaatgttggaattttcctgcactgaaccggaattctggtttagggggacctgtaggaacc

SEQ ID NO: 21345 - DNA, 2035 bp, Cannabis sativa
ctgttgaaccaaacactggccatttggtaggtatatttagaaaacaatgctttctggcccttctaatctttattgcatcgatatggattctgtttgaatcatctgttcttctatattcctcgtagcttggatgttaatctttgggggtgcatatttatctgcatctaataccaaatgataacagagggataatttgtctccctagttagacaaaacaccttgtgcttttataaattgaagcaaaatatttgttggtaatagagttttgaagtaagcaaaatattttgattttacaatagcattaacaatagcataattctttgtgtttttcttttctcattcacttctgaatttgaaatgcaggttgttttgtctagtgtagaggatagcccagctgctcgtgctggtatccaagacggagatgagttggtggaaattaacggtatattattttttatgcatctcacccttcttactatgtaacaaaatgaaatcatatctttagattgaatgaagttagaaccttttaactttatcacattgtatccagcaaactgtctgaagagaaattatactacagattcactttttgcttaaaacaatttcaaatgattttggtttgacttcaggagagaggcttgatggtatagacagtgaagccgctgcaatgaagcttagaggtcgtgctggaacaacggttacattaaaagttcaaagtgtaattttcaaccccttttttccgaagttatagcagaaatctggaatataatttctttgattcttagtcttgagcttaaccaattttcttgaaactggtttgggatggcatttcgagcatacaagtttgacttatgtcttcgtaaatacataattgtttcaactgacgatatgttatgttatgcagggaacaaattccagaaatgagtctccattaagagaggtattagaatttagatcattcatagtatatgggcataacctgatgaaaggctaatatgcctgaataggcatcttaaatctttgactctataatatttgtattttcatagtattaatcaagattaacaatttttgtaatgagatatctctttttgaaggtcaaactttctcgtgagaagatcatgttttctccaatttcaagtgctattatcaatcacataaccccagatggacatgtaacaaagactggttatgtcaagctgagagaattttctcaggtaagttaccatgcacaagggttttgaaccatgcaagtggttggttttctttttattattattaataacaaccataatacttataggataacaataagcccattatatacaagtccaaagaaaatgtaaaattatatatcaatattgcttgtaatcataggcatagcctagtgatacgacgacacctttaactgggtgttcctaatcctttcatgcgacttttgacagactgctgccccggacatggagaatgctattcatcaaatggaagatcagggtgtgcattcatacatattggatctgcggaataaccccgtaatgttttctgtttacatttccacttccatagatagaaaatcttgaaaaggttttatgtttggctttaaacatttggtagcttactctgctatatgatcctgttatttgtgactcaggggggactagtaagagcaggacttgaggttgccgaaatatggttagacggggatgagactctggtcaatgcaatcgatagagaggggaatatgcaaccaattaacatggtcaatggacatgctataacccatgatccacttgctgttcttgtgagttaatattcaaactgttcagacaatataaactccttctcataatatgttttaactcttgattggtgatctggttttcgtcatgtcaaacaggtcaatgagggaagtgcaagtgcaagtgagatcttggcgggagcactccatgacaacggcagagctattcttgttggacgcaaaacctttgggaaaggaagaatccaggtattcaccaactgtcaaaggtccttgttt

SEQ ID NO: 21346 - DNA, 4135 bp, Cannabis sativa
  modified_base (58)..(58): a, c, t, g, unknown or other
ctctctctctaatctaaaagtctgatttatatacatatatctatctatctatatatanatatatatatatatattcaataatcattcatcataattgtacgctacaatccacattatttaagatcatcatacattttgaatgaattattaatatcgtacctatttataatgcttcaagatttagttaattagtctcatacttacacaaaatattaatacacaagtacgtcattttagctactttctaaaaagatagcttatacgttaatacaagtctttctaacgtattttgtcatcactcgcacggaacttgagaaaacttcctagtaagtcacccattctaaaattgttccagatcaagtaaatttaacttttgagttcttcacttaagaactcaaaagttaatcgtgcttaacctgaacaatcttactatcttaagatgggtgattttctgaaaaattttcctaagaaatgtacaattaaagataaagcatattggaaaaatttgtattgatttataggatcagtcgacatttcaaggaaccaaagtacttatatatatattgtataaatatgaaactagacaactgttacgctatttgatcacaaggaattacacacgtagagattagtctctttgggactctatttagtgttaataaatttgcaaagaaacattaactcaagtaattaagtgtgtgagtatgcaatctattcatgattcgaattccatacaattatgcttaataattacacaaaaaatctagtttggtttccttgtaaaataatctacttgttttcaaagctttcatcacgtaatctaacacattagagtaataatatatacacacataaattacatataaactaaccacatactgatatgacaaataattttaactaataatatttatttgagatggatcccaccaattaataataatttacaacatatatgtgtgtcaagattgtacatgatatacattttcatggttacacactaacacattacacaagattaaatgtgagaaaataatgaaatagctatctaaactatatccacttagtatagtattgtatgaacacaagcattgatgatgtcattaagaaatacaataaacatagttagttttggccatgtgggtttgtaaggaaaagagaaacaaagaaatggtttaagagaataaagaatgatttaagattatgaatgaggtatataagcctatgtaccaaaaccagctaaaaagaagattagatggataaacattaataattagataagactccacagtcttataagcttagatacagattggcaataatggaattattgaaatgagtttttctatatcagaaaactattactattattagtactacttactcatttggaccccacttataaaagaaaaatcatcaaaggaactcagcgagatttaaggatagggtctcactctcatacctggtatgtgccacaacaccaaattataatataagaattgacaatgaaactgttcttcaatggaaactgaaagaaattatatacatgcaagggacccatctgactagccagagtggaaatgaccccatttcaattgatcatgactagtactcatagcacccccaaggactaaagtcagtacctacaagaaagggccctcagattttttcattgaaatgtacttaaatagaaatatattgaaggtacatgatgagaagtgatgtagtctcaaaaccatgtttatgaaactttatggaaacaaaagtaattaacttatagataaggtgggttatagttgtttagaagttgaaactgtaatttaacaaggaaaacaaaagaagcaactggtaatttctgatgtaccaaaataataacatttaactttagcattgtattatcttggtatgatatcgcgaatcgcggatgatagggaagttctttgtccatgaaaatcccttaaaatttgttgtgttgtcctttaccagacaagagaaatgttcatgaaatgatttgtagcactcgatgactttgaatttttactcttaacttaagaaatatagtgtagggcaatcaaattcatcttttaaattttcaacattagatcatgaatcagaatgtaatatcagtaaaattttgaggccaacaacataatcacactgtagttttcattaaccaacaacaaacataatccatgatgatgaagtacacattttctttcattaaaagagaatggccaaattatgacatgacagaaagaatagtaaagaagaggaagaaaataaaagagagtgaaactatggtttattccattgtgttgagtttattgctaatccaatttgaggaggaaaaaaatctcaaataccaaaagagaagtgtggtgattaatgtacaatcttactggtccgagacagatttcgatagttgattttgaccatcgagcaatcttaactgtcgcttaagcttagcaatatgaacatgaacctaatacaatcagggagaagacacactgtcaaatattgggtctaaccatttctacaattgatacaaacttttttttccttttcattcagcaacaaatttactccatgatgttacaataagcactgttcctgtgcaatgatacatggtctgaaaatgagaacaccccaccatacttccaacatttggaatctataactattcaatttgacttacttttggataactcaatgattgtagaaaagatatatacataataatgataaaaacccaagaagctaaagatctccttaaaactatactaatatcaagagcaaggattgatatgcagagtctttgttttgtaaaggaagaaacttttcgagggtggcatgataatatcaacagcaaggattagccaaaaattgtttcatgcaataaccattaaaggtcgtttcgatatagtgaaaagttcatgacaatggacacatagacatgggaatctttagtgtagtttccatcaaatcaatacaagttaaaagtaaaagaccacatttatataagcacattgaagacaagacaggcaggtgtgatggttgatttgagtaagctgtatggaacaaacatcacatgcaaactcatgaaacaattatttgaatttaagcagtagctattctcctctttttctaatctctgtttaattaaagggcctactgcattactttgctttggtcaatgagcttaatcgtgtttcatttgtcaaattcgaccactacaggatttctcaatgctacatctaatgtatacagatatttggaaatgttgagctcttatgttagttggtttaattgtataccgtacggcttaaggtcaaaagagcaatgatggtagtagacactaatgattctaacaaagactaatacatcaagtttttggtcagtaatgtgatctttttacagatgaaacattcaaatgcataatcattttaattatttgaagaagtgttattatgacttgaggattttcttttgactttgattacagatttcatcaaactgtttttatcatgcaagagtctcattttctactcttctttagactattactaattgtggtctgctgtaaactaatagcataaatcaatcaaccttagttactagacaagtcaaccaaatttgtagtgatatcttaagctctggctactttagaaattaagtgtctcgggttttatagctatgctggaaatggattggatatagattagaacttcctaaaatgacgaagaaaaggatgttggttgatttgaaataattatatgaagcccgaacgaaaactctctaaagtccacttataaggattctcaaacatttaaactcatgctaagcttgtatcctttggatggaaagcaagtattaagattcagtataataggaaatgcacaaatgattactaactaaaacccaatattctcttgtcatgagatagtgagcttttttctccactatattgtttcctatgacaaattgattatggaaatacaaatgtaacagagtagacaactgaacctgcttgggctacaacaaattggatactcaatgccaaagctccaacacttgctatacatttactaacaagacttatgcataaggtttgctcttctaggttattaacttatta

SEQ ID NO: 21347 - DNA, 2603 bp, Cannabis sativa
ttgtgattaaaaaattaaaaaaataaaagtgttaccaaacggcaccttaataaatcaaaaagtgtgggactcgatattatattacaccaataacagcaggtcacctcttgcggtgcatgacaacttaagatattccttaatatttttatttttataactataaaatactcatgagaatctttttaggcccccaccatttataccataagaaaaagagttagaaaagagacttcttcaacctactaatcaaacttcttacatgcaaaaaaaggctccaccaaatatatacaaatacacaatataaaggttcaaaaagaagattattgaacatgtttagcacgatatagaacatttttaactttaactttcatcatacaacattataaaaatataaactattcactataatcctgtatggcatggtgaataaacaaataaattatcaacaaatagactccaaatgttgtttggccatcaaaatttagaaaaaggcatagtatccaaatgaaaatatcaagaatatttacgacaaaaatactcgatgtttacagaatgtaacactaaaatatcgaaagttggttaaatgtagcatttaaatacttagaataagtgttaaaatgttgaacctttactactcaatatcttatgtgtaattataacatggttttgttgaccaagatctcatctaaatattggtcaactgtggcatgtttccagcctagaaaaatgccaagaaatcccacaatattattagaagagcctaatctggatttcccacagcagtggaatatgcattaagaaaagcttagtaatgcaacaaaataaaataccttaatttagaattctatttttgatacaaaaattgtaagataagatttccagaacggtttaagttcagataaactgtacagatcaagcttaacatttcactgacttccgcaactgttgttaagttttattttaattttccaaaatttcggtaccagctgcatttgtcaaagatgttgcattgttacgcgaaagctaaagaggaaaagagaagagatagggaggaatgatgcttttacctgtttcgctgtgtgagtgagccatcggtatatgcaaccgattcactattttgatgcttttgtaagttgaagctatgctgtttatcttcattttttactcacatcttgaatgtgttgagagtaacttttaccgggtgggataaaaatcagatcttcccagccagagttcttttcgctcgtctgcatttgatcgaaataaagttaaactaagctgtgtctttaatcaaggactagagaaatttaatcaaactaagcgccaaatacctccatttttcttaaaacgtcttcgagactaccaacctgtaaacacaatttaaaatatcgacatattatgagaatagtctaatatgagcaagtaaaccaaatacattgtgtgcaaatgatgagaaaagttaaagcaggtgttagtaccaagatattttgagaaagccctggtcctcttgatgccctagagaccttactgagctccctttctatgtcttcctgcattgatgtcatatatttagcatctagcgaatgagatgttcatgtatgcgacaacaagtgttacgttctcggttcttctgagtacaattacaactagagcattattagaaggcaccctatggtatacgtcattggtgcaattaagcttagtaaaatagtgatatatggtgtctgacactaatggtgttttttagcatttttcttacaactacgagaaaacagagttgtcaaaacaaaccttagtaaaatatattgggcaatatcgcttgtttttcttcttcacaaccagtaggtctgactgtaaacagaaacatttaaagagataaagttataaaaaaaacaaatggcgattaccttatagactgataagataagataaataaattagatgtcccgtgatggatacaattaaaaaaatataaagatatttgtataagcagaggtaaatttctccatgaaagtaaatgttgaaaaaaggaataaataaaagtgtataaaagcatttatatataatggatagagcaactgtattaaagcaagatactagattcaacaagtgcagtatacctggaaaataggaactccatcaaatccatttttgcggtcagttgatttgagctataaaataaagataattgtaaaaaaatattaaattgtatcagaaagcagaatacaatgatcagacagtgaaagataaaatatatagccaaattctgaaagcaaatacaattcaatgaacagacacacacaaaaaccttagaaagaatattacaaatgctactaaattgaaatgatgtggtgcttaatatttatctcatccaaatacaagtcaaccaatacttttccgtacgagattagagaaaactaacctccagagcattttttatctgaactggatcaggcaaaaaccgaaatgctattccttcaaccttcaacatatatacctacatatcacaacgaaaagcattagagcatatgcacaggtttctttgtaattccacctgtcgaagttaacgaaatttaagtggataatcaaaatgcatatagact

SEQ ID NO: 21348 - DNA, 4206 bp, Cannabis sativa
ggtaaaataattccaacatgttccttatcccggatgccgaactattactctgcagtggcaaggcagtataataaaaaggttaaggtcagaaattttctcccaggggagttgattctccggaaagtcttccacaacaccgaggagtcccgggcgggaaaattttccatcaactgggaaggcccataccgcgtggtgcgctcggcgggaaaaggagcttacaagctggctactatggatggagccgagatatcgagaagctggaacgcaaggtatcttaaaaagttctacgtataaaaactataactatgactacaaccttaattataactgtagctatgccttgttatcatgtgtataaaaaaaagggaaggatggattataaataatgggatgaaaagtttcagtccagaccatgcatatctaagacctttcacgaaaggcaagcgatgaaagaataaatgagccggattcacgaatataaggcggcaatcagtgactaaagcatgattagaaaatgagtcgctgccacggagtaagacgacaccaaagtaagagttcacatgaacttgaaatttacatggcaacacttaataaagtcaggagaaaaagcataaaaacccattggtaatggtaaaaactaattacatttacaaaaagccactcccccgttatagcatgttcgaagttttccactctattgggggagtagtggcagggcaaaacatcatgcatgggcaaagatacccataccaaaacacttatgcaaacttacaaaaaatgcaagttctaaacacacgaaaaataaaattaaaacaaatcagccctctacacagaaaaactttcccgttgctgaaaggttcttcgcattgcaatccagcctcggcagttggaagaggtaggaggacgtataatctcagaaaccactcagggtgactcctaaggaaaggaagaagcagatttgcaaaaaaccgacggtgaatcgtcagtttagacagacttcttcaaggttctcagattgggcagtagcttcaagctctggataataagctgctgtcgtttgagtcaaactcccctctgacacctcgggatcttctttaacctcctcgataggtgccaaaataggaggaaaaatggaaaaaggacacaatgccaagggtggcacaggctcgacaccggaagaggcataattccctaatcctaaagcagcttgctcaaaacagggacagctgcagacctccgagaagtgtaatgggggaacagggattggttcgaaatcgtgaaagcttgaaaagggattcagagaaagaaaagaagggtccagaggctacaagcttgagaaaatgttagaaaaggaagagtggtcttttgtgttatgtatctagtcttttggcaaaaaggccatagtttgaaaggaagaacagagtacccttggaagaaactatttaaacacaagaaagtctttgaagaattttagaaagaaatggcaaggttacaacgtatttataaacggagaagcctgcatgcaataagtatggatgccacgagaacgaaaaccaaaagccattgcgacattaaaacgaggatatatgtcaatcaaatacatatacccgaatcacgaaaagcagctaaaaaagcatatatgtctttccactttccaaggtacctcgtccattttttaataaaaaagtgcaataaattaaagtaaggaagtagtaaataatcttaaaaatgatacttgtttaaggatcgaagcccaaaagttccattttttcggagattacaagacaaagattcacaaagtctaaatgataaatactataatatatataataatacgtacacacgtatacatgaaaaaagctacaagtaaaaggctttcgcagaaagcctgaggatcaaaaattctcacggttagggtgatgccagcaaagaatacataaagagccagggatcacaatgaatcccagcactaccctcttcgagcactgacgacagcctgtaggaaagccagggggtagatgggaaccccctccctcaagccttctttcatccgcctttcgttggccaagtgctcacgttccaagtctgcatcccaggcccgacggttcttggcttgcatacgacaatggtcacgacgacgctcggcgcgcaatcggagagcgtgaaactcagcaggaactctggttgtagctgaaatataacgttacgtccctcgttctcaaaagagttttgaagccactcctcgtcagaggacgaagatgatcatcacgcctagcacgataggcccgcatcattctcccaacaatagcctcaccaataggtcgatagcaataggaaaaagttgcagggctaggaggagatcgatccccaatatctgagtggaatttatctccacttgaagattgtggaaggggggagcctggagagtttgacatgtttttagactaaaggaagaaaagagggaagacacgtataaaaggaaaacatagaaagtttaagaggatggtacaaacaataaggaaggatgcgtgtataaacaagcttaaaaggagagggaaggtggaagggtaaggccaccagtaaccaaaatattaaattccagtaaataaacacccccaggtgtcgagacgcctcgataaaagaccatacacatataaataatgataattaaggcgaaataaatgaaaaacatcagtcaaatattaatccttacaaactataaaataaatattgttcaaaataataataataataatagtaataataaaaaaagacggggatggtaaacaaggaagaaacattctccccaaatttctcaggccccgtcgacatcctcatcctggttggtctcatccgaatctgaggaagactccacaagatcctcatccttcttaaactcagcatatttcttgaagaactcgtccaaatcccaggaagcagatataccttctttaaaatcagagtacaacttgaaggcagactgataacttccactaagaaacgccttcttaacttgactagtcaggaccttgatctcttttgttaaagatcctttttcttctgctagagttttttaggcctgctcagctgccttcccagcttcgaacaacttgtcatttagagaagagattttctccttcaccacctcggcctcagataggagggtatcgtgctcttaagacaaggcgaccttttccagtctcatcccggacaagctagcctctaaggaagcaaccttgttgctcaaaacctgcttcttagattccagaacggagcgggtgagatcccaacctcttttctccgactcgagaccgtcatccttactcttcaagagcttattatcaacttccagggcgctaactttagtaagagcggtcgccttcgcagcaacgaccgcctcataattcttcttataacgagaatagcccctggctaagctttccttctccctatctgtctgcggggcaaacttcatggcatgggcacaccttaaggccatctgatgcacatatatataaaaaaaacacacacacttagcaaaggacaaaaaataaaagggaggaggataatgtacacttgagaaactacgttaattccctacatagcagtgtccttcaaaattgaatcccgtctttgggaaatatagaaatcatcatcaggttttctgacggcattcaaaagagcttttaagtagttctcggccgactcctcaaatgggaaatctttctgaatcctaaaagcaggaatttcgtcccacttagtctgggcacgtggggaatgggtagctaaaggtggggaacctcggctggagggaaaagttgagggatgcactaaaagaggagaaagggcaagttgagaagacgacggagcccctagaggagagagagaagtctgagcaggagaagtaggcaaagggcccaggttctagcccaaagtagctgttgaaagattcttggactgagaagtccccctagggttaggaagttccgtcgggaccaagcccccaaaagttccctcggcttcgccagcacctgacgtaatctcggggaggacattgagcagtgtcccgatggcctcatctgtggctgagtcatgctgagatgacatgccaaaatccgactaattggcctcctcaagcctcgcaactctactcttctttgctttacttttacattttggagaatttgtgtaaagaccgcttagttt

SEQ ID NO: 21349 - DNA, 2396 bp, Cannabis sativa
atatggctcaatactttcacatttaatccatgtgggacaatattctccaatacacaataacaaatttagccttcagatccaacgtcgtttcaaccgccaagcagcaggtcgccgcttcgccacacaatgcatcaacgaagtctagcctggccgttgtaatccgaatcaccctgccaagatgatccctggccaccacagccgaacacatgctatccagccccactttgatatcacaattaagtttgatccaatccggtggagggggcctccactcctgcaaaggggagggactaggaggagggaaaatggtagcatgcatatctaccaaagagttacaaatagaatcaatgcatctgctaacatcaactggactattattgtgtaccttatcattacgtatcctccagatggtgtcaacagtaatcgaagcatagagaaaaacgtcatctgcatttacacccttgtccttaaggtctcaaatgaattttacctagtcccaaagccgaataccagtattacaaactggataaatatcccagggggaagatcgccataggtggaaagccacctcacatgagaggaataggtgttcaaaagtttcctcccccctcccgcatagaggacaactagtatcttcaatagggaattttttattaatctcaaccctaataggaagggctttggacaaaatacaccaccaaagcatcatatgtctgtcaagaactttacaattccataatttattctagagagaaggaacaacctcacacggaggtgctctctccaaaccttgggttaggtaagcacacttacatgagaacttgccattccgttccagagtccaagcccacctatccctactttgtccagagggatgacccccttttaaaatagcagtaactgtttcttgattaaacaaagcattaagtttactagtgtcccaacccttttaactgttaataaagttatatgataaaaaaaaaaaaaaaaaaagaaattaataggagtgctccatacaattttggtaggcaaaaatataaaaataataataatattttttgtaaaagggataccgacaaagacggtgtgacaacgtgcgagattgcaatttagcaaaaagagcacctgaatgaatgggaagtactctatcttcctggaagcaggtcaattaaattatattaatttacaaaagaataaacaaaaaagaaccttataattattattataattgggaattgaaacactcactttcatttaccaaaataccctactctgacttttcttactctctctacaaaaaattcatctaattaaaatgtggtgaaagcgatactaacacaaccagtgtataagatgtaagtttctggatttaattttaggttttctttttcctttatagatttttcttttgggtcatttagttgggagattgaactaaatttaagatattttggactcaagtgtggaaataaactttgtcgtcttcacgggagtagttatggtgctctcatgactcgtgacttttctcagttttaattatatatacatgtgccgtgtcttatatatatctttgtgcttatgtaactaaataatatatatctatatattcttttacttaaaatttaacccatcatatgtataatattatatttagtttaaaacataattatgtaaaaaaaaaaaaaattacttcacggtaaataaatgcactaattgatattttttttaccataaacaaacattatagtgtgtcaaattgtcaatatatacttactaattatgtatatgtataattttttattttattttttggacaaacaattatgtgtaagttttgtatccatataataaaggttagttatgtacatactatacatggaaacaaacatgatcctcatgaatttagaaaacctaccaataccaccatacatttcaaactttgaacaaaaacgaataactaattagaattttgttatcattgttatagaaataataatgagctagcacaattaatagcttaataataatttcagtagaagaaaaaaaaaatgactgtaaataaattattagctgtcctgttgtcttataaggttaagtttctgtcgtatttcctcataggttagacactattggtttttaaccgtagctataggcatcttgacaggaagctggtgacagccattcagaatttataattaattcaccattacaaaacattttaatgtattggtaaagtttatttacattgctaaaaataactatctattttcccatgtaacgtttggtaatgtttgggtatgaaaaattactatatacgtgatgtgctatttctatgttcaaaaagtttatattatatacttaaaaagtgtgtaaattatatacatatatatatacta

SEQ ID NO: 21350 - DNA, 4789 bp, Cannabis sativa
aattcgaaataattaacaatattaaatttaatgttcaaacaatctattttaaactataaattttttaaaattttgcacaatgtttaaaataactacaacgtatacgattataaaaaaaatatacactaattctttttttagataccgaaataaataaaggtgcatcgatgcacccctttcaaaagatgaattgtaaaattttcctaaattatagtttgattggttgttgctttggaactaagtattagttttgtacttgttgggccttgtacacggggctcgtcaatcattatgagttgtttaagttagaattgccatggacttagaatctcagcgattgttcgattatttaaagagatagtttctcaaaagaagttcacttttatttttctttgtgagacactttgtgatgatactcgtgtttcaaattttgatgtgtaatttagtttttgaagagttgttctcggtggtagctacggcggtttagctttggtttggaacttagacaaggaaattgaaattattgactattacacgaatcatatagatctcatagttcaagtggttagtatggaggagtggagattaactggtttgcatggttaaccaaatatgagcctttgtcggcacacttgggatctcatgtgtactttgcgtgatcattcaacacttctatggtacttattgggtgattataataatgttctatcttagggggcaaaaggggaggtaaccttatcctacttggttgctcaatgggtttcaaagggcgatagctagttgtgagttctatgagcttgagctctatggtcatcaatttacgtgagatagaggcagggttcaaataggtgggtggaggtcgtcttgatcaaaattttgtcacctcgacttggatggatatttttcactcgactatgctttttaatttggattttgcttcatttgatcattgtcctcttttgctgaacctagtcattcgggtgggggtagaggtaggaagatctttttggtttgaaaatgcatggttaaaagaatccatgtgtactcaaattattcatgatgtgtgggagtcttgtgttggtcaatctattcaaaaaaagtaagattttctacttgtggggagcatttgttacgttgaggtgttgatattagtgaaaactttaaagcaaaaattgactaagtagatcatgtagacttttagttgaggaaaaaaaagaacatggctgagattatagatcagtgtgagattttttagcataaacgatctaaatagttgtggcttaaatttaaggataaaaatattaaattttttcatgtgagtgctacttcttggcataaaaacaatttgattcatatgttaaaaaatgaggttggtgaatggtttgatagggagcatgaccttcttgatatgatagttgattatttctttagtatttttttctttatctcaagtggaccggggaagtcattgattatgttcagccatccatttcttcgttaataacgttgagttgttaaaatcggtcatagtggatgaggtcaggacagctttattccagatgcattcagataaatctttggggcttgatggcatgactcaaactttttatcagattttttggtcagttgtgggaggtgatgtggtccaaacaattcgcgactattttactttgggtgtgatgtcgggtaatatcaatgatacaaatctagttcttacccttaagaaaacgcaatcctatggggatgagggatctgaggccaataacattgtgtaatgttctttgtaaagttatcacgaaggtcttggctaactgtattaaaatttttattaatcttgttatttatgaggcttaaagtgcatttattctggagaggttaataacagataaaattttagtttcctttgaggtgctgcattatctaaaaaggaaacaataggggcgtgatgattttatggtaatgaaactaaatatgagcaagactcatgatcagagagtgcaatttttttgactggaattctagagtcatttagtagaattggttttagatagtatgacctcggttcgttataaaattacacatagtgaaaaaggtcttaagtactatggccacatccattacactcgagggaatccaaaaaacctagcattagagagagaattaaactaatattagacaccaaataataatattaggttctacacataacagaaatgaatgttggtatgtaataaatgtctgtttttgtgtttacttcataaaaaaaatgtttgttttgtgctttatttgccaacaattaattattctaatttctgaatttaatacatgtattatgactaattatatactatcacgatcggtttttatattaaaaataatccaattttatctattttttttattattttatataaaatgtagagattctttttgttttcttctatctttttcatataaaaaagtattagaaattaaagatatatttaattcaaatacaacacacacaacatgcatttcatgactatttttttaatgatatccgagccataatgtatgtgccaaaacgaaacatttgcacatgtaacacctaaatatgcatatgtaagctcaaaattatttataacacattatcttaccgagaatatctacaaaaataaataaatatataaataaatttatttttcagaataatattataaattgttgttatctatcctaattcttttatttttattaattgtgttaatattagtttgtttttatttttcacacaattttactatactcttattggagcttaaaatatagaaaataaataaataaaagatattattttataaatatacaaaaaatagtaaaaattttacatttttacggattttattttttttcttacaaaaatacatagtattgcttttttgttgtttttaaaaaactattattttgatttaatattgctgttactagaaaataacgtaattttttttttacaataatacgaagtgttttttttagaacaatgttgctttgacgtttttttttatgggaaagcaatatttttttctaagaaaataagtaaaaatttgcaaaataaagtaaaataaaataaaataatctataataatgtaaataataatagaaaaaaggttcgtaaaaatgtaaaaaaaaattcataaaaaccaaaaaaaaaatccatttttagatgtgtggtataaatttttctaaataaaattcaatgtgctaatagttatttgtgggtcaattttatttttattctttttctgttttaagaaaaaaaaaaaaaaagatgcttgtttttgtatgaataaatactagaaagtacatgtatatattttttttgaatgaaaatatcagtattcattaaattaagaaatctaccaaaaagaatagcaactatctaaggagacaaagatctctccttatagtacaacttggggaaaaacaagaagcacgcgcaatgcaacgagcgaccttgttagcagatttcttaacgaaacgtatagaaatgttattaagaaagcaaaagactattacaatttgaaacaattaaatcaaactgagaaggtaaagaaatagaactagacaaaagcttgaacatacattaaacaatttgtctctacaatcacattcgcccactgatgatgatcgatccaactaagcactttcttgataccaataatctctctcatttcaggttgaacacaacccacccatcccttattaaatgcctccaacaacctgccattagagtctcgggctaaacacccataccaaactatctttcctgctcaaaaattgcacaatcaacattaaccttgatttgagagtaagccggtgaagaccaatgctcaatgactttactatcagccgaaactaatagtaaagaatctccttttttagattgagcatataaaaattaatcatgaatacttctagctgactgtacaaccgataaagcaatcgaagattttttgttccaaaccactttgctacgagcttcccaaattccccaagccaccatatctgcttcttgtaacatgacatcacccacattacctaaaagaatcgaccaccaactactgaaatcttgttcaaaccagctactgaaagtacatgtatatttgttacgagggtagagtataaaaaagtaagttttcttagagctcttagttttattttctaacaaggcctgctgacttttctgggcttaggtgcagcttggctggaattgtattttctattatcatttgattttttgctgcttcaattagtcttgtttctatgacatgattttattaagtgttttagttttatttctgtgatatagttttgagtattttagtctgtgtctgtgtgacatagttttgagggttttagtcttgttcatgtgatataattttattttattttgttgttggttcttctttgttcttcaatgactcaccattaaattattgttagtggttaggaataacaagttttttacgactaaaaaagttgttagtagtgcagtttcgtaccttacacaataattgagtgctcaagttacgaggttgaacttgttgcaaatttcctactgttgtatcttctgagtggtggatgaaataaaatataagtgttcttaagattaattgtagtattacaatttttttcatctcattttttttttattaaacgatatgagaattaagtgagtggttatttagtttgtatttataattctaatgtgtctctaataatgaatattaaattgcaaactattatttta

SEQ ID NO: 21351 - DNA, 6306 bp, Cannabis sativa
cacagttaaatgttaaatatttacatatttattatcataaaaatataatattaattagaattgtaagttgattttcataaaaaaaaaaaaaaaagatatataaaggataattacataaaatattatttttttttgtaaatattttacattataaaactcttttttttcacatttttacaatgttgtataaaaataataaactacataaaagtaatatgaaaataatattaaaacaacaacaaattaacaagaatacaacataaaaatacatcaaaagattgtattttctgaaaataaaatcataaatatatttaaaatttgcaacagtatttttgtaacttttttgttatttttatgtatttatgaaattaataagaatacaacataaaaataaatcaatacacatattttttgtaaataaaatcgtaaaaattataaaaatatttaaaattctgtgtaatcatatttttgtatttttttttagtgtattcttgtatatataaagagaagttattattgaacattaaagagagaagcactaacaaaaggacaaggagaagttttgaattttcactatttcttccactttgtaagttgtatagaaaaagtaaaaccacaatgttaatttcacaagacaatggccattgattaattgaaagaatgtaatgtggttggtatacaaacaaaaacacaagggattcactccactcactcattcactttgtcttggatgcatttctctaagtactcattttccttcctaatatcatcaatatcagactgtagtttgtctacattgaagcttcgcgatgccatggctgcaagcttcttttcgtgttccaacacctctcttcgtattctatcagttgccagcattttctcggatatttgttcaaagctctcgttgatgcttgtaaggagcctatatgcctgccttcccactggttccttcttagcttccctgcatagaaaaaacaagcttctcttttaagtttaacacgaaatgacatcgattccaccttcggtaaagcaaatgcaaatgttttacctgaaaactatctcatcaacgatagcataggtcctatgaagacgctcttggatggaattactttctaattgaagctcccttgtatcttttaagattttctctatgtcactttcttgtttcctgctgttcttggttatttcctttacccgatcgatgtacgatttccttgatgccactttaggctgctttgcaagttctttcgaaagttcagagagttcatcctttctggcataataataaatattacattaaagggactttcagcacatacatcattaatatgttcatattgcaggaatttctaacctcttttcaatttcagataagactgtctgtatttcttgttcaatccctctcagcttttgaagattttctttggtttcggggttatttccataaagagaatcttgaagacttctcttttcctcttccaaaggctttttgagatcttccctgaaaacatcatttacgtgttgatcaaaactatgttatcatgacaaagctaagcatattaacagtgcaatcttaccattgagagttcaactctttaagatgattccttttggactctattttctcctcgagttgctctcggtgaaattcaacagagtgttggttatcatcaaataccatatctgcagacgcctttagcaattccagctcttcactttgtgctttttcaatctaaaccataaattcaaaactcatcaatctaaaacatccacattgactttccaagctttcttatttctacacaaacataccttagaacaagttaagatctggccagaaaccgagccagctacatcctctcttccaatatccaaagcttcctcacccgaattcgcctcactcctttcaatattcagttcatttgtgttgaattctccactactagagcttgatacaccgtcaagatcaactatagcctttgtattaagagattctgctgtttcgttcaagtgaggtgtaattttctgattatcaacatccactccattgtcatccgaattctctacataatcctctaaatagctttcaaacttatccgtattcacttcagttctctcaatggagtcgttaatatcaccaattcctctaccaactttggacgattcagaaagcctctccaccagaaatctgatcaacttacacgaatcctcttcagatggataaaggaactgcctatgcaacgcatataaatagtctgtaactgagcataatttccaatacaaaaatatgaatacacatacacaatatagcaaaaatagccccttataagggtatcacttttggtttgtgaacatgattatgctaaattaatatgtcattattcttgactttttaatttactcaacactcacattcagtcacatttatgttgtaaaacttagaagttcagctctattctgtaatacaaaagagataacttcttccaaatggtcaaagagaataaaattctgttataaaaaatagagtcaaatggtccaaaccacgactaaatcaacttaaatagtagtttggaaaagctaaccaattttgtagtgacagacatctttaccattgagggttcaactcttttaagatgattcattttaaactctatcttctctttttcaactcttttaagatgattcatttaaactctatcttcctaagaaagcatactaaatttccgattttcttgccaaacaaacaagtgcccatatgaccaaattccaataattcagagttaattaaaacaaatgtgttgataaatcataaacctaacacatataatctgcaactgagcataattttcaatacaacaacatgaataaaattatacacatacacataatacatatatggctactatagacccctataaggctatcatttttttccctaaaaaagtaaactaacattccattttctagccaaacaaacagaatacccagataacaaaaatgccaaaatgtaatataacatatatcgtattcaactaagcataatttcaatttcaataaagtcagatttttttcaaacaaagttgactaatttcctattttccagccaagaaaacacgtgcccagataaaaatccaatatttccaaagccaaaatcaaaaacccaaaccgcacctgatgaaagctaatatcgctaaggtaacccaaattcctgacactcaaagcgagctccgtacaagtcttgaactgatcggatactgagtcaggaaacgaggtgggaaacgacgccgtttggtggatgatattgagagactgagctgagatggagaccaagtcggagggagtgaggtctttgattgaagaaatttcgggtgagagatgtaccccagaattgatgatggatttgagaagtaattgctgaaattcatcctccattgttgattagattgatcttcttgttgttgttattgagaagattttggattttgatgaatgaattttcttttcttctcctttgttcgtcttcttcgttttgtgtttactgtgaaaaaaattatagtgttcgatgaaaacgagtcagagaaggggaaaacgacaatgtttgataaaacaacaaaaattattaaaaacgacaatatttgataaaacgacacaaattatgtgaaaataatggaaaaacgacagtttttgttggaaacgacacaaattctagatcataatctgttgaaactaaaaacgacaataattctaataaacgacacaaattatgataaacgacaataatatttgaaaacgacaggttttgcaaagaaaattataaaacgataggttttgctggaaacgaccataatttgtcaaccgcattgatgaaaaacgacaatattttttataaacgacacaaataaagataaacgacaatattttgataaacgacaataatttatgaaaacgacaagttactttataggaaatcaggaaattaagaaaaatgataaaaaaagacaggttttattggaaacgacacgacttctaatgacgactataaattgtcaaaaccacaactatgagaaacgacaataatttttagaaacgacacaaattatgatgaacgacaataatttataaaaacgacaagtattgtagaggaaatcaagaaaataaggaaaacgataaaaacgacaataattatggaaagacagaaaacagatgcctatgaaaatcttaaaactgatagattaaccattataacttttacaagcataaatttatataatataataactataattttttttgtctagaaaagaaaagaaatcgaaaaaattaataaaaataagtgaaaatttggaaaaacgacacatttcataaaaaaaaaaacaaaaataatagaaaaattgatgaaaacgacaacttctttaaaaaaatgataataatcactaaaaacaaatgaaaacgacaactataatgatgtttttttttgttgaaattgtttgtttataaattttgagaaaaaactaattaatgatatgttaaatttcgaacaaattttatattcattactaatttttttattaaagacgattcaatttttaaaacacaataaaaatgtaaatgataatacttacagactataatattgtaaaaacaaccattaatttttaataaataaataaataaagaaattttaaaaaaaaatgacaggttttataaagatatcttctttttattcacaagtgagaaaatactaattaattacaatttacatttagaccttaaaactagaaataaaattaagaaaaaacaagtttaagtgaagttcaatccaattattataattattatgaataatatagtcatgttcttggcatgtctaaaaagaaaaaattacaagggtgtgtgagaactaaaaccaatctttttccttataatgccaaataaatattatataattatttataaataaatttatagatattgcataggaagaatgtggctaaccaaaccatcttctgcatcattataataaagccaaactaattatggttcttatttatggatgattaattccataaaaacaactaaattagcttcattaattaagctaaggatggaaattagaagagaggatgagattgaagacatgtctaagcaaattgcagcaaccaatggatttggtcatagcattgagttcatgtctcaagcttatcttaggaatagtaggtactctgaaatcgatatcgaagatcatacttctaaccacactaaagaccgccctcttcccgtttttctcaaggtaaaataattaccttcattgatctttcgttcttctattctctttctcttgtttaatactactgatatgagataagtatcatgttgtaacacactaatataaaaataagtctagtaagacaaaataaccagggccggcctggagtaataatgggcccaagaaatttattaagtgcgtgttttatctaaagtaaaatgtgagtattattgagtattttttaaaaaaaatttcaaaaatattatttttttaatgcaaaaaaatatactatataaaaattttaagctctgaatttgggtagcccctaattacagagctagtccattttactgtctaataattatgatgtaaattatttttcaaaaggatttaaaagctactatcaaaactcattctaacaaataatgtaatgcattaaaacatttttaatttatttatttccttctctaattgctctacattaagagtatgctaaaatatatttattatcatttctttctctcccaaattaattaactttctttattcttttactcttttctttctctcccaaatatattgaaagtataaaaaaaaagattttttagtaatatattttgtaaaatataatgaaaaatggttaggaatactataaaaagatctctattctattcttatgtgatttttgttacaataatgaaattgtcacacatctctatacttgagatcaagatcggtccaagtattaagcagtttggaccattgcacaaagttttcattttttaaggtttaactttttttattaaaaaaaaaaaatctattttttttattatatatacataaataaaaaattcataattgaaagtttggaaacgtatcttaaataaaaaaaacgttggtaataaagggcacaatttaaatttcattatttttattttttaatttcattattttttataaaaggcacaattataaatttttgcacaaaaccctcaaaatatttgggccgaccctgtttgggatcttaaaataatttataa

SEQ ID NO: 21352 - DNA, 5930 bp, Cannabis sativa
aatagttcaggaagaatttttttaataacaaaaaaaaatttaaagggtacgatttagtacatgtcaaaatttaagggaaaaattactaattaactttaattatatcaataatattaacatttctcttttagttttagagagagaaagaagagagaggggtcaaatctagtggtgaagggtttgctgtcttttgtataaaataaaaaatatatttttgtggtgggtggtgttgctaccattacaagggtttcacaaaaataataataaataaataaaataaaataaaataatttatagagagagaaagtggagagagaagccctgaaatgctaaagataatagttgagagactttgtatatcacatttaccctataaagccccaacctttaattttcttccttctctctctctcttatcagattcctctgatcttttcttaattggggtttaatcatagtccatggatccttttgatttgattcgtaaaggtttgtaatttttcactggatctttaagattttgtggaattgtggttaaattttagggctttttgtgtttcttgaattctttcttggagttgagtatgtttttagatctattaattttgttttgttgttaattttgagttgattatatatttttatttcttttgaaaaaaaaagtttaattctttatttattgcgggttttattagcttgattgtgtttaataatagttaatcttgtttagggtttcattttaacaagcttggatatcagttattcgttgagaattttgtgagttgacttgttttctcttatctacaattctgggtttgaaatgtcttatcttatcttttgtggatttctatcatttcttgataatttgaggtgtgacagaattgggtaaatctcattaaagttgttgtcttgttgtgatttttgattgagcttttataacctttgactcaatttcgagttggactataaaggattatcattagtttgtcttataatcggactgtggattttgtttcttttaaattttcaattgaattgaaaagaatttctcaattattgggtagtttgttgcaattgagataaggttattgactacatttgagcccaatttgcagttttgaatgttttgtttagggaaattgctgttcagtggagactaatttgccatttttatgtttttgcaggatttggttgaagctgaatgaaaatttgagttgtgttcaattatctagcattagttttagttattaattttttcgatttcggtaaagaatgagcttatccaagaaaggagtctattcgactgagagcactgctagtaagataacaaggttgaatccaaatgcagctgaatttgttccttctggcttcaggtcttcattttcggggagcactagtgcagcgaattcaacgtctttgttttcttcgtcgggaagtttaggaaaggcagtgttagatagaacagagtcatctgtgtcgaataattctgatgaagaggctcatcagtattggcgtcgccaactccccgatgatatcacccccgattttaaggttatgggagaagatgaatcccaaaccattggaaatcttactttgtctggcttgtctttacatgatgaaagtgaagtaagcaggttttcgcctaccacaggtggtggatttcagttgaatgagactcacactaatggttcttttactgagaagttgagactttctggtttgggctatggtgatgatctttcttcggcgagttatttaaatatgtcagctcagccttgggataagcagattttgaatggtaataatcagcttgttgggaatggtggtcaggatgcgaatccttatgatggcctttctcaacacgcgtttatgagtgatatgttcggtgagcaagtggaagataatgatatcaatcctgtagagtttttggcatcacagttccccggctttgcagctgaaagccttgcagaggtgtattttgccaatggctgtgacctgaacttgactgttgaaatgttaatccagttagaggtatgattgatttgtctgagctagacttgtctttctcaatcaattgttggttaatatccttgtacaaaaatgaatataatttgttagatttcgatcttataatatccatctcctgcattattgttaatctgagaattaggggttatagtaaaatcataggattggttgaacttggattttgactgtggggaacactacctcatatgccttattttagcagggaagagctggctcgccatagagtatcgagcttactcaaatgcaactatggtcttttgcctatcccccatgaaatgggggcttagaaattttatatcgtttgcatctatattttttcttttggctttaaatgatttttctttttctgtttgtgttctgagaatgtttttcgttgttaatgtaggactatgaactttggcttagccatgtgtttggtgtgtgtgtgtattttgtatatatacatgcatatctgatgagacttgattgtagtttccatgttctgattatctctggtttatgacaatgtaactttgttcgaattgtagcatcaagttgataatggtttcagtccaaatccaagcccaaagaccttatcttctcctaatctcaccgcaatggactttcctgcacttaatccaacagatggtcagaacgtttctcgaaagtacactggcgatgaattccagcaaagtggctatccttatcggtcttctgacaaggagagcttgcttttattcaagtccagctcttccattccatcgagaggcagtgtagattttgctacagctgttaggaaattggctgcccaggattctggtgggtggaaatacgaacggaataattctacagatgccgctattggctcaagtagaagtggccattctttagcaagtaattacagcagcgggcatggaagaggtacctacggtgataggttacagtcacggggttctgctcgagctgctcctgtttggctcgaaactggagaagctgttggtaatgttcttttggtcaatcaatcaaatttacttgtatttatgtgcctatagatgtatctagtttaacaatgttgagatggcagcaaatatgtattccgaacaaagggaggaagctcgtgatcatgcacgactacgcaatgcatattttgagcaggtttgttgtggttgcatgcagactatctttgactagaattgtatagaaattacaataagttagtccatgttggtttagttacttttgtgtttatattttcgggaaacaggcacgccaagcataccttgttggtaataaggctcttgcaaaggagttgagtgtgaaagggcaacttcacaacatgcgaatgaaggaagctcatggaaaagctcaagaatcgatatatcggatgaggtctgtaatcatttgctgtcctttcgcttgttgttgattgcttttttaatgagattcgtttgcttttaccatcgtctgttatctgttatctgttatcagcccgtttatctagatctttataggctgattgattagcttaatctcttagacctctctcgggcattaatctttcgaccctttaaattcattcaagtctctctctctcctttttcatttttttgtatcgatgtcagaatggttctttgtaagcaccacaagtcccctgctcgggctgcgtctatctggcatatcacaagcatataatgaaagtaaagtaggtttgtttgttctaataatgccccgagtgtaacatgagatcgagtttgacattcgttcgttccaataatttgtgtgaaaaaaagaatgagtagattgattggttcattttgctctgctcttttgctgtgtttccaaattgtaaacaggaacccagttgctcccgagatgcaaggcaacggtagaggaaacgagaggatgatagatttacacgggctacacgtaagtgaagctattcatgtcctgaaacagaaactctctctccttagaagcactgcaagggcaaccgagcaacgactgcaggtatatatctgcgttggaacaggccaccacactagaggctcccgcacaccagccagacttccaattgctgtacaaagataccttctcgaagaagaaggccttgattactccgagccacaaccagggcttcttcgagttttgatatgagagtcgaggaaaagggggggatgagtgtaaggtataggagtttttttgacacaccgaaagggccacgaaatcattgtcatcatagtcattcttgtatctgtatactggaagttaaatgaagattagttcacacccgaaaatcgaaaaagagaaaaaaaaaactgaaaaaacagaaagaagaacaaaaaaaaagatgggaactttagacagaaggaagaggaggagaaaattggaaagcacaagtgtatcattaaaagggtttttctttttgttttttttttaactggttgacagtagcattatgtttttagagagttcctattattttggagctttttcaacctttttttttcacttgttaattctgtaccttaatattttttttctttgttctttttgatatgcagatgtaattgatagaatttaattacatgatagtcaagtcacctttcaaaattttcatcctcttctttacaacttgtgttgtgtgtatgtatgaaaatgaatgtaaactagggagtttttttttttttttggacattttcacactgcaaaaaatgactattctttgatgatgatgacaatgaatataagtttttttttttttttttaagtggtataaaatagactttaattcaattttaatcatttttttttcttaatataactgatttgaaactagtttctagaacggctgtaaaaaaatataataattcttattttatactatgagaaattttttatattattataaattaaaattcatttacaataatagaaaaaataggataaagtatttctcttattcaagatacatcttgatccaactctagaacatattttgttaagccatggacagtttgacaagcttgcctacgagcatgagtaacagtaactccaggaaaagaggataaaagacaacagacatcatcaatgagatcaaaaaaatatgataaatttctacgaaaagcatttaaagcagagagactctttgggcattcgtttccacaagtgctattggcaattgatgttgagtagcctaaataagactgtggaagagcgcctttgtttccatttcatcacttttgaaacaactttgagatggcttagaaaacacaactattacttctcctttattgttacgtactagtgcaccaattcctaatttcttctcttttattttatactatataaaaaatacaatatttaaattatcatttaacaaaattaatgtaacttttggtgccaatctattaaatgactttgttgggaccattgttggagattttctttagacaagtcttttctaacaattaattttgatcaagaacataaatcacaaacatatcaaattgttatattaaattacaatttcttaaataattgatgttatatatctttaagcaccttaagttaacttatatcaatggaaaaatgttgagaatgtgaacttagtgggccatctaaaactctacactacaatagatttagattttctttttaaattcacctcagacatacaaaaaattaatagtttttcaccgttaatttaaaccaaaaatgaattgtatacacattctcccacaaccatactttgtaatgatttgatatgattcatatgaagcttggtgtagttgcaattgttctttcttttttttttttttgaggtttgacactctttctttaatataagtaaatctagtgatttgtgttgagttagaaaattgtaaataaatgttaacatcatt

SEQ ID NO: 21353 - DNA, 5623 bp, Cannabis sativa
  modified_base (2037)..(2042): a, c, t, g, unknown or other
  modified_base (4010)..(4014): a, c, t, g, unknown or other
cgatatttttttttagtttcgttagctctggcgacaataatgagaaggtatttttgaatgtgatggggtgttattttacatagctttattgtctaaatttttgaggttagttttgtcccatgtggctcgcaattagaattctacaggtcatggcttggcaaaacatgccctttggttaggcgatgagctatcctcgtttgaggaggttctatcgccgattgtggtttgctgcattgttaattatgtatgactctgttcaccacgtcaaaataaataaataaataaataaaatattgttagtcattatgttcatatataaataaaatattttaggttgtagggtttcatttaacagtagggttatatctcttttctctcaaccgcccgagaaacagtaggcccacagtgagaagggaagaccctgaggtgaatagtgaatattgtcgtaactaccctaatggtcatggcgatgacagagctaaaagtcgggccagcgaccaaccaaaacctgagctgggggttaccaagccgaagggcagtatgcccctaataggcaatattaacgtgagaatctacccttgaagggtagagatggcagagtaccacccccggtcgatggaagggctgacaatcaaaatgtaggggaccttcgagattccctcaacaggaatagggaccactgtggttcatacatattaaacccacctgaatcgattcaaggaaaccagggtgatgtagtcattaatattgttcaaccccagcgaacactagtgatccagaatcggttggatgagttgacctgactagccaaggatcttactacaccgaaactcactgacttagaactagaaacgatgagagggtttgatttctcacaaaccatcaatgacctccccattttagtaaaattaaaaatgcctacttgtaagtacacgagtaaggaagaccctctgactcatgttgaaaactttataatccaaatggaccttcaaaggatcagggatggccttagatgtcgaatcttgcttgcaaccctcacaaacatggcgcaatagtagtttaccaaattacctctagggaggatcacttcctaggacgagtctgaagggttattctatacccaactttcttcagcctgacagatacaagcagaattgggtgacttagtcgccatcaagcaaaagctcgatgagccgcttaaagactacatccaacgctttatgcatgaagaaactaaggtgaaaaatctaagtgatgatggaaaatgggccgctatcattaagggcgttctggtgggaagttgactattgaaagatacaaggaggaggaagccaactcatgctatgaaggacttcctggatagagctgatgaatttattaaactggaagaggttgagaaaaattccaaaaggcttgatcaagataaaggcaacaaatatggggcaagctctagtgcccaaggcccctaaggtcaggggcaacaataaaaatgggtttaacaatggaaagagggccaacgacgataatggtagaaataactttattaataacaaaaagccaaacaaagcatcatcgtgaatggctatgtcctcctaattgatacaatcttcagccacgtgcgacattgctcttgtccttgcctatgggtatgataactcataatctcacaatagcataacttaccactgagtacaatgtagttgaggtcatcccacctggaatatacaagttagcacgttatggtgctaaggcaaagttagtactagagcctttccattgaaacgaagagcaccttcaaaagtacgaccaatataagttgcttttcaggaatgacttaggctgattgttaaacccgcaaagtgtattcccatcattggtcatcatacctaccaagaaagtttgataatgtaaaggcatgcattgcccacttttgatgtaataaggcatgtttgcccattttattcatcaaggaaaaattgcaacttacttttcatataacaacgcggcttgtatgattgttattgaatcaaattgcannnnnnactaaggtcaagagtgtatgaaatcatagtggcaaaaccatgacaataacagttcccatgtgaaagccctagttacttaacaagtgatcaagaggtgaacttgtttagtcacttcgggggcaagcacactcatacatggactagtaagcataaaacgcattcacttaaattgattttacaagtttgaaaatttctttttaaattctaaagtatttgtacattgttcaatgtcttaagcgaccgatatgtggtatatggttaactataaaaagtgcttacgcatagtgtggtacacgccagaaaaattattaatacatagtagcatataaaaatagagccacatatctctaaagcaaaaaagaaggcatacatatgtacattcatggtgcacaagaaaggaagtgtgatcaagggacaaccattcatgtagctaaatggtagaagcaacaatggcatttacacacttaaaaaatttactaagtgtgtaaaagtaaaagtaatacatggaagcatatacatataagaacccgagaggtatgcaagaaacaattatctccaacccatgaaaccgagttatggtcgtcttcgagcactactcccgaccccatgtggttcactcagggcgaagcatccttaaaactcaatctcgaccaaacatagaataaaaataatttttggggtaccagtgtgtgtataaaaaagggtggctcaggttgtctagttttaggcagatgattttgagactcagggtggtacctccaacaaccatggggtgacctcaggatggtgtaccccgacccccatgtggttgtctcgggataacacccccaacctccaatctctcgctcctcgcaataaaaaaatagaatagaaaaatagtgaatcggggtgtaccctaacaccctaatatcggagtaataaccccaatctcgggcgtatcaaccgagccccaatcttgaggtgccttctcgaggtgaacactaagccttgactcgaggtacacaaccatcatgggggtatttggtcttggggaggtgtgtgtctctgggtataatcatgtgcaccccatctcaaggtgttcaccctttagggggtactagagtataatccccccatctcagggtacattggtcaactcaaggtagtgaattggtacaccttgacctctcagtggtggtctcggggtggtgaaccccgacctccacatgggggtctcgggtgacacactccaaccaccctctcttggtgacaacgtaacaagaaaaaaaactctcagactacctcaagacaaccctatctcggagtgagtttttgatctcgcggtgttggcgtgtataaccccatcttagggtaaagtgtcaacctcaggaaggtctcaatctcatctcaaagtacaaactccacactagtcttgggggtaaggtgctaatttgggggtggagtcaatgattgtgacacaatgattggaggtccatccaagatggactcagggtggggaggatctaccctcatttcgggtgagggctacatgcaaatgaggggtgtaattgtaactccaagctcggggtagtggggtgtgtaccccgacaccatggttactagaccaaacccgagctacatggttgttccaagccaaaaagttgttataagtgttttttaatatccaggaacaccttcaagaaaaagtttcaaaatcactcatttcctcactaaattttattaaaaacccaatgattcaatgcatttttagtcataaaaaaactaccaagaagaagtgccaaaaacttcattaaatttcaaatttcaagcaagaaatttgcaaggtgaagtgtagagaatttacccactatgaaaatggagacttcaaatcttccaatgattattataatgctacaagtaatttttttatttttgtctttgtagatatttagattatttcttttgtaaataatttatttttcttgtaannnnntttgcttgtaaagggaaaaattatcattgggatatgttgtaaaagtatgtaaagtgggagaattattttttgggtttgaaatgtaattccagtttaaccatggcattcttgccaccctaccactatgtcatcaacaataattaaattgaagtgcgggctacacaaaaagttcctatcgtatagtcatcccgctaaaaatttgggggcaaatgtttaccaaaattttgataatgttgacgtggcaagagtaacaacacgtgacacggaaatactgagaaatgtttctttcttgaataccctaaaggtgctaagggttacagattgtgtcaaattgaaaatggaaagcctaagattgtctaccaagagatttagttttcaatgagcatgatttcatgcacttggcaaccaagaaaggcataaattcaaaagttgaaggtactacgagagattattggctgagcttgagatcaattttgatagaattgaagcaccaaatgaattaccatacatatcagtagaagagatagaaatagaggtggaaacacaagctactataaaagtatataaacagggtacttctgaagtggaaactcagaaaattagtcaagaaaaccaacgagatttaaccaattatcaactggctcaagacaaaactagaagagagattaaactcccaaacaaatatgctaaaaagtggacctgatagcatatgctttggcaatcgtacaatctaaaaatgattcaaaaccaaccacttatgatgaagcaattccaagtataaatcaaagaagaaatggctagctggaatgggagatgaaatgcattctttgagtaagaataagacttggattttggttccaaggccacaaggaaagaaggttatctcttgcagatggttatttaaggaaaaggaaggcttgacagaaagagaaccacctaggtataaagctaggatgctggctaaaggattcacacaggttgagagaatagactacatagatatattgtcacctattgtgaaatacaaaaccatcatgatgatgttagccattgctgcacactatgatctagaagttgagcagttagatgtcaaaactactttcttaaatggttttttagatgaggagatttacataaaacaaccaactagtttttaggtggaaaatgggaagattgaaatggtatgtctactgaaaaggtctctatatgggtttaaccaatcaccaagggagtggaatcataggttcaccatgtttttccaaggtattagattctcaagatcaaagtttgaatcttgcctatattacaaggaattagggacagctaaggtagtttacctaatgctttaggttgatgatatgatgatcattagcaaagacaaggtaggaataaaactcattaaggataagctcaattctaaattcgaaatgaaggaccttggactagttaagaaaatccttggtattgaactcataaggaaaaggcaagaagggaagatgatcttaactcagaagagctacacagaaaaagtgatcaagaagttcaacttggaatcttccaaggcaacaacagtacctttagctagacagtttaagttgtcaaatgagca

SEQ ID NO: 21354 - DNA, 4930 bp, Cannabis sativa
  modified_base (3839)..(3851): a, c, t, g, unknown or other
gaatatcatcatcatcccaatagcttttagaaatcacatgaatttatacatacatttcttcaaatattgaaacgtatgaaatgtgagtcgaggactaaacatcacatggtgataatgtgaggcgacaaatgaggaaaggagtgtgggagaaagaaagagctggacttgggaggtgtcgttagataccaaattgagacaaaatcaaagggttagaatggagatgtgatcaacgaaaaatatggtttttttttttaattttttttgcttgtgggattttagaaactaaaaaggagagaaaagaacgcaagaaaaggaactaataccaactcatcggtttcatttgattctggcaatggagagagagcgaaaaagcgtgagagaatactctgtggttggagacggtttagcttaaaatggcgtagcgtcgtagcgtgtgagaaaaaaactgtctgttttttttttttctttctttttttatttatttattttaatttgattttataatcatcattcttattcagcaaaacgttacaatctcaacaacagcttcacattcaccttcacagtatcctctgccttttgctttaggtctatatcaaactttcaaaggctgaataatttcttcttcattattctgaatatttaagagtttcattatctaatttcatcacttttcgaaataccctttaaagatcttccattgcaggttcttattacttgctagaaagagcaattttcctcactcattttgctatgtgatgataataataataataatatcatgcccttaatttcaaattctgctatcaagttcttcacttttggaaattttttatgtcattttcatgcacgtaacaacacatcattccttcattcataagtcgtttcatactttattttattgggaaaacttccatacgttgattgcattggcataaacatgtttcacttttcttatctctacacaaaccaatctccattgtcctttcgatttagtcattagcaatcttaatcttgttcttcttttcttttcttaccagagtcagagaaaaaaaaaaaagcccctccattttcatggaccatgacagaaagaagagatcaagaacatcaccagaaggagatcaccaacaagattcccagtccaagcacttgttagataagaagaagaaagccaagaagactagtctcaatgataacatcaccaccaattgtggcagtacaagttacatctcaccggataatgattccaacgaggtgtctcagggagttttcgatttcccatggctgaaagatggtgttgtttcgaaatcagacgagttgaaatttgaagatgccttcttgtcacagctcacaaacacttccaactccatcaccaccaccacaggtatagaattttctttcccgggtcagtgtttgtttcaaactccagttgaggcaatgctggactttccagaagaaaagtttgaccaggaaaacttgcttgaagaagatgatggtggtggtgatggtttggagaaagagaatttggactgcctttggagctctttgcttaaccagccactacttgggcaacacaattgaaatttcttccctccacgatttgttttacaccaaaatatggaacagaaacttaaatatttatatgttatagttacataataatatatacacagttaatatttgctagcataacacatattgatttgataatatttggcataaaggacacgcttaaatgcaagaacagaatatcaaagatgacaatttttgaattgttttttggtggaatttttttggaaattggaataatgtaagtatgtttctcctttctgaaatttatttcaaagttgatttattgtcatgtgaaacaaatattttggatatcattcaaggaattagaaattggggtagattgttaaagagttaaaataccttgcttttcttttcttttttttttaaaaaaaagggaagagtaaaaatacctttccactttttaaaaagtaactgggttaattaattcatgttttagtatggtaaggcaatgtgaaagatagtgtgaaaaaacaaaaaactcaacaaaaaaacaaaattagttaaggcctttaaggcataaatgcatgccttatctctagctatccaaacagttgacttattttatgtaatgaattcgaatcaaaatgttgctttggatccaattctgttgccatttgccaacccccaataaccataagtatctgcattgactcagagtcatgacatatatttgttcagaaagaatcacaatgacaaacattatcaccttaaaattacaaaaaccaaagatttttcaaaacatcaggtaaaaattctttttaccctcagcctgtgagaaagggtaatacatggtttttaatattgattgaaactattacaaaggtagctgaggtactggaccctaataccagttctttttctgcaacaacaaaaaaaaaggaaaaaaagtactctttccagttcatattttaaaccaaattcctatgcatttaactggtgcacctctgattcaaaaaagagatcaatactgtacctcaatactttgtctcatgattgtaaaaatggggttttgattaaaagtggggacgttttggttgttggggaagattatggacacaagtagtagatgtctcttggtaggagcttacaattaagatttttggttaagacttcaaactcaggacccaccatgtcattcagctactgcttcaaatcttagcttttggaaatgagatcaaagatctagatcccacaaaatctatacctcatataattcacctcagttcagctaagaaaaaaagaacaccaatactacttagttcattaaacataaaccttaatctttgtttatttctctgggttcaatatgaagagtaactaaaaaatgaaagacaaacatggcaaaagaaaaaaaaaaaaaggtagattatgctgaaaacaacacaacttttactttttaagtaataagacaataatgcatgttggaaacaaggctctgaatccaaactaagttcacaattataaaagaacagattagttgttgtcttgaagatttgttttcatttacaaagtggaaatattgtgaattttaattaaattaggccaaaatccaagggaccaattgtggtcataaatacaaatatggttaagatggaaatggtcccagcaagaggtttagtggggcagagggcaaggtctaccgacactctgtatacagacgcaccttagtttttatgtgtatcgttttgtggtgtgtgttgatgatattgcccaatgcccatatctcttattttatttttttcactacaatttatgaaaaaataaaagaaaagttgaatattatattatggtttggtagttaggtcatatattatgtttttggtagtttggtgtccttagttaaatttagaagaaaggacaacactgctaccgctatgagggttgaaaaactcgactacaataataataatttgaggagtgttaattacaaatttctattacaatttcttagttaatctttacgtttgaaattacatagaatatttttttcatagtggtattcgttataattaaaatatcatttttgtaaatttttgaaaaattttaaatattttagagtattaaaaatagagtcactgatattccaatctactacgcgtgttaaaaaaacttcaaatttattttcaggacggtaaactttttaaaagttaaaaaataatattataactataataaataccaaccttaaaaacaaatattaaaaaatatattctgcaatagcactcatataataataataataatannnnnnnnnnnnntaataataataataaaaataaagactgtgttcgtggtaatggtgtttatatttaataaaggaaaaaaagtgagaggggagaattattaaaaggaaaaaggaggtgtgcttttatttggtgtgggagggtgatgatgtaaaataaataagcatggaatggatggcagctaagcttgagaatatatagaataatagtaataataattaaatatttattttttatattatctctatataattaagcatgaaatgaaaccccactactactaccataatatcattgccctttctttattgagctacacaataaaataaatcattcgtatagttgacaagaaatggaatttttattagtagatttaatttgtcctataaaagtatagttgggtaatgaatagtaattgtcataaatttgagatcaaacctaaaatgagtacccctttcattaaaggaaaataagaaaccctaagatgagtactcaataaccatttatatactatgttgccccattgtcactttttgagcacacaaacgattgttttgatctatactctttctccctttttgttcacgtcttcattcccttcttttagtccatcattaaattattaaaatttataaacattaatcccaaatacaagtatcatacctcaactcaaaccatttttctcatattaataaatagaagtcaatttatttttttttctcaattttttttattttttttttatcttgtcttcataatatattaaaaaataaatatatttatataagaaaataaactttaaatggtacccatggtgctatgaagtgttaatcatttataacaattctctcttttgttttttttttttttttaacaatttataacaatgctcttgataaaattagattgtaattaataaaatgtcccaatatttttattaggataattagtatttttactttctgatttttttttttacattttcaagttgtgcttttacagtatatgatcgaaatataatttttagggtaagatggtcctttcattctatttttttttgacacatattctattttatttaattttatcgtgaa

SEQ ID NO: 21355 - DNA, 2404 bp, Cannabis sativa
gcgacaatttatatctaagagctatattttagtcataaatattttttttatgattaaaagttacatttagtcataaaaaaatatgttataactaaaacgttattactaaatgtatttttcggcactataaactattcgaaatttttcaaaaatttacagagatgatgttataagtataacaaacacctccatgaaaaaaatattgaaaaaaaaaatataccgatatgtgtttttggacgtagagattgactataagagattataacaggaggttaacacagtaacacacctatatattattgtgatctttaatttgatcatcctatatatttcaattactcatcattaatctacatcgtcttcccttcccatgccacaaaaggaagatagctactaccaatagttacctagctatagctacaaatttattatatataaaccctaaaacaacaaataaaaatatgacatatagatcatgcccatttgattttatgttattttctaaatttagaaatagaattaatcaaactaatacatatatatttttaatataggttaagtaaaaaaaatataatatgaatagattagggttttaagtaaattttggtgttcgaagttatttataataaatttttttgcgattaattaaacctaattatcacttaatttccacttaactccttatataagctcaaattttaactttcaatttaaagctctttattataatataatatattataggtacgtaattttaatgcacattataaacaaagtaatgtggacacctaaaagtacacaatctaaatgttattgatttgtttctttttcttttataaaattattttttgttaatttgagtggacatgttttagctatagctaatgtgttaacgttcttgcctcacattttttcccctatatttttattattcgttgagttgttttggcttttcattattattgctttgtagtttggtttcatagactagccagcttgttaataagttctccaatatctctatatatcttattataatatgctgatttttataatatttattaaaatgtaaatactatatctcggattttttatagcatataatattatatatatatatttctttttgatccattaaaaaaaattattctccttgtgtggtctatacactatagtactcatgagttatgaattaaatgtcacttccttatagtcatgcatgcacgaatcttgcgatcatgcttacatatattcgaaaatgcaatcaaaattattataatttgaaccatttcggaactgcttagaatgcgttcagaggcggagtcaggatcaaatgaatagagggtcgccaaactatatattaaaaaagtaataaaaattttaaattaaattattaaattcataataactaaaactaaaatacaaatcatctctcttatatatcaccaaggacatctataagtgaacgccaatactaaattttttagcaatttctctttcaatatagaccagcaaacactcactttaaacatttatcttctattttgttgtgaagtatatatagtttttaccatgttcatagttgaaaaaaattactttgtggtggcggtagaaactagaagtgtaagaataagagttaccactttatacgcaagtgaaaaaacctttacttttgcaaacccaaatcatgtttatcaggtggatactcccatatatatgtggtcgcaatctcaaatcacgctccaataaattaatatcgaactctttgatgtcaactcttaaagattttgcagcacagttttcttaatttacatgatcaataatattcacatataaatttgatgagacattagatattgaagcttcaacattttttctcttaaagaatgtgtcaattgttactggttttttcatctaaaaaattaaagatcaatacatcttattttctataatatccctcaatttttattttatacatcaagatttttacctttgattactgctcttgaatgtggattgcttcaatttattcttgcaaaattgtcactactaattaattatatacactattttcattaaaaaaaaatatatataaatatatttataattatatatattgtcaaaacaaagctcacaaaaattacctctaaaccaaacatcctctcaaagaatccctgttaccaagtgaacctaaaactgtaaagcaagctctcaaggatcctaagttgttttagtatatgcaaagggaaaatactgctttaggttacaagaaagggtggagattcgaaactatagatcagtaaggtaatctcgatctctttctctatttctttatgttttctttacaaatgtttccctaattccctcaatactttctctctctctctctaactctgtttactta

SEQ ID NO: 21356 - DNA, 7286 bp, Cannabis sativa
  modified_base (2101)..(2101): a, c, t, g, unknown or other
caaaaagaaaaaaaaaattatgttgatattgttaatatgaatagttttattattatttatgtatttatttattttgttaactgttatgttatccatttcaaacttcaaaggaaaaccaattcaaaagaaagcattcagttattatcagtcttaacggtcacattaaaagcgaaccctcaacggtcaatttagtttgaaaaatgtgactctgttcttcacaaaacctaaaaatatcagtcgactctatcttctttgttttcctaacattctcattcttttacttggacataatttgggaacggtaatggcgtccatgaaacttgcagaatcatcaaaagtgagggtcatagtgagagtgcgtccctttcttcctcacgagagcccccaacagaacccttgcgtgtccgttctcctcgaccaggactgcgactctgcgcaagatgtcactgtttttctcaaagataaagaaacaaggtgaatcctttttctttttcttttcttttttttgtgggatctttctctatttcttttctgggtctttttattcattgtgggttttcgtttcggtttctatttttgttttcagccggaaggagtgctacagattggactcgttttttggcgaagaggacaacaatgtcagtcagatctttcacagagaagtgagccctttgattgagggaatatttcagggatgcaatgcaactatatttgcatatggagctactggtagtggaaagacctacaccatgcaggttttcaatttcttcagctcatgactaaatctttctttaaattcttcatattgggtaattgggtaatcataacttcattttatcttggaacttatgttttctgaggcaacttggtagtattttgctttctttgtatagaaaacgatcaaaaacttgctgaagagtgaaaatttgaacgaagtgctcttttttactttgtaatgttggtcaaattataattcgtgttcagggatcagatgagcaacctggtctaatgccactggccatgtcaacaatcttgtcaatgtgccagaaaactggacgcaaagcagaaatttcatactatcaggtctatttagataggtgttatgacctcttagaacttaaagcaaaggaaattgctgtgtgggatgacaaaaatggacaaattcatctcagtggactgtcacgggtctctatagcctccatggcagaatttcttgacgtattttcttgcggagttcagcggcggaaagtagctcacacagcattaaatgatgtctctagtaggagtcatggtgtgcttgtgatctcagtttcctctccttcagtggatggctccggagatgtccttataggaaagttgaaccttatagatttagcaggtatttattaagttcaaaaagtaattaacaaagttggagtctccctttttgtcattttcttttcttttttttatcttaggaaatgaagacaacagaagaacttgcaatgaagggattcgtctccaagagagttccaagatcaaccaatctttgtttgcactgtcaaatgtgatttatgcactgaacaacaacaaagccagggtgccttaccgtgatagcaaacttactcggatattgcaggattctcttggaggaaagagtcgagccttaatggtggcttgcttggtaagagattgaaaaagaactgttacttcaatcttatatatctgtaaaaaaatggtttcaggaattgaatactgggatctttttattgtttgtaaatagaatccaggagagtaccagcaatctgtccatactgtgagtttagctgctcggtcacgaaatatttccaacattgttccttcaactaagcaagagactccaaacattaaggtcaacatggaagagaaattgcgtgcttggctcgaatcgaaagggaagtcaaagagtgctaataaatttggagctcttaattctcctttcatggggaaaaattcaacttctgttaagaaacctagtttctgtaatagctctttgaaagccaaagttgccaccaaacgtggtgcctataatgaaaaggacagagaaaggtattagattatatttttttttttttatatatanatatatatgtatattatatacatatatatttggtgatcttatcaaatcattgatggtaatttggtaatgtttatgcagaaacaccgctgtgcctttcagtaacttgtttgatgagaatctacaggtaagatctaaagtccattgtgttttactcatcaaatacattcagaggttgaatttctaaatgtttctgtcatttttaaggaatattggtcaaaaactttgttagaagaaaatttgaaaaacgactcaattcccattccgggagatgaaaaagaagagagagaggaaggcgctcatgggattgtaacagaatcaagtaataaacatttgccaggtacttggacagtttgaacatataaaaataataaaaaaaaatataaatatcaatttagcattcctttttagtgttttagtgttatctaattattgactgtgtatggtatatgaaacgtctaacatacatttgttcaggcgagccattaaatcaggacaagagcccggccacggttgttgcatcttcacctgtaagtgggaaaaaaaacacattgaggagtcctttgagaaatgttctttctcccatcaacaccaatataagtcaaaacaatgccaaggaattctcgttcacagaaaaaccatgtgacctttttgagcctagtactccaaaaacaccttcaattttcacctgtacaaataccagattacaaaagattgcaacaccactcgataagctgaactctcgaggttctaatctaaaggttagtgcttaaaatatctcaattctgcagcctcttctgagtcaattctcaaaagtatttcctcacacataattcaatgtgcaggacttcctggctcaagagtatgtccatttcttgaatacagccagcaggtatggttcactttacatcattcttttctattctatgcatcatataatctaatctgcacacaccatactaattagtagtcctaactggtttctaattatttccagggatgagttgctggagttaaaggtacattgcccagcaatgctggtgtaaaaaaccatcatttgaaatgactgatttcattacattttgtttctctttctctttagtattttgactgttgatggtttgtttatgataggggattggggtaaaaattgcagagtacatactagagctgagagagacaagtccagtaaaatcggtaagcaaagtttttcaaatatattgtcacctttttgtgaatgaatactgaaatagagtattggatttgttctgtttcagcttaacgatttggagaagataggcttgtcatctaagcaggtaattttcactttatgtacaacatgtgttttagacccatattattatagtatagagaagataggcttgtcatctaagcaggtaattttcactttatgtacaacatgtgttttagacccatattattatagtataataaataacctagcgttgtttctatatgctatcttttggtaggtacgcaacttgtttagcagagcaacaagggcgatatttgagacagagaattacaactactagttgtttattctgtaaactggctatggtgtgttattgattgtgttatgaaacgaccatccttatccttatccgtagtactattgctgttgaaatactgtaacttgtgaattgatcatcctcatcggattagatgattattctagatgcttgtaattctttatttttttttatctatttttctttttggatctaacagatgtttttaattctttattgtaaaatttgttctccttgatattctaagagagctattaggttgtggagaaaggacaggagtttagttagtgttcactattattattgtataaacaagttcaaagttcaaaaaaggagtcgtcattttcaatttcccttcaattatttatggcccatgtgaggcagtatggctaagcctaataaaaaacaacacatgtaaagccaagtaaacgtgacgaagtccgttatcttcatcactaaagtctccaagaagtaccaaaattattgtatcaaccattatcttcactttcacactttcgccgtatcttctttttcttttcttttcttttttaaagaaatagtgcactagttaccttatttcatttgagtgatgatatatagatttcaatctcacacagtgaaattaatcccatttaagttaatattcattgaaaagagaaagacatcaaagatcaatcatgagtttctttcgtccatttccatcaaaaactcatcaaaggcacacacatattttagtacaggaacaagatcaagatcagttgagatgaacaaactaagtaaccataataacattagcttaatcactcttaatttggcgaatactaaaagaagccaggactactttattctagttcattaaaagagtccaacaaacaacagtaccaaacacactcgttaaaatctcaacataatacatgcaataacattattgattataagaaattccttgatcttcttctaaagatgagcgatctcatttacaagtgcatgggtcgcacttgcagttgtctccacacttgcatccgttctctgctacctcgctcatctcagaaccctccaattgtctgcacatgcacacttatataaataacatttcccctctaatttttcccaggaaacaaacatgtcatagagcttgatcaatatatatatataaatattcttacagcttcgccggtgcaacaccggtgatgagagtctcggacgtggtggttttctccatgtagccaaagtcggggtacatcttgcatctgggaaaaagaaaaaaaaaaagatacgaagaatcggaaaagtttcaggagtaaaacaaaggccatgcaaatatgcaatgcaatgatttagaacttaaaaaaaatgaagaaaaactcaccctccacagccgcttccgcacttgcaaccagatccacagccacagcttcctccacagcaagacatgtttgagtatagattgaattgaaagaacaaattttcttcagagatgagcaagattcggttttgatgattgaagatagagcgagttttgagtgcgaaatcagaaatgaactaaaccgcacctctttttatagagcaagagcgagtcaatctctaccgtacatgtgctaatcaagggatccacggtgctctaactcccacgtggcctccctttttatctcagatgttggcacatgtgtctagagttttctctatacgttgacgttaaggtatcaaccgtccgattgactttaattgatcaaagatataatcaacggttccggttgagataagtcctaatgtctatctcgcgcacttggtcatcaatcatgattattatacttttagtatataaaaagtttattttttaatggatatataaaaactatttatttttttttcttgaaaacagagagattctattaaaagccatcaagccaaaagattagaatacaaaagataagtaaatttaaacagctaaattagtgggcaagctcagccaccacacccaagccttatctaaatctaacgctcgttttgctaaagaatgaggatcatggttctttgaccgattacaatgcggcaaggatatggtattgaaagaattcttaatatgattaatatcattaagaacaataccaaactcattgaaacaaggggcccgctattgacagcaagaactctacccgctgacaatcagagaaagcagtaatcaccgtataccccatctgcacgcagcaagaaagctcatggaccaaagctttggcttcggcaacgtgaggttcccacaaacccgcgcaaggagctgcactcgagaataggacatgccccaaacgattggaaaccaaagcccccatccctactttcgattctcaacacaaaccccagcatccacaaaaagattgaactcaccaagaaccagatccgtctcagatgagaccagtcgattacttgcattgctagaagtcaaatccaaagaagctgcctcggcattattagcatcttgatatttccataaataatccatggcccaagcactaaccatgttatcatagaggagcttatgatcatgcacaaaagtatttcgcccgttccaaatatgctagccaagggttataaactgctcaagttcctgttgtttcaagatatccatacaccccagtaataactcataatagcaagaggcgtccttcaaggagtcgaggccactcaaaaaccaagccgaacaaatagacttaagagaagggcagagccaaagagcatgaagagtagtctcgttattttgagagcaaattggacatattgtagaaaccttcataccatgacgagataaattggcataagccggaatgaaattcagacatgccttccacacaaatttttttatcttaggcagaagattcagctgccaaagaagtttccaccaccgggaagaaccagaggagcctgaagcttggccccacccaacctggacatagtactccaatatccactctttaccgagaaagaaccattgtcagagaaatgccaaataggcctattgataactctatgaaaatagagttatttagctctttttgtccattaaattagttttgttcttaagcatttttagtttattttagtgactttttaattattttatttagttttgcataaatattagttttagtatgtttagattaattttagttaatttttgtaatattttatcaattttatttagtttcccatgttaaagtattattcttaatattgtgtatttttgtaagagcttaaatatatagtttggactttattatgtgcataatgtctcaaaagtcatagagtaaaaaagtccatgaactatcaaagcccaaaaatcttgtacacaatattcataaagtataattactattctaatgggcttgcaaaaaaataaaataaataaagaaacaaaaaaaaaaaaaaaagaaaaaaaaaggggcagcccatgattggaagggctagcattatatatgcaaatatgtgacacgagtgcaagctatagcatatatacatatgcttttctatatttaggcagagggtgaattgaagaaaaaaggggcagcagctagatttttgctactccaaaaaacgcctacagtgaagaaatgaagaaaaagaaaaagaagagagagagagag

SEQ ID NO: 21357 - DNA, 2213 bp, Cannabis sativa
  modified_base (1837)..(1842): a, c, t, g, unknown or other
acaccaaaccaaataaatttattgttaataatttagtcaattcacaccgtttatttataatattttggttcagttatggttttaaaattcttattaacagttaaaatcaaactatatcacctaattattttatatacttaattttttagatgcaatataatattggtatacttagacaatctttttatggcttatggtgctaggtagagtatcatattaatttaatattgttttttgagaatattttctttaatagtttatttatatattgtaaactttaaaaaataaaagaaattaggaaaaagaaagaacaatcacatagaataaattcagaataattataaaatacaaataatagtttttgaacaaaattaattcgttgttaatgtattggcatgggtttgaatatttattaatctatatttaaatttttagaaaatctcaatgctagtatggttcaaaaaattcaaataaaaagagattattgtacttcgcaaataaggttgtacggattttaaatatttttataattttaattataaataactgaaaatggaaaaagtagcttattcatcttatatatgataatttatttctacatcttagcaatgtgagactaactctaatatttgatttatttttatggtgtactcttattaatttgttgttgattttttatgtttgtatttttttatattatttttgtatagttttttttattattttcgcattatttttataaaatactataaaaatatatataaaaaaattttgaacttaaaattgtaatctttttttttttaaaaaaatataaaaaaaatatataattatcccaaataaaaatgcccgaccaattgaatccgtgagccaaaatatcttatttaaaacatattatatataataatgtgttttattttgagaaaaaggaataacggatagatatacctgagctggtaaagtttcatatatatttagaaataatattttaaagtaagttgtgatttttttttttttgaattaaaggtatttgtgattaaatctatcaaaaataaatatttttaagtacgttgaggaacctttcaaaaaaaaaaaaagtaggctaagtaaatagtaataaaggttttatgtttttactcttacgtaacacatgcatggccttgttgattcaagcatcgcttatatattaattacctttttatattatttatttatttaattcattaattttgagaacccttatttgataatttgtacgtaatacattgtaattataataattacttttttacatggtcaaaaagaaattatccttatggcaaaatgaaactttgatattgttacgtcacacctgcaaacgtaagcaagctctatcacgtcatggaatttgtctattattgtctcactttttaattagttttttcaattttaactaaaaaaaaaaaataataatatacaaacagaccaaataaaaaaaatatacaactcaaataaatttttttacacaaataccacttacactcactttcaactcaggatccatgcttcctgagcaactatcaggcaactacataacaactcaatgcaaccgaaacaaaaatttaaccagaaagagaaccattattaattctaacgacttcactttagaagatgaccagaatcaatcaaaataggggttgtttcaaattcatggaaaaaatatagaaaaactactacgaaactaaagatcaaccagaaatccagtttaatttgcataaaactaatgtcttgacttcaaatttcaaatctatgaaatgcagatctcaaaaagctaatctggagttcccaaacaatccaactnnnnnntaatccaaaaaaaattacatcaatactatagtaaaatgtttatcctagtatattttttcgttattttcaaaattaatttgtttatactaaatcatgaagagacatgtagataaagttacgtacgtggaaatactgttctaatttttagtatttcataacagttgcataaacatttgctaacaactaattcgtctgattgaaaccttcgtctgatgcaaccttcggccaaccacccagaaaccttcgtctgatgccaccttcggccaaccacccatcaactacccaacaaccatcatctgattgtgtacgtgatagtgtaaaaggagttttagtaattaaaagcacataaaaggtataaacgttgtccacac

SEQ ID NO: 21358 - DNA, 2795 bp, Cannabis sativa
tatgagtatatatattttgctgcgtgctcggtatgttgagagatattgtttattatttctcttttatttttattgtgtttcaatcttatattgaagaaataagggtcaaaagagattttgagtacgtccattgcaaatatatatgatgtgcggctgtattaactgaagaaagattgagtaataccagtacaagtcaaaaaaataagcttagtatatcattatataacagtacctactaattctgttaaaactatatgacagcattttttaggatgtttgtgagacagttctattctgctcttataccagtatctcaaatgaagatgacattgttccttttgttgatcattatatatgaaaaaaatttaagatgtgattatttagtgcatgtgaagtatggtaattaaaaaactgttttttatttttaaaaataaaaaattgttttttgaaaagaaataaacttgtttggacttatttttttaaaataattttcagaaaacaaaattaaaaattttaaaaacaacaaaatattgttttttcaaaaattaatttacttttgattaatattgtttttaaaaaccaataactttgtgttttgaaaactttaaaagctattattttttttttttttttgggaaatcagcagtgattttcattactccaaataacagttacaacttcatcaaaaacaaaaacagattactatatcaaaaaggctctaggtaagtattgttagtattttccgtataggagatataattaaaattctattattttatcataatgttgtataatattgttttaggacacctttagaactttcagaaaagttgataccatctattgtggtgttcataatttatctttcaataactttgaaccaaatcagataagtaagaatttcagtaggacaaatattgtttttgcttactattgtaacctttatgtgaatctttcattggcttggcaaaacacaaactttccaaagtctaatgaacaaaactttgtaacgtacgtttattcaagcacagtaaaccatggtagatatatagcaaacagtcttcaaatttaacaactagcctaggtatatacttctgtcaactgctaaatgcaacttatttcttaccctgatgatgtgtattcaatcagtataccatatgtagactaaatgatcaccatgaacagttatggactttatcaagcacatgatgtttttgaacggacaaaaccgtaatgaattaaaataagtacataatgatcatgattagcctgcaaatgtatattacatattaaagaaacattacccaagaatatataagtaaaaaaaacaactaatgaaatggaaaggaaaaaagtaaaatcgagattttgtggtatgtattgaagaatgaagtcgattgtctcaaaccagagaaagaacaaaagagtcaaaggactttagaaacactgaatggccaagaaaacaaaaacatataataataaagatcaaaggatatgtccccttcattatcatgacttttcctgcttccagctgctgtttgtcgcttctcatcactatcaaaaacatgaacaaaatctccttattacacttgagaaggacctctccaaatgttggatacagaacccaatccgcacaaaaagtagaaagagaagtctatatatggcgtaattctgaagcatatgccattgcttcaaaggtttattccatctactcatctaggccaatttttttatttatttatttaaagcttagtaagtcgatgctgaatccaaaacccagaatgatataagctcaaaattgagaggtacgtcatccataagcaaacccgggcttctcttttttggcaagtatatttcgacctaaatataacatgtccttcattcttgtatgtattcttgctaaaagggagctgcccaaccactttttcagctttgtagtttactttatatgacattgccaaaggagagtgacccttctcaagctcttggtatacatgaaagtgactagttattttgattataattgctacacatttctacaaaatacttaattaagtctaaaattttctacacatttgtaaaaaaatttactctaaatttttttaaaattgtagaattacttaagaattttctagacatgtgaaaaatacaatagaacataggaatttttagaaaactttaggctagaggtttctagttatgcatgcttaacaaatatgtagaaatctatggataaaaaacttgaactagaaagatctagggaaaatatattctagcctcaaatgcttgaaggctagcaactataaatacccatcaagggttccaaattgtaaccaacaaccgaaagccaaagtttcaaactatcaataagaccttactactttacatacaattctctcttctaagccaaactaatttcatatactaaatcaacaactactcatcaacatcactacttcactacattaccacaataagccattaaccacatatccacttattctaaacaaaaccaatccaaatttattctcaaacaatcagtatcagtggtatcagagctccgttcaatcatatcactcggcgtaatcctttcctctcatcaaccttagtttggagtccaaccgttcttctctacctgtttcaattttccatggagaaagctacgatttttagtccattaaaatgaggacctattttcgatcacaaaatctatgaaaaattgttgaagaaggaatcactattccaaaagatatattacatctcttttggaggatcaaaagaaggcactagaggat

SEQ ID NO: 21359 - DNA, 3678 bp, Cannabis sativa
aaactttatatgtgtttaaattaaattgtttttagaaattcatatttaggatgttaaataacatacattgttgtaatctggtaaaatataatccaacaataacttcattatatcagatggttcatattctactatctgacacgtgtcatcctctgaagtgtagtcaaattttgggtataacacgaggtattgtcataatatgataattccgagatgaattatattgtatgtagttcccttagcctttcaacatactcacgagtatgtgggtcactaagctacaagctcttaaagaattcattatcaacccttttcaattgattattgttctttagtatattctgtgtatcccgagatggagcttctatgttggttgttcatcctgctggtcttataaaatgatagttattattcatagctcgctcttatctttgaaagaataaattcgaatatttctaccaattgtattttccaaggtgagtttattgaacgtatttattgctttacaacacgacctagtttattttctagccttttcatacgtatcatcaccatattgtttgctcaaaatatggtataacaattactaagagtttaattctatatttatagtgaagtaatcgttgaattaacaaataatattatttgattgatgagatcattcaataaagaaatctagtttattgaagcttagtgttatagatctatggtcctcagatcatcaccttaacacattttcaaggggagggataaaaggtgtctatgaaatttcggaaaatctatttttatttgttaaaatagtagttatttgttttataataaataaataatatttttaattttattaattaaaaacattaagggaaagataaaaattgtctggacaaaagacactgctattgtcttaattatgacataggtggtgacactctcactatgacctaacacactaatagggaactataagatacggttgtccctacaacatttgtttttcagttaattaataaatatttatttgaatctgaatttaagaagtagttatagatatttctagtagttgattaatcggttattaaatatttagtctttgaaataaatatttattacagaagttatattatttattcaaataattaaatattatttaataaaagatttgaacttaaataattgattaagaaaaatatttattaggtttatttaaatatattgtataacaaaattctaatacaaaattttaacatattaacttttagttacttgaaaaaggattaatctaattaatctcttttcttcataatttctacagaataattcttgctcatgtgttgagaattcaacaataactttccatacaatttatcctactagcccacactagtccttgtgtgtggtaaaagatctgaaagatcaaggtgtgagtttaacatcatcgttctaaggatacaacatacataaatactcgaggataacatgatacgcttcgagagctaaataaacttctcatctattttactttcagatttagtatatatacatatggtgttcctgatgatgtggtacaatgataatcagatgctttaattctgatgcgtacctgatttagtaccataaaattaataagaaaaatcttacttttttttttatagaaacttgtgcttgaataataaatatattttcaaaaatatagtacgatttattttaactatatataaaatatgggaattgttatactgatatatattattgaacttgcattttgtggattgtaatgacttaatcactatccatctccactcttggtatcatattgtctgttttgggtataagccctcactgttttattcttgggcaccttcctaaaaaacctcataccaatagagatagtgtccatccttatatacccacaatctttctcatttataacaaatatgggactttggttggttgcacacccaacatcttcctttacacatcttatttgtaaattatattttattcatcatctttcatattaaatcttttattacttgtttttttaaaaccaaaactcatcacatatttgaaactaaattagaatttatatactttgtttgaaataatttctctttgatgatagtcaactcgtttggttataatctcgtacttacataaatattatattttgagtgcacttgcaaatgtaaatattaagttacccatttttaggttcaacacccattaaattttttatttttttttataattttttattttaacaacgagacataatattgcatacttttctacataattgcgaaacgatatgatattcagaacatgttcgttgttatcaacaatcctaattcatagtactttcaaccaaattaagaatagccatcaattgaagttggatttagaaagcgtatcgttgttcgtggagctctgcctaattaattatgtgttcctttctttccattgagtcattgacatatgtgattggtggtaacacaatacagctttaattgtagagaaaagtcttcagccctaatagggctaataagacctgaaaggacgttttcctatggacaaggtcacctctctaatccatttaattaggccaactagtcaaggtcatctaatccaattccaacttgtataaaaattcacttttgtttttcttttttctctttaaaaaaacaaaagttaaaaaaaaaaaatatatttagaagcatatcattgccgtgtggacccagtaagttaccaaccattgggcttgggctcctcctaatattctttcttgctttttggatttcatactgaatttagttttgtgacttataggtttgctgtctagtcacccacagaattagatggaaaaattgctatttttcttacttatcaaatggtttccatatattttttttttctgtttgataattgtacaagatagcacatacatgattacaagtctacacatttgaataatgaaaacaaacataaaaagctcattttatacaaattaagcatactgattatcagtacttgtgacctcttggacaacatccgagaatagctttgaagaatgcaagcttgtactccacttctatggaaggagaaaataattatgatatatacatatgtacgttgcccaaaattctactcgaatcgatgacctcttaataccaagtaggagggccgatgcctcggctaaggggttggtggtagtgttttgttcgaaattgttgtgcaccaatagaaatatgaaaccaacaagaataaaattcaatgtaaaataatacattgaaaaaataaaaaaaaataaaataatattaaaacgctgaacaaaacatatacataaaatagagcatatgaagattgtggagaaattacaactaatgtgcagataattaactaaaacttaatcacaaaaaattagtagtgacaagattaaaaaaccacacacaataaccggagattaaattaaggatgaacatagtattaaaacatgaagcaatgaagcaataaaatcaacaccaagatatatactagttcaagccctataaattgatgtggtctatggttctactccagctctgaaacactaccataatcttctttattgattaagcaggaacatggtacaatacattcaagaacgattcccagttggattctcacaaagtgtttaactct

SEQ ID NO: 21360 - DNA, 2185 bp, Cannabis sativa
  modified_base (1819)..(1844): a, c, t, g, unknown or other
tcattaattaataatttagttattagtattatgaagtgaattttattattatacctgtctttgacgctagcacaaggctccatcatctctaactttgctgcaattcgagctacacaaccttctacaacatggttcagatataccaatggtgttttaccaatcaactgtttatatatatatatataacaataaaaatactgtataagctacatatatatatattaatatatataatatctcagattttggttacaatacattatcacttacttcagtgacatctttagcaataaaagctttctcttcatcttccatttttttatgggatatatatcactgtcaaaagattatcattttagcaatcaaaaccatgaaaagagtccacacgcacacatatatttatataatataaatatataaatatatatcataatatcaaatttactaacctaaatttagatgagatttctctctacacaaatgaaaactagagttatatagagaataatattaagactctaacatgacatgcattgaaataaaagagagacaactctaactttttttatatagaaaaactagaaaccatgtagaggttttaaagtaatccatgaggctggatttcgatgaaaccaagagacgaaatgaaattaatgggacgacactacacgagacagtgccttacttctaagtgaaggaggcttatctacggtggacagttgtacggtactccaagtggatattaaaattaagaaaactagaatatatatatggtgtgtataaatcgatttaattcaatgataacttaccgatttaattacaatcaactcctaaatattggatttttaattgtgatcagatcggatcggatgttatttttgaatatccaattagattgaatcggatgttggataggatgtctaaaaatccaatactatgcatccaacatctaatcaaactaattagtattttcatttagtttgatttagtaattagattttataatgttatacgtaaaattttactttttttttttgggattggatggatccaatttaatctaatacatactactactagacctaaaatattagatgaatctgatccgatttaaaaaatactaaggtctaaaatattgaataaactaaaattaaactaataaatatatatgaaatacatccaacagatagaaccgatccaatctaacatccaatggatgttggattggttggatgactgaagttattaattggatcggattggatggtaaaatttaacattaaatatataattggatcgaatctgaatagggctaaaaacattaaatgtggtccaataaacacctgtatatatataaacgatgttttttttaacttgccagttacttcgtatttgattctgattcatgataaggttttaatgtgattcaatgtgcaaaatgtcatggaaatgaacagtattttgataaattttttagataatgtagtgctaatctcatcttcatgttttaagctcattgtaaagctttgacaatggctaaaccttaaattgaaaagaagcagagcattaaacagaacagtaaacaagagaaaacaagagagaatagccaaagaagcttaaccaagaatggttagcttaccactttatttatactgatctaataagcaagagtacaaagttagttaacaaaaaataacgactgtaactaactgaaagtaacaactaagccaacaaaacaacaccagtaacagaattactggtttacatccccctcaaacgaaatggtcacttagccatttgaagtttgcttttgagatannnnnnnnnnnnnnnnnnnnnnnnnntagtaagagcattagcaacctggtttatggatggaacatatctgatagaaagttgcctagctaatatctgatctcgaaaaaaatagagatcaatttcaatgtgtttgcatctggcatggaacacaggattagtagccagtgcagtagcactttggttgttgacccacaagataggtgattgaggaagagagacttgtaattccctgagtaagaaagtaagccacctaatttcagcagattggcaagagccctgaattcactctcagtgcttgacctggaaacaacctgttgcttgtttgcagaccaagaaactagattggtgccaaagaatatcacatagc

SEQ ID NO: 21361 - DNA, 4140 bp, Cannabis sativa
cttagcccacactttgttctttatctgatccagaaattccttcttgttacgcccaacaaaagaaggtaaccccaaatacttaccatgatgctcaacctctcgaacccgtaagaaagccgcaatttgttgcctcaccgccctatctacattcctcccaaagcatacttcagacttatgaaagttaaccaattgtccagaagccgccgaatataagtcaagaatctcctgaaaccgctggcaactccccatatcagcatccataaagatcaaactatcatcagcaaaaaacaaatgggacaccgacaaacctcccctcccgaaccgaagccctctcagccgaccttcatgttcctcatgttgtatcaagtttgaaaatgcctccgcacagaacagaaataaaaatggcgagagaggatccccttgacgtaagcctctttccggaataactcttccttgaacatcaccattaagcagaaaagaaaagctaaccgaagtcacacatcgcatcaccttctctacccaatctatagcatagcccatccgcaacatcatcatcctaataaaaggccattcaacccgatcatatgccttcgccatatctaattttaaagccatctttgtgccattgcgaaatctattcttcctcatacaatgaagtccttcatacccaataatagcattgtcatgtatcaaccgctcttgtacaaacgcactttgattttcagaaatgacaacacccatagttgatcgcagccggctagccaaacacttcgaaacaatcttgtatattacattgcacaaactgatcggtcgaaattcttccactcgagctggtttctcaactttgggaattaaagctataatggtttcattgagacactccagatcagccccttcattcaacacctttaagcacaccgtaacaacctcagattggagcttaccccaaaacttctggtaaaatagagctggcaaaccatccactcccggagcctttaccggattcatatgcttaaccgcctggatcacctcatcagcaacaaacggacgttgtagttcctcattcattgcgtgtgtaactttaggcctaactctgctcaagacctccgtaacccgatccataggaggatccgaagccgagaaaagactgccatagtaatcctccactaactttttgatcataccaatatcagtttgccatattcccatgctatccaaaagccctttaatctcatttttcttcctccgtgccgaagcttttcgatgaaaatacttcgtattcaggtcaccccacttgagccacaaagcccgacttctctgtcgccaatatttctcatccttctcaagcactacatctaattgtttctccaaagatttcagctccccccaaacactagaatcttgcctagaggacaactccgaaatggcctttttcaatttcttcgttttctcatgtagcaccttcttcttatttttattccacccatataaagccgcccccaccttccctgtcttcaccttaaagcccctcgtagaattcactacttcctcattatcccataccctttccactatttcggcacattcaggctcttcacaccatgcttcttcaaaatggaagcgatttttccgcttcacttgaccacatcgtaacctatcattttctatcggcatatccacaaccaatggtctatgatccgacccccaccagtccaatacggaaacatcagctccattaaaattccgcaaccactcctcattacacaatcccctatccaacctctccattatcgggttcacctcatgtccattacaccaagtgagttccgtttttgaagagcagaaatcaatcaacctacaatcatctataaccattctaaaatcctccatagcaacatctcttctaattcggccccctaccttttccgataaactcaccacctcattaaagtctcctatacacaaccatggaccaaacacttccttcctaatattccttaagagttcccatgaaaacttcctttgcaaagcgtccggatgtccataaaaacaagtaagagtccaaggaaaaaaatctttgcccgccacccttgcaagcacatgccccggagaacttgaatcaactctcacgttcaattcttccttccataaaagtaataaacctccactcaaaccaattctatccactgcccaaaaattctgtccaaagtttaaagtagagcataatttctgagcctgaattcttgttaacttactttcagctaaaaaaataagactcgggtcatgatcccgaatgtgggactgcagagctcgcaatgtccaaggattcccaattccttgaacattccagcttaacattttcattgctctcggcggtcttgctgagcaagactcgccgctctctcattcgaaaactgagttgagaaatcattataattagaaatactcacctcattattagtcaccacatccacttttcctttgctgtcgtcggagccgaagacaaatggctgccccatagcaatcgaatccgtaccagccacagtactcgccaccacaccaccagtggtaggaagaaccatcgcccttcctttaccagaatttcttgcccggttcttgatcgatagcctcttccgttgtccaggaggagtcgattttgcagactgtgcaacctcaccatgatgaaaaactcccaccccacaagaacttaccccgtggtcttcaacaatttgcttaccctttagaagtgcccttcgttctctctcttcttcagtatcaccatccttcccaccatttttccttttcttcacctcagtttcattctcctctgtgccctctgaagaaaacaatccccccagcctcttttcgaacacaccagaagtagccccattcaaattagagtcattaactttgagaggctggcccattgcattgggctcaattacgtttagagacccagtccggcccacttgagtcaaattaagtaaatgacaatatttccttccaatgccacctggcatattattatcatttataatcccctcccccacgattgaagtcttatgcgcactactatctccactaccgatgaccgttgcatgatcctttattatcgggttctcctcgctagcagttactctcgtcggcggcgccaccaccgactgcccattatctgtttcaatctccgtttgtcttcccccatctctttctctatgcatcccatgatgttcattagctcccactcgactctgacggaatgcactgaagcaatgaggtattggatcctcatctttcaaccattgaccatattttggcacttgtaagccatcttcatttttctccaggaggacttctctgccacaatctctcttttcatgtccccacactccacagccaaaacaaagtgttggtagcctttcaaatttcaattggatccaaaatttccttccaccacaaggtatatacctgcccacaaagatgctctgttttaagggaaatccaattttcaatcgtacaaagccattcaagaacatccgattttcattgagccatcgtatttcctggacttcacccgccatctctcccaaacgcataacatttgatcgagtaaatgctttaattggccaacctttcatcttcacccaacaactcaccttgtctagcttcgcctctctccactgacctgaacaaggccatctttccagcaataacagaccgccattaaaaatccaaggttgcttttgaagaattcccgttgcgtcctcccgacttttaaacgttatccctacaaaggagtcatcctcagcctcttctaagatcttaacttcccatcctccaactcctttccacatacgactaaaaatggttgtgaacaatgattccttaatctcacgtttagcaatcatccttcctaccagagaaagttcaccgaacgaagatgcagcctcttcattctcctcccaatcctcctcactacagacacccatcttactcgtcatggacactatatcatccaccgtctcattcaaatccccctcacagccaccaattgccatacataccatgaatacaaaaagatcaaacatctttgcagttcagaaactatagcttaaagcagggtccttcagaccattatcattt

SEQ ID NO: 21362 - DNA, 1615 bp, Cannabis sativa
aatagatcatcagggtaggactagttccgctgtgctatacttgcatatatgatttttgatatcgttctgactttgactcattttgaacagcgaaaaccatggaggatcttttggatgccctcacccaaactcatagtcccgagtcaaacctacctgagcagcctagggtgagtgtgactccagagggcctatcgttgaaacctctgggaacccagaggtggtcttgatcgatgaagaggaagaataggaagttgtccttctgcttgactggaagcgcaaaggcgttatgactcattcaaagaaactgaagagggctgacacccccgacccaagcactgattcggggattccttctgaggttgatgagtatcctgcacctccgggcatcatcctgactccgacccatcccgatgaagaaagagttcaactcttcatcgccaagcataactacgccgtgggggaactgtccacgagggacgccgaggcagatgccttgaagaagtggttgagggaggcccaatatgggcccttttgaggtgaatatgccggggacgtttgggatttgaacttggatcccctgatggactggtttaaacgcttcgttggggccttacttggcccctttcgcctcagaaatagtgagtcactttgctgctgatttaactcaactccccaccaagaggtatgcggcgtgcgcttcttccaacccagtgtaccagattcaagacatgagtgttgccctggctacagtaaataacaatcttctaagtttcttttatgtttttacttctgcagttctcactcctttttttgttggcttttagagtactgcagaggccggtcgtctttccaaaactttgatcgaccaagggttcactgtgtcagaatttggtggcatggatgatgtaatgaagaagcttcgggagtcagaggacgagaaggaggccattcataacgaagcccaagagaaggaggcccttacggagcggaatcatcaggctgtgctgaaagccagggacgagatcattgcttcggccaggagggaccttcaagaatccaaagtagggtcggcaaaatgggccagacacgataatacgactcgaaaacccgcacaagagttagtgggtttgggtttatcttaaatgggttcgggtcgtgttcaggttgacttgtctaacttgtttaataaatgggtcgtatttgggttgacacggctaacacgatatccgttaatgacctatttaaagttattttagtactttaacgtgtcataaatgggtcataaatgtgttgaatacttcataaacgtgttattagttgacatgtttaaataaaatatgcttataaatgggttacacgggtcgtgtcgtgtcaacccatttataaacaggtcgtgttcgggtttcattttttgacacgattattaaacgggtcatgttcgggtcaagcatgtacctattatacatgggtctccacacgacacgaatacgacacgcgaacacgaattgccacccctactccaaagaggagaaccatgaactcattgcgaagctcaaatctttagaggagctgcaccagaccaatttggagtcaacaaccaatttgactgttgaac

SEQ ID NO: 21363 - DNA, 1758 bp, Cannabis sativa
ttcaccaaacgtgcaccataaaaaataagaaagaaaccataacaacactacaacaatttagagtttctattacgttaaaagataatattttttaaaaaatgtaattatttaaggaactcagaacaactgtttcgggcgtaactaatcaatttataattgtaattttttatttttacaaaatttactttttctctctcattctctgttcattcgcttgagactctctctctctctctcatcagcttgttggttacaccattgagtattgtctgtgcagcatgaagtatgatcttctgagttgaagacagcttcgatttattagtccacttagcaagatgcagcaggttgtatgcctttattttccattccagccactctttaatcccttgtatacacattttgttgtgatgacagttgagaaaaagatgttccaatgtttcgaatccattactgcataataaacaaattttatccactgttggattgaacttttgtatttgctcttttgttttaagttttcgcagcaatatcaaccatataatcaccctgtgttttggtatagttagtctgttccaaactattttgctccaacttacatctacaggctcggtaaacagtaaatcaataccaattttgatgtcataactcattgctgcaaaggcctgttgatcaatcttagccatgagcatgttcttaactgccactatcctcttccagtaccagctgcagtcgattgatgggtactcccaccagttttttcccatcaagtatacctcattgatccacttgccaaataaattgtcttctttggtggcaattgcgtgcccatacatatttccccattactgcagtattccaatcatgtatgttccaaaagcctagcccccctgctttgttaggtgaacacgtacacctgctgcaatgctacgaagccaggccccgaagtgactgtcatgcctttccaaagaaatgctctataaatgctctccgtatccttcaacaatttctttggcaagattgtgatttgaacccaatatgagtgaatagcaattaacaccgagttgatgagtgtttttcttcccatatataacaagttcttcgaactccatactttaatacgaatcaccatcttcttaagaatacatttgcattcggctgatgatatttttttggagcaaattagaatgccgaggtatctaaaaggaaggcttgctcttatgtaccctgacacttcaagcactctcttatcctcatcctctttcatcccactacaaaacacattgcgtttaaacacaaatacacaatgtgtttcttcagataattaaagttttttttttattactttgataacaattcaagtcattcaccagtacagtgtcaataatttgtgtaacatttgtttaattgtatttattaatatgttattatatatatttgtattaatatatattggacattgtgactcgatgcatagttgtattaatatatatacatacaataattaagctaattccctattgtacaaaatctataatttgcgatatatatatacatacgataattaggctaatttcttattatatagtaataataataataataataagatcagttgaaagtttattttttaatttcttttttaattttgagaatatatatatgtggtcattaaaataaaacaatagaaattctaataatgaaatgtatcatgtatggtatgtataatttgatacaaattcatgtaaaggggtgtgagtg

SEQ ID NO: 21364 - DNA, 11637 bp, Cannabis sativa
  modified_base (5593)..(5597): a, c, t, g, unknown or other
aagtttcaagtttcaacaatacaataattagtgggctttgggctaggccttcacatattggacctaaataaatataaaaattagcatttttataatatgtggtgcggtgtagtgcaatttgaaccatacattaataattcaaaagtacaaactgcaccacaccatgcagttcagaaaaaattcaaattgcgatcgaaccgcaaagaatttcaaaccctattttttacggtgtgagcattttgagcgatttaatgaacatccctagtattttgtgaaggaaatggaaaaaaaaacaagtggtgctgcaggggaagctgaaatatggcttgtatcagattcaaggtcccaacaccattcacaaaattagtccaagtgtcttcaatgtctcttcaacaaatgctcaacctaaaatctgtcaatgtagtttcaagtcttttttctattgttgcgaattctagtatgtctacttcttgtgtgtccaaaagagatttgtggcataggagactcggccacccatctccaaaaaagctagatcaagtgctaaatagtacacatgtgaaaattcccttaaacagaaaacaaaagttttgtgagacatgtaagtatggaaagtcacattctctaccatttaaactttaaaattatagagcaaaagcaccattagaattaatccataatgatatatggggaccagaacttgtgatgtccaatacaaatttgagattctatatacactttatagatggtgccttaagtgcttttgtccagttcaaaaatcttgttgaaaatcagtttgatgccaaaattaaacaccttagaactgactagggaggagagtaccaagcattctccaatctagttaaagagtgtggcgcaacctttgaccatccatgtcctcacacctctgcccaaaatggcagagcatagaggaagcatagacacatggttgaaatgggtttaacactattagcacaagcttgtatgcctttaaagtattgggttgatgctttttaaacctcagtgtatctcatcaatagatttcctacactaattatgaatggcaaaacacctcatgaagtattacacttaagaaaaccaaattacacatttctaaaaacctttagggcagcatgctatccctgtctaagaccatacagaaaccataagttccaaattcattccattaagtgtgtcaatctaggttacagtgaatctcacaaattatataaatgtttaagctcaacagccaggctttatatctctcgaaatgttttctttaatgaggatgaatttccatttcaataaggctttatcaatctgaacaacctgtcagtgtcacagcccctaatagctagtttactttgcctattcacagcagtaacttagaaagtgtctcaccaactgaacctgaaaacaccaaacaataatctgatacaaacagtttagaagctcactctgtagcataaccagatcaatccaccaattcaccatccgaaagtcaagtcgatttgacaagacaactgtttatcgacttaaattttaatactgttgatacaattaatttgaattctcaagcaacacaaggtgatgtaaaacaggttcaagttgattaacaagagatgtttaaagcagtgttcaagggtccaaacatcccatggtaacaagatcagaagttggaatacataagccaaaggtgtatctctgtaatactaagtggagagaaggtgaaggggaacccaatttagttcctgaagttctaaagcacatggagtggtcaaagtcaatgttaggtgagaacaggtcactgataaaaaacaagacatggattcttgttccaccttcacttgagtacaacatagttggaaataagtgggtttttaaagaaaatcttaatgcagatggaaactttcagaggtttaaagccagactagttacaaaaggttttcatcaaagacctaggcttgactttggtgagactttcagtcttttcattaaggcctctataatcagaattgtattggaaattattgttgcaaaagactgagaagttagacaattagatataaacaatattttcctaaatggaaagcttgaagaagctgtgtatatgacacaattagagggctttatttatcctaacaaacaagacaatgtatgtaaattagagaaatctctccatggtcaaaaataagtacctcaggcctggtttgtcgagctcaaaataacactgatcaagtaggatttccagcactccaaagctgatacaacattcttcatatataggacacctcaagtcatcatcatggcccttgtatatgtagacgataatatcattacagataacaacattgcaaagcttcaaaaattcatcacaaagctcaatcaagccttctcactcaaagatctaggaggtttaaactatttccttggtattaaagttaattatagagataactctggaatgtatttatcataaggaaaatatgttgcagcttctaaacaaattcaacatgaagaatctcaaaaccctgtcctacacctatggttggaggaaaacctctgtttctattagatggaacaaagcttgaaaatccaactgagtatagaagcttgattggtgctttacaatatcatgtccacaccataccaaacactgcgtatgtagtgaataaactaagtcaatttctgaagtgtccaacaacaactcactatagtgctgccaagagaattctataatacttgaagggaatgcagcatcatggcatccatattaaatacagtgacagtttaaacataactggttattcagatgcagaatgcgggtgttgtcacgatgataaaaaatttataggtggctatcgtgtttattttagagacactcatgtctcatggtctacaatgaagctgtaatatcttcgataatataaacatatttaatttgacatattttattaaaaatgtaattatgtggagatttcagtaggattataatcttacttaagctaattacgagttaattagtgaaatataaataaaagaataaataatgcgtaatttatgaattacgaagattttatcagattatgggagtattgtagatactattttcaaaataaaatattttacgggttgggcggctgcaaaaactcgacgaagtgatcagaaatgtcacaaaaatataagatgaattgtattggatttatatcggattaatttagaactctaagttaacggtttgacaagaattcatagaaaagagtaaattacccttaggttttattttaggtttaagttttaaggaagggcaaaatggtcattttggtggagtattagaatttttcctttagtgctttttaaattgaaccttaggattaattaaataatttttttttaagttttataaaataaggataaatgggaataatgaaccaaaaagtcaaaggaaaccatcttctctctctcatctctcgacaaccctataaaccaccagaattggagaaatttctccatcatatttacctattcttagttgatttagcaaggtttaagagttgatcaagcttggaggacccgagatcgtcgagcgtaattccactcaggtcggctcgcacatctgactattggactgaggtaagaaaagttttatgcaccgctaagtggttaaataagaagcaattataatcgttagtgcctcgattaagatcgagattaatgttatgtattttttatgactcgactgtgatcgaggtgatgataggggacaattattattgtttgtgactcgattgtaatcgaagtaatgatgagaaatgattattatcgtttgtgactcaattatgatcgagggaaagacacaactattactattgtcgtgaatgaataaagatacggtcattatcgttatgagtaattactcgtgaaactgcggataggtttcttatttatcgtttgttgtatcgagcaacaatagtgacatacgtagctcgtggataacaaggtggtaagtgtactttatgaagtaccgggattgtcagattacgatgttgtgaaatggattaagtgtgttattatgtgatgagttgtaatcaaacacattttgttatagtgtgagtaaatgaattttatactgcttatgaaattagtcacttttcttgtagagtctcagtgactcatgggatgtaagaatacgtatttatagagatgtaagattagagtgctttatgaagcactgagaatatgtagttatgtattgaataaatattcatttaatataacgatgaagttgttgactataaggtgctgtgattttctcatgttgcgtagtatatgtgattgtataaatgtttaaattatatagatatgcatgatggatatgtgtgtgagtcacgactatatatatgttatgagatgtgaatatatgcgtttacaatacttttgatctaataacttttcttgctgagtcattgtgactcacgagtgcttcgtggtgtaggtaagaaagttaaagctatattcgaccatgaatcagaggtctcccagcaatgtatatatcagatgtggtgtcttggcttctgggaagcaggatcaaccctttttctatatttgaaaatgtaaccttacttttgtaataagggttttggtaactagatgtaaaagaattttctaaacaggggatctccatattatgacagtattttgtattaaagtcttattttaatttaatcaaaggtttttaattaaaccacactttttcttaaactaatagattagttaataacaagtttgtaaaagcagacacgtggcgtccctgtgagtcagggcattacagaagcagtctgtggtgtaaaggtctagtttagaattagagtatagagctttagctcatgtggctgcagagataatatggctagagtcactatcgagtgaaatcaagttcccctagcttcaacatcattagtatggtgggataacaaaagtgctagtgcactagcatctaatccagtctatcatgctcgaacaaagcatatagaattggatttgcatttcgtgagagacagagtcctacaaaagaagtttgacatcggatatgttccttcctcaaaccaaattgcatactatttaaccaagggtctttcacattcaaggttccaacttctcgttgacaagctcagagtaaaacaattaccatctcgcttgaggggtgatgttaagaacgttgttgctcactactccatgcttaattaatcttgtaatgcattagttaaggtctgcttcatctcattgtggtccctagtgcttatcgacaaattttgttatttttctcttttgcttgtggtctgggcgtgtgtgctagtgataagtgtctatcattgtcattgtaaagcctttcctctttgctattcaaagccaatacagcacctcagcataattgagctgagttttttctttttgtgtaaaagtgctctttctttactatgttcccagacgccctgatacttaagctgacgtggagactttgctcaaagaggaattggttaggctagttctttcggaccaacttaacaacctcgtttcttgcagccactgactttannnnnttgatcctaagcctataaatatcaccttgactttattattttgcagacgtgagattaagtacgaaatagatatgagattaagagtttgagagagataaaaattgagaggtgcatagaaaagagagagagattgggtttggattttgtaagaagaatgtattgtagatgaagaagattcttgggtgtaagtgtgagagttgaaacaattagtgaggactcaatagagaaacacgtcttaactgtattgtacatattcttgctcaatcaataaagaagaattacagtggtgttccaaaactggagtagagccataaatcacatcgatgtatcagacttgaaccaatatatatcttggttttattttctttatttatgcatttattgtttctggtttcatatactccatttgcacctgttttatttccaattattgttctcgatttgttaatcttgtcattgctaatcgtttaattatttagagtttcattgattttattccgcatatttagttgtaattttcccacaaattagatctcggtaatcaatcaagaacgaaaaatcaagattctttctgctacaattcttgaagaaacttgaatatcatcaatggcgagattcgaattggataagtttgatggaactggggactttgcgctatagagagaaagtctaaaaggaatatcaatgcacctgaaagtctccaaggttcttggagatgagaacttggtagaaaagaaactagagaaaaaagaagaaatagaggagatggcatattacacgatcatcatgtatctatcaaatagtgttcaaaggaaactcatttcagagaagacatcaaaaggagtttggaataaactagaagaattatacttgaaaccatcaattgctagcaagattaatttgctagaaaggttatatagttttagaatgatttcttccctttctttagatgagaatattgatagatttaatgagattattgtaagtttggctaacataaataacaaggttgatgaagaaagccaagccatcatccaagaaagaagaagtgtatttggcaagaggaagatcaagtatggcagagatgtcattgctttggaagatgttcttgccgcacttaagtcagaatattttgaattataatttgagaaacaatccaagaaagaagaagtgtatatggcataaggaagatcacccaagaaagtgagttgaaaaagtaaacaccgtcactctcattcaagatctaagtccagagagaaggacatgaggaaatgatacttctgtggaaagtctggacacttgcaaagattttgcaggaagtatatggaacaaaaaggctttagcaaatctcacaatggagataggaaggacttttggcgccatcaccacgggaaagactctgctacagtcgtaaaagatagtgatgactgttccaaggatggagagttattctctatctcagagtctttaatgaacagggaatggattctcgattctagatgcacttatcacagatgtcctaatcaagagttattttttgattataagtcagttaatattggaggtaaagttctaatgagaaatgatcattcttgtagtgtcattggaaccgagaaggtggccatcaaacagtatgatggcataatcaaggtgctgacaaacttaaggcacctcccaaaccttagacgatatctcatatccctaggtgcgcttgaggatgaaggatatggatacaattccatgcacaaaagcttgaggatcaccaaaggttctttggtaatgatgaaaggtaaaaacaacaatggtttatatgttctctaaggagttcctgccccagatggtgaggtaagtatggtgaaaggactagaatcagaggtgaaattttggcaccgcgcacagacttggacatatcagtgaacaaagactcaaagaattgcacaaataaggtatcattgaaaatttaaactcttgcgccttaccattttgtgaagcttgtgttttagggaaacaacataagataaagctcactctggcaaggcacacagctaaaaagatacttgaatatgtgcacactgatcattaggagccatataaagtgcctactcactctggttagcaatactttcttttaatagttgatgattatagtcggtgtgtttggacctatttcttaaccactaaggatgagtgtctggaacaatttagaaattggaaaactcaggtggaaacccaagctaaccttaaaattaagaaccttaggaatgataatgggttagagtttgttaactttgaatttgacaagatttatcaagaatttagaattactaggcatagaaccgtagtgaagaccccaaagaaaatggtgtagctgaaagaatgaatcaaacattattgaacaaagttagatgtttaatgtcagttccgaattagaaaaaccattttggggagaagccttagcaaccgcaacttaccttgtaaaatggagcccgaatagagtgataaaccttaagacaccttatgaaatgtggtacaataggacccccatcctaacacatttaaaaacatttggttgtacaacatatgtacaccaatctattgacaagctggaacctacgtccgtaaagggaactttcttaggttatgcctaggaaccaaggagtatagaatctacattttcaggaagggtaacccaaaggttgtgattgctagaaatattgtttttaattagttgaattatcctctgattcaggaaaaataggaaacaaagacaccgcaaatgtggaagtggagtagggaatgaagctcccagaagaaggttcacaggtagaagataatgtggagccggaagacaatgcacatatgtaagcttctgtggagctgaaagaacaagataatgaagaccaaacagaggcattggaaggattcagacagacaggtcaagaaggttatcagttcgcttgtgatagaacccgaagagaaattcatcatccggcaaggtttgcaaaagcaaacataatagcatttgcactggtggtagttcaacataaaaaaattgaagatcccaaaagctatgaagaggaaatttcaggtgcaaacaagtataaatggctccatgccatggatgacgagatggattcactatagaagaacaagactcaggtagttgtgttgatgccagagaacaagaaaattgtggagtgcaaataaattgtcaaggtaaaaaagggaatcaatgagtattagtgaggttcaaagctaggttggtggctaagggttttacttaggaaggtatagactatattaaaattttctcacctaggtaaaatacaagatgatgaggctaatgctatccttggcagcacacttggactttaaagttgaaaaacttgatattaagactgcttttcttaatggattcctggatgaagagatctatatgaagcaatcacctaggtttcaagtggaaggaaaaagagttgaattagtgtgcaagcttaatagatctttgtatggtttgaaatagtgtccaagacaatggaataaaatattcgatacatatatggattaaattgggctcaaacgatttgcatatgatcatttcttatattttaagaatctagagcaatctacagttgtgttcttattgctctatgtggatgatatgctcattatgagcaaagataaattaatgatcaaaagtattaaagccaagctcaagagaaaattttagatgaaagagcttggaccagttcaaaagatacttggtatcaaagtctcacatatttggaaggaagaaactattagcttaaagcagtccagatacatcaaaaaaattattcagaagttcagcatggaagatgcaaagtacatccattctgttagggggtgtcaaagtaataatgtcctaacagtataaaagagaaagaagaaatgaaggatgtagcttatgcaatgattcttggatgcttaatgaacgtaacggtgagcacgagacctgacatagctcacgctttaagcatcctaagccagttcatgtccaattcgagaatggaacaatgaaaagcccttaaatggttattgatatatttgaagggcacttgaaattatggtctgacctatgagaaagcaaaaagagaattgtaatggaaagggttcatggatgcgtactacacctcaaatagagatactagaaaatcaagcactttatatgttttcttgacaaactaaaactgtataagttggaaggcctagtaacactctgtggttgatctattaagtccaatcttagtgaatacgccttgaaagtttaattaattagaaaatatatttatggaagaatattaattttaaaatacacaatggtataatggtatgttaattacaaattttttttgaaagtgtatttaatttaagttcatattaaaatgggatattattaaattatttgtttattttatttcttttttttttttttcaatttaaaacaaaaaatgataatgttggtaaaattattttattaaaaaataagacgataaatacttacgtatttattattttatttactatatatagtggaataatagttctcaaattaaatgtttttttttttgagaaaatgttctcaaattaaatttaatatattaattaaatatgcttatttatactatttatataacatgcctatattatttaattatcaattaatagtgtacttgttttattcaaaaaaaaaaatagtgtacttgttttttttttaaaaaaaaaacataattagattatttttatttttgaaaatatagtaatattttcaaataaactaacaaacttgcattaattaaactatacataagtaatgtttttacttagtataaatatatcttacaatattttttcacaattggattatcatgattatatatttgttataaattaatggttaaaaatgaacaatgtgtatatagaagaaagggaaattatatggtttgtttattttaggaaagacaaaaatgaagaaaaaaaatcataatataaaatattacataacaatttggtttattgtattataatatgaaatagaaaataatgttttttgaatgggaagttctatttgcatggtatgaaataataagtacattataatatttaaaaaaataaacttaaattaatttataaaattcactcttaatattttcttacaaatttttctcacattattttgtgttaatgtcaatattttatgtaattttttttattttctaatatttaataatttattttttttattggtatattttttaagaatatgagttgaaatataaaaattaagaaaaaaactaatataattaaagatatatattttatataaaatataaattattaaaatgaggtgtatttataaattttttgggtacaaataaaattttccttttagaatagaagggtggtcattttgtgtgatgcgaataaggtagcatatgcattggcaaaatctgttactagtttcattaaagttagtatttggacagatacttatcctagatttttgaatactttagtagatttgagtaatttataaaaatagttccttcttttagaaaaagaattgaagggtagttttctaattttatacattttaaaaattatatattttttccaaagtattggatcttatggtgttggaatggtagctcgggatagtaatggtcagttgattgaagcttttactgctctacgggtagggaatgttcaaccggctactgttgaagcttttgggattaaggaagctttgagttggatcaagggtaaaaattggtctaatgttattgttgaaaccgattcccttgtgtcagtccaagcactttcaagtttagtttttatgccttcagtttttagtttgttaatttctgattgtaaacgtttgttaaattgtttgtgtgatgtgtctgtttcttttgtgtcgcgatctgctaacaaaaccgctaattgtcttactcgcggttcttgttattggtctgactgcatctttaatgtcagcaatgtc

SEQ ID NO: 21365 - DNA, 2562 bp, Cannabis sativa
caagaaggatccaatttttttttttagaattttttctaaagaattgtagcgatcctaaaaaaattcggtgttcttgtatcgattgtggtaatgtataaaaagaaaatattatcatgttaaataatcatgtattttgtcgtggaattgataaaaattatactaaatggtattggcatggtgtatcgataaagggtgacccatattcattaggtaggtgaggggttgatgatcattttgaaagtaataattgtgatgatcatccaacagaattgcttgatgatgctcaaaaaaatttattcatgatcctaaaaaatttgacaccatgattagagatgcaaatagatcattatttagtggttgtgaaaaatgacgactatcattaatggtgaaattttataacaaaaagggagagaatggagtaacagataagtattttagtcaatttctatctacttttaaagagattttgtcgatggaaaattgctttctagattgacgtatgaggtgaagaaaacttttaagtccaatagggttgaagtatgagaatattcatgcatgtccaaacaattacattttgtatagtaaagagtatgctaacatggaaacttatctagaatgtggtttgccaccgtataagcccaacaatagtaaggagatctagaaacttattccaaagaaagtcttgtggtacttacttttgatttcgcagctcaagcatttttatcgaagtgtagaaacttttgaacacttattatggcacaagaataggtgagtaacagacggcaaactttgacatcctactgatttataggcttggagaaaagtaaattatttaaatccagaattcccagctgaaacaagacatctacaccttggtctatctgtcgatagactaaatccacatagatctcttagcaatcgacatagttcagggcatgtgttccttgttatgtacaaccttccaccttggttggtgatgaaatggaaagttatgatgctatcgctaatgattttaggtcctaaacaattgggacataatattgatgtttatttggaaccgctagttgatgacttaaaagagttgtacgaaaatggtattgatgcatacgatagttttatgaaagaagttttcaatttgaaagttgtactgttgtggactgttaatgattaccctgcgtacagtaatctatccgggttgaacacaaaaggctaccaaggtttctctatttgttgtaataatacacgagctagtcagttgtcaaatagatgcaaaatgtgtcatatgggccatcgacgatatttgcccctaagtcaccctgatagaaataaaaaacaagcatttgacagtactgtataacgagaagttgctcctttgccactttcagggcgacaaattcttgaagaagttgagaatatggagttcaactatagaaagggcatgaaaaagaaaaaactaatggttgttttcaaataaaatcaattttttcttccatacttgaaagatttactcgtgagacattgtttttgatgtcatgcacattgtaaataatgtgtgtgaaaatattattggtatgtttcttgatatccccggtcaaagtaaaaatgctttgtctagtcatttagaccttgttgagttttgtataagacacgatttgacacctatggataaaggcaagcactcatatttacctactacaaacaagccgcatgcaagtcatttgcaaagataaagtggtcgatgggtattcatctaaagtttgaaacttagtgtctatggaagaattaaaattaataggtattaatcacatgattatcacacattaatgctacaattacttccaatttctattcgatcagtcctacctagaaaagttcacgaaactttgacaaagttttgcatattctttaataaaatttgtgggaagaattgaaaatgaagaaattgaattcattgtaagatgacatagttaagaatctatgtaatcttaaaaaatattttcctccatcattctttgacatcatggtacatttgatggtctatcttgtaagagaagcaaagttgtatgggctagtttagacgagatggatgtatccatttgaaaggaccgaatataaaggtgttgaaaggttacatgcgtaatcacaatcagcctaaagcttgtatggttgagtgttatatatcagaagagacaatagaattttgctcaaaatatgtatcatgagttgatgcaattggacttagcaagccacaaaattactcaaatggggttgatagaaggttacgagggaaataatcaatggtgactgtatctaaaatagaagtagatcaagctcatttgctcttgcttgagaataatcttgaagtccaatcatatataacgtaagttatatattatttttatttaactttatactttatatttttcttgatcaagtgaaattaaaattgtatataacatataatttatcactttagtgatcacttaaaattattacaatcaatgattctaaataaggttaagaataaacagagatggatactagaggagcatcgtaaaacat

SEQ ID NO: 21366 - DNA, 2318 bp, Cannabis sativa
  modified_base (1838)..(1841): a, c, t, g, unknown or other
  modified_base (2248)..(2257): a, c, t, g, unknown or other
atctagatcttggtaaaatataatccaacggtagcgggtgtgttggggcgcatagtaaaaataattctacctagaacgtatacgctagcccgtataaatgacacagtaatatctcgagccaagaatgccaaccacttgaagaagtattaatagtgaggctgtaataattgttgttggagacgaagtaagaagtctcttatctataagtagtttatcttcaatcaacgatgaaatttgaaatgtcttccatttcaatgtaatttgaatatgatgtaactctaaactttgctataatatatgatatgacaagttttagggagacaattgtgcataacattcaaaagcagaaataacatacctcaagcgtctacttggataaatgccagcatatgtttagggggagaatgaagcaaaaaaaaaatctcaagactatggggataggggtgggcaatattcaattcaatccaattgaactaaacagatccattaaatccaactacaaaaaattagatatccaattacaattgtatttgattggatgctaaaagtgatacgagccacaccaacagttgtgatgaaacccgataccaattattgtagcgtctaagaattttcaaaatttggatgtcgaatcgcaacccaatacttagttaagcatgaaccttaatatgaaggaagatacttcaggttgaacaccacaaggaataccccttcatgagttcgaatagttctctcaagaactcaagaagaaaacctctcaaaattttattcataataatttaattttctaacgtgtttataaggctttatatagccaacttacaaccaagaaaaaaaggaaactaaaacaaagataattttccaaataaaacaaagacaaaataaagaaaacaaaattaaaaaggaaagttgtcaatagccttgaaaaacgcaatcaacaacaaaagagtcctaaattgagtctaatttgatgagaagcacaaatttttgctctccttcagtgttgaccacgatcttctcttgttttagaattctttggactaggatgttaagttcctatttgaatcttttggctcgcgccttagtcacctgaccaactcgaacttgacttgtatctttagccttagtgtcttcatcattcccccctcttgagaaggatttgtcctcaaatcatcaccttaatcaaaagggctcaaaccggcaacattaaaagtagcactaacattatattctctaggtaaattgagtcagtaggcattgtcattgatcctttcaagtacttgaaacagaccatcacctcgaggaagtaatttggaatgtctttggggtgggaatcgttctttcctcatgtgtagccatacccaatcactgggctcaaaaacctgcttgtgacgacccttgttagcttgctttatgtattgctcagtccatctctctatgttgagtcttgaccactcatggatttgcttcacaaattctgctttctttttgccatctagattcaaatgctcagaaacaggtaaaggtgatatatccaaatgagtcaaaggattaaaccatacccaatttcaaatggtgaaaatttagtagaagaatgcatagaatgattataagcaaactcaacatgtggtaaacaatcttcccaagtcttaatatttttacttatgatagccctcaataaagtggataaagttatattaactatttctgtttgaccatcagtttgagaatgacaagtagtagaaaaaatagttttgtcctaagttttccccacaatgtcttccaaaagtaacttaagaacttagcatccctatctgatacaattgttctaggcatannnngtaatctcacaatctccctgaaaaataaatctgcaacattagaatcatgatcaattttatgacaaaggtaaaatgagccatcttagaaaatctatctaccaccacaaagattgaattcctcctccatttactcctaggtaaacctaacacaaaatccattgaaatatcaacccatggagaacgaggaataggtaggagtgtgtaaagaccatttggctgaactcttgattcagcttgcttacaagtgacacatctaccacaaattcgctaaaaatctcttttcatgtggggccaaaagatgtgttcttgtaatataactaaggtcttagcaactccaaaatgtcccataagccctcctccataggattctcgaactaaaaactccagatctctagcccttgattccnnnnnnnnnnagagcataatcaagatctgaatatggatctctttctcttcttctttgatgctgattttcca

SEQ ID NO: 21367 - DNA, 2312 bp, Cannabis sativa
taaaatgtttttgaaaccccatgtaattttcactattacatttataattataatttttatattttatagtagatatatgttatttaacttaggaatttttgtaggaaatttggagatataatgaattattaaattcgctatcacataaatttatctttttattatattgcaaccctcattttatttacacaaagaaaaatcagattcatagcaacctatagctagtagcaagagatgaaccctccaatgagacgtatatgaaatcatgaacctcttcaaacagaatttattactattgattcttcttataatgagtgggaaagaagtactaagcaaaaaattagaaatgaaaaaaagaatgaagctaacagaccctgtaaaattatgatagtgttgtgactaatatcgttattatttgatgaaactagtacaataagaaagctcatcaccatactatcatatgaactaaacgttgactagattagagaaaagtttgatatggcgagagaaagagaagaaaaatagtagactacatacaattatattgtatacttatgtaaagttgtaaaataaatggaagaaaaaagaatacttgtattcagaattagacaacacttggtttaaaaatagtagtcatgcctttcaagaagtcttgttctggcaaatgcaaatggtaagagtctctcccacacatgaccaaaaccacgagaattttgtgtacttcatctccaaatttgtcaccacacccacatgtcttcttgacctggtcaaatcacattcactacaatctctctctctcacacacacacacaaacacgcatttttttctctataaagagagagaatagcagcaagaaagcatagctgagaagatggcaactgaatttgaaattttaaaactgaaggtattctcttactattctattctaactttcaacattaatggttgctagtctgccttataactttgatattttaatgcttcggcagagatatgaattaaaagtaaacatgcactgcccaggatgcgtcgaaaaagtcagaaaactcctcagaaaagtagaaggtgttaacttctcttttatctttaatgttctcgtttttagtagctaaattgtttcttatttctttctctcacttttggggtactgtttctaactgaatacaatgtcttgcaatattatttagcaatgaagtggcagctacttatgtcttgtaatatttaggattatgagctaagctttgaattcaggtgtatacactgtaaccattgatgctgaacaaaagctggccttggtcgtaggcagtgtggattcttcaactttgattaagaagttggcagtttctggtaaatacgcagagcttcattctccaagtctcaaccaacaagaatttgaaatgaacagatatcaaatgcaaaacaaccaaacactaagcctaaataacggccccactacctccagagctcagcatgtttcccccacatccttttgtggtgaagaagaacaagaatggccatcaggattgttccaaagccaggatacaggagcagaagcaataacaggtcaacacagtcagaatttcatttccgcaacaatggtgaataacatgcatacaggcaacaatggtattggtgctgattttcttggtttcaggagccatgaatatggtgcatttcaagagcacaatgcagggccatgggtgtataaagaataaggatgatgaatactaacatgcaggcgtactaactactcagtagagtagataatgaataggcacagtaactatatcatgacaatataagcaaagcaacatgattacctcaactccagatgatgatgatggttaagtattaacccatttttcctgaattcttagtagtctgactagtcttttatgtttggatctgcaccaaccccctgactattataaataagaatggaagggctcatttaaaacacaacaacgtgttgtattgtattgtatcgtattgtgctggattgtattgtattagtattctttaatacaatactatgtttggtgttaacttgtattaattatgtaaaattatgttacctttaccataaactctaccctaacctcgactctggccctagacccggaccccatctgcacacctcgacctcagactcgaaccccagggcaggattcaaggttcgggatcggggtccaaggccaaggccggaattcgagtccaaggccaaggctgggcaagggcctagggcccaagtccgagtgcaggtcagggtccgagtccagatttagggtttggggttcgaggttcgagtgcg

SEQ ID NO: 21368 - DNA, 3045 bp, Cannabis sativa
aaagaaattctatgatgttgttcagtaaataatgcagtctggatgtgataagtaatcttacaataaaagtgtgctattagcttatagatccaatttatttatcagaatatataaattatgaattattttaccaaaatgtttgttgtttttcttgataagaaagcttaagtacctcaaaataagtcgtcggatgaatggatcagacaaaacttgtgcccaaaccaaatccagatttgtagatctcagtagaataacttcccaatcagagaaagcggaggaaagtatttcctcagcctcattataaacatcctacagagtgaaacaaattagatccttgtagacactctttaagtttcaggaagtacagaaacattgttattgtataaactcacattttcagctgctggatttgagaagccgatcaattggcaaaatgctggcaggggagcagtcaagaaaaatgtaaattgacttccattttgtgctatatccgcatcagatgggtttttaaatgatggtctcaaaggtgaaagaagtagtgcagctggctcccctctttctgcaccatgtataacctgaaatacatacattttcgatgtaagtagctttacaaagaattcacattcagacgaaccaatgctccacactgaaatctagctaatgatttatcacctaaattagggagcatcaagacagccaaacaatctccagaaaatcattttgtctaacaatgagaacttgattttgtctaaactaaatagcttattgaggtattgagcttcctagaaaagcatcaacacaaccacgcgcttttaaaagcacttgaattacaaaaatctacatatgattattgtagccacataaaagatgtgtaccaacaacttatatgacaaaaccttaggcaaatgtagttagctacatctaattttttcttttccttgctcatgtgagtatgtcacagaagttactcgagtacatgagtcgcatgagaactgtaaaccataataataataaatatctttttgaaaaaaaaaagaagaagaaaaaagtatagtgaaaattgaacaaaatccgctttacaaagttctttttgctgtagcctgtaaaaagcaatgcccaagttttgacaaacctgccttgaatgcatggctattgtcgctgtcaataatcaagaaaagaggtctacgtgtaaatggaataatatctccaggatataaattatttgaacctgaaattcaacaaaagacctaacattagtagagcaataagacactctgaaatagtagactaaaactgaaaaatgctcatataagaataattcttgcttatatgatatgatttgaagggtacctaccaccatgtcctctaggcccgaaccataaatatttatcataatatccacttgaagactctcccttgtcaattacacaagaatgagatagagtactgctaagctcctggactttgtttcttgataatttttgagaccctcccatgtattccgttggggcaacattacgaccaaccttccctgcaaaagtgaactccaaggttacttatcctggataactacacaagacaatttagtttttagcaacataaaagcaacctaacctgaggctgaaaggtacaccagcataacactatctggaggtagctcctcagaaattgttgccataacctgccagcacatcatggagataaacataagctttgcaaacagcagataaataacagaagagtaagacgggcataggcatattaaaatttatgtttcataaacaattctcaacatagcctcaatcagaggaaacagtttggaagatgggccccttagcttgatggaaacattagcccaatggaaacaaacatggaactgcattaaacaccattgatcattggcttaagaaaaccatattttctaactcaccgctattaaatgggtcacagaaggacgatagagaatagctttccttgggtttggaggtaaagatggatcagtcatgtctgctgccaagtttatatcgattaatccagaagccccagaatgatcagtaaaagaaccattatcctttgattctagtggacgcttctggtaaaaggatccagtgggctcccattctaaagattgtagcattctaaatgtgtctaatgtaagttcagcgaatttaacctgcatgtaagagtatatttacattatttttttttctcaaagcatttctaacgatgatagaaccccaggcgaactaaaattgcccatcataatgaaataaatatctcacctcattccggtgatagcttgttagtaacgcatctttaaatttcaagaccttctttgcatgaaatcgagtcacatacgggagagatgctggatgagaatcataagtagcacaataacgcaaaggtcgagcattcataaaggacgtatcaactttaataaatctaacaatttcttgcaccacttgtctccattctttgaaattagtatcctgcaatgagatagtttaaatgtcctaaatcaagtaagagaaactatgaaagcaaaaaaataaaaataaaaattaagagaaactatgaaagcatacaggggctaatttataaatatcaagagatacttaaaattcaacaagcaaagaagaagccaagtcttttcaaaatacaaacatatattacttttattattaaatacgtaatttaagtcacataaattgcacaacacagcacataacgctaagaaaattatattgcaaacatcatcagatagtctcacagatacaaattaattagcagattaaaattgccacatcaagataattgagaaggattaagaaacaatagaatcaacacagtgctttggaccagattgacacgttttccttatccccaacacacataaaagcaaaagctgtctctctataaattaactcctaaactaatctctctggcagtaaagcaaacctaatggcacttaaatggcctacgacttcatcataatgtcaactgtttaaagaatcacaatttttattcttgccctcctactaaact

SEQ ID NO: 21369 - DNA, 3852 bp, Cannabis sativa
gtaaaataatttccaacaatacccccactaacggtcaacaaagacaaaaattactaaaagtgggagagaagccattccaaggtccacttgacaggatgatggagagatacaatttaaaacaaagtaaggcacgcgacaatggaaagggtaaacaggtttgctcaattcctccctgttctattcagaattccattttggtgaagcctcgatagatatgtgaggaggacattttgaaaaagcactcatctagacctgtgcctaatcctaaagatgctaggattatagcttcaattttaccccacattgggcctacattcgaacaaaccattgcaagcccacattcaaatatttgcaagtccagaatacctcattaccaccctgagcccacttatttcccatggcccaaagatgctaagcaaatgggattgaatgaagaattaatgggccctccccaagttgacacttatgaactgggactagttatttttcatgaacctgaggatgtatccaatctcattcacaaatgtactcataccaagaaaagaaaggttggtcttacactggtgccgatggttcaatatgaaaagcatgtggaagttaactttgaacaagcaactccaaaatttcctggattcacccctgattctctggaaacacctttcaaactgggaagtggagccgcctcaacatcggcttcttcaaagaaaaatgagaagaaaaagataagacaaagtgttcgtcagaagaaagaggttgtgactggaagtgatggaaaggaagaaggtgaaatcgtggataggataactagaagtcttgaaaatgaaattgaacagttggtggaggttaaagttgatgtcgtaccaaattttcatgtgggggaggaggcggcccttatcaagcccccctcgttacaatgagaatcctattgtggaattgtcgtggcctggcaacccaagcgctttttgctagggagagaaaatacaaaccagagtgtatttttctcatgaagatgaaggtcaataaggagaagatgagagatattgcgtggagaattggttactcagagtttgcttgtgtcccggctgatggtttggcggggggatatgtttattttggtacccggttactcggtttcatgttttgttcatgaatgaaagtatcttggaagtgatggtattcaatactgagaattcatcttattggcatctttttgcagtctacgaaatcccttatgaaagagataaagttgtgttctggaatagtttggaaaggtgagttttccaatgcaatgttccgtagctggtaattggtgatcttaatgccattgctgatcctttggataaatgtggtggttctcgtatttctttgcaggatctgttttggcttccaaattttatgttgaatatgggagctgtggattttggctttcgtggttttaaatatacttggcataacaagagattttagggtggtttggttagagaaaggctggatagagtcgtggcttcctatgattggatttgtgagtatccaaatgccggtgtcaccaatctaccaatctctgtctctgatcatggacccatgattctggatttggatatggaaaaaatctatggctacaagccatttcggtttattgaagccgggttggaaatcaagtcttgcaaagatacaatcttggaaaattagaaaaacgacactcgagatgcaacaagaaacatagtttgtaaccttgacaagctgtgacgagtactacagaagtggagaaaggaaaacttcggtgactgcgataacttgataaaaggtttggaaaatagactgaggtggatacaatctcaagatattaatgatgctttaattagggaagaggaggaaatacatttgaagttgaaatatttgtggaaaagaaaagaaagcatgtggtgtcaaaagtcaagagaggtgtggcttaaattgggcgatagaaactttgcgtttttccatgcctctacagtgatttgaagaagaaggaatagaatatcagcactcttagacaagaacggaaggaattgggaggatcataagcacttaacaaggatagttaatgagtatttttcaggaattatttcgttcagagaaccctatcatatcagaagatcttgatagtttgttcaaaaataaaatagatgcaagcacaaatagtcttcttgtggcaattccgtcttcggatgaaattaaaagtgttatttttagtcttcatccacttaaagcccccggacctgatgggttctcgggttgtttctttcgaagaaattgggaaatcatgggggatggagtttgtttggccattgtggaattctttcaatcaggtactctgaaccccaagattaattatagctttatttgcctcataccgaaagtggagaatccaaaaaggatggaattttttcagacccataagcttgtgcaattttatttataagatcattgctaagctcttatcaaatagattgcgtccttgtttggagaccttgattaatcctttacagtcggcctttatttcgggaagatagatagcggaatcctgaattttgacacaggagattgttcacaagattaaaaggaagaatgggaagggtggcttaatggcggttaaactggatatgcataaagcttacgacaaaatggaatgggaatttcttaggcgattcctcatggcaaatggatttgacgagaagagctgtaatttattaatgtcctgtgtctgcagtgtctcctactcggctctccttaatgggagttctctaaagaagttcgtgcctcaaagagggttacgacaaggtgatcccttgtccttgtttctctttttactttgtcaagaggttctatctaaactcttgttacgagccgagagtaggggctctatccatggaattaaaatctctcaggatgcttcgtctatttctcacttgatgtttgccgatgaaaccatcctttttacgagagttaatgaggtggaagctaaggaattgttgaattgtctctcaatatacgaaaaatggtcgggacaaagatctagtaaatccaaaacagtgttcttttctccaataatttaaatggtaatcgaagacaatcaattttgaaagaattgaatgttaaggaagcaaatggtgaggaaaaacacctggggaacccgtttgttttcaagaggagaagaagagaagaatatgaatccttgaaagccaagatgttgagccgtttggagggatggaaaatgagacttttatcctatgctgggagaactgtattaataaaatcagtcgcttctgccttgccaatctatgggatgtcaaccaacaaaatctcagttagtgcttgtaggagcttagatggtcttatgagaaaattttggtggctgaggagcttggaaaaggatagatttcttactgtgaaatcttgggacagtctttgccaaccgaagagcgtaggaggcttaggctttcgtagattcaaagattttaatcgtgctttgcttgcaaaattggcttggagcttggcttgtaaggagcctaaaccgtgggttcaatgtttactcaaaaggtacggtaaaatagagagcttctgggaggttgataaaaaacaaagtgattcgtttcaatggaggaaattcttgaagttaggaacattattaaataaggtgcccacacggtagttgctaatgggtcgacaatcgatctttggactcaaccttggatcccctggcttgattatggggactttcgaaggcttatgaatcaattcaacctaatctatccagagattaaaattgtagctgatctctcacagggcaactcgtggaatagagataaagta

SEQ ID NO: 21370 - DNA, 3469 bp, Cannabis sativa
acatcataagtgaatgcatcaacacctcccaaaataaaatttccctctttgtgtagcttagtggcaacactaaaaattgtgcattgtcagtctttggaaacctcatagtcatgagcgtcaatcatggctctaagacctttaatttgggtaggagaaatttcttcaatgaccaatggatcatttgcggcattaaaactcttcaaataatctttgtaattgatggccagatcatccaacttgaactcaattactatttctttaattttcaaagcagaagatgagcagagagtaggcaaccacttagagacttcttcagtaaggatgactcctattgggtatgtatcatccttgatactgtcaataatctctaatttacgcaaaatatccccacgaaatataagaatcttcagcgggctaaaaaattgaatcaacaatgtgattagtaataggaaaatctcagggttgaaaaccttgggaaactacttatcaccaattacaaagacaaaggagtcccaacccttgtttgaagaaggaagaccatgaactaggtaattagggcttttcacaaacatcaaacaacaaccaaacccaaaattgtttgaataaagttggggaggagttggatcatagagactctagtgagagaaagaatataaaccagaaaaggagggacattgaatttcaaaagctccatgcagttcccagtgaccatagtttcacctttggctaattcaacttccttaaaattttggtccaattcttgtttcgtcaacatgtggaaagtgatcccttatggaatagggtacttaacacatatctcattgaaagtgacttcatactcgattatgaattcagaatcctcaatataagaagctttctcagtaatagattttgttctacccttagaagatttgaagtcattattaagacgaatggaatcaaagagctagaggaaagaaggaaatttcaaagtggaaggggagaaaagctcgaagaaaataattcaagatagggatttgaaaaaaatcacagaagtaacttaaactttttaacttctccttatatatatatcttttaaatttaaaacaagaataaaaatgaaatattcgggaagtaaaagcgagtacaatttccaaaagttttgaaatgattacctattagatcaatcaatgtacattaatgacatgtgacaatattttttggtaaccggtttctcgacatcaaagctcaaactaaaatagtcacaagttcaaatatcgtagaaccaaggggaaattgtatgtgagaaaaataattgggaataaaatgtatttttgggatgattcaaataaagaaagagttgatgttatgttgtgatagctctttaacagaaacacactgtttcatttaaaagagagcagagcaaaatgcacacagaaaagagaagcagagctcatagatgaaaggattcggatcagggctcgggaaaggaaagaataataagcacttaaagagctctgaaaatgagaagaggaaagcacgaagagaagttatccacgtgggccaattagaataagagaaatgaaggaagctaacgatcctccgggcctatcaatagaagaccccctcattcaaaaaaacagatgaatttttgctcacatcaaactagtcaaaactctgttggaatacattctcaagaaccctttgagctcaagaaacagtcacaccaaacaaattaagagaaaaattgtgtaaactgttagagattatattttgattaaactgaatctagtgtaaagaattcaaagtttgaatataatttgttattgaactaatttttggcatcaacacacataacatgtactttttattgtaattactccaaatcaaacggggcatagtggtcaatacgatataaatgagatcaaccaaagtgctctatatggcatgagataagtcactatgtatgataattgcttggtgaaccctaaaaggtggtacttgctattcatattgcataatacataatacatactcattgtactttttttcagagaatatataccttatgcatttgtcttctttttttcattgtttgatttcattgttgaaaattgtgggcatgaaacactaccaatctcatctacctccatttgttaatttgtaaataagatattatatatatgcatggtggaggagggtcatatcatatcacaaaagctttcatagcaccttctttgaaccatctcaaaagttacaaatccttaccatattcatatatagtaccaacatctctctttactctccaaatttagattattattattattatcatcattataattttggttgctatgtattcaaaggataaattcttgcatgtccacaatggattttgccgacttgtatttgagagttatatttgactaatatttaatatttctagaagggagtggaaatagatttttcttttttcttttccttattattattattatagattagatttacaaaatgtttctttgttgaccacacaaaaatttgacaacaagtgtcgaaccaacaaggcatgaggccaatatggagagtagcttaaattaatgttaaaattaatatatattttaagatgtggaattagaataccacacacacttttttaattttcagatcattgatccacactcgagacctaacacttttttaatgttatgttgttcattactgttaagttgttaagtggtctttagttaagttgttttctgactatggtcaaggtttttaggaaggttagttaagtttgttaactatgatttctgatcttctttaaatagtattctattttctttcatttaataaagttttacttttattttttattctgcaataccaatccataactattctcatctcttgtttgctttcatttttaacaataaaaagtaaatttagtaaaaaaggattacctcattccatagtctcaataatatatccctctgtcatataccaaatgaataaatatatgaataatattaaagtatattaaaaatatcagaatatgggttattgtatataattacagaatcatcagttcaacattataactaagtcacttatcgttatattgatgtaattaatattaaacttcatatatatattttaattcaataactaatataaaaaagaaaaatttgatattatatgcttaaaattaatttatccactaaaaatatgctagcatatttggatcatgcaaaatatacttctaaacaaatatacttctaggatactcacaccacacacacacacactctactagtcggacaatccatcaccggagctagtgttgtcggtcgccttacatttcaaaaaaacttctctcgttttttgcatttttttcttctggtttactagctttttgcgatattattttgcaatatttagcgatgtatttgcaatgatagaataaatctgaggtcagggatgaagttta

SEQ ID NO: 21371 - DNA, 2956 bp, Cannabis sativa
  modified_base (2435)..(2444): a, c, t, g, unknown or other
  modified_base (2594)..(2618): a, c, t, g, unknown or other
gtattatttatagaagaagaagaatgaaagaagttactatttgtatattattattattattattattattattattatttttgtggtgaataattttcacatgaaaatgtatttaaatattaaagttattgggtggttccttcatttatagatagttttttcaactttgaattcaattagtatacactataattattttgtttgtgaaatttaattagaataatttactattgagaaaatatggtttaaattacatattatttttagtcttaaaaaaatattagttttagtattgtaaattattttaaatttttaaaaatttaaagaatattattataaataaatatatacaatgtatattggcatataaaaacaatcattattcaactaagaaaacaccataaaaattttcaaagttattttatttatttttttacatctaattgtaattttggtttttttatcctttatataaattcatgttacgaaaatatttatttaaatgctaagtgcaagagtaatatcatgaatattatttttgttacataaaagtattactattagaataatttagaataatttaatattatgtttcacatattttaacaatattttttataaaaaaaaaatggctacataaaagtgttacatattttttgttacatagtcaacttatttttctctttcaaatttttgttattaatttatgattttttttttttaaaaaagaaagccgtttattgattgctctccttgctgtgtatctggtatatattattattttgaattgtacttagtaattactaaataataaatctatatataaaaacaaaaattagtattaaaatattgactttaagtaagaagttgatagtgagattttgttttttttttgtttttattgacaataaaatatatttttttgcaggaatatcaatcataaaattagatctcaagtggagaatttgatttaaaagacttgcacataatttgatgacctcacaaaatagataagctacgtatgtggtgatgaaatttacttcaaaatatatagtttcatcatatatattaatatttgttttgtccttattatacaatattatatatatatatatatatgcatggccacaaaaaaaaaaaaacaaacaaaaaaacagaaaaacccaagagatgtgttaaggataatatagatgcatgtggaatcacatgttcttcaaattaattaatatgaaaaaggttgttcaagatgtaaactgttaatattaaaaaataaaaaatgttcttataaaaaattttaactcttaacttctattatataatataagttagtttaattaacttaaaaataaatacatttttttcgattctttttttcactagggcatttgtccttatttttatgtgggtccacccctaatcacaattaagtggctaaattactacttaaaatttccaatatttcaaataaaggtccatatgtcatacaattattttcatttttatccaactttcttatctctttagtcattttaataattttgtaagaccgtatgtcaggtacatcagatcatcttataattagattattagtagtgacttcgagaatctccattatagatggcacaatccacgtcaagttgatcttaagagggcgaaacctttaatcaactcaccattgttgttattacaaactttgtgtgctgtgttaagattcgaacacaattataccacatgactataactactttcaacatatttgagatttaaaaaacttatgcatatataataataaaattatttaaccacaaaaatctatatattattattattattttcataaaaaatctatatatttacatcaaaatttgaatagctagtcatgtattattattattattctttattctactgttttttattaaaaaaaaatcaaatactgtaatctattgtcgtttttggttattgttgtcgcttctttctatcaactattgtcgttttccatatgtatagtagcttttaaggattttgtcggttctttattcttattgctgtcgtttatctcaaaacgtgtcatttattttcattttttatccaattttgtcgtttcttccaaatctctgtcgatctcctataatgttgtcgtttctctatccttgtcgtttttattaaaagttgtcgttttataaactattgtcttttttcttccacattaatttatttttttaaaagatagttgatacagattaaaataacaaaaataaaaaatttacaaaattactcaaggattttctttcatctttattattaattctaagggcatatagagatatccaaacaataaaatcttaatacataaaaaaaactcaaaattaggaaatgtaacttctaacccaaatacctacaaaattaaaaaataataatatattattattatnnnnnnnnnnattattattattattattccaactacccatactaatgatttaatgtcaatgtttggagctttattattatttttgagtttttgcagcagtaattcaacacaaagtagaaaatcactactaattaaccatgtattattattattattattnnnnnnnnnnnnnnnnnnnnnnnnnttattattattattattatagactggtcgaatacaaagagaaatgtattacaattaattacagaagtataataataattagttactaataacagattaaattatgtatatttactgtgaacatgtagtgattagattaaattagataaacaaggctgtaaaaatatacggaaattaaatattgatgtgcatgatattgatttgaaaatgattgatacttcataacatcttttgactttgtttacaatttttttctttgatcaacgcttaattatacaacttagtctacgcacgtgcatggaaaaaaaatttaaagacctccacatgtgtacgtacctt

SEQ ID NO: 21372 - DNA, 5837 bp, Cannabis sativa
  modified_base (2029)..(2034): a, c, t, g, unknown or other
aagattgaccgtgtgcttgcaaacagtgtagaaaagataaaagtagacaaagttttgatacatggcgtcaacaattcttgaagattgttactagtccacagggacacacccaaagataagattcattagataggtcccaaaaaatacatagtaatttatttatgcataaatagactcccttttattatatgtcacaagtttaatatattctatcttctcaaacgaatcttgccgaaacttcaagtttttgaaatcccttcgatctccttagagtgctttcttcctctcaaggcaagattcgaaaagctacctcctaaaatcttgtagaacctttttttgtaggtagcactattcttcttcttcagtctccccaggaattttcagttctatagctatagaatcgtgaactataagtgcgactttccttttatagaaaagtaaaatcttattttagttttcttcatacaagatctgatcaaactaattagaaaactaatataggataagaatataataagaaatatggctaggcaaataaagaaaaataaataattgacttttccattaaaatttactaattttgtctaactttcccaatttaaaatagcttgatacttaatacacatgtaatgaaataaatcaataaaagatatattttaaatcacaaaacaacttaacccaaatatataaatatacaataaaataattttgtcaattaaaatgttaaaatagaatgatcattattaattttttttttaattttcttttatgctattcttattattgtagttatttatttatttttattattattatttatataaaaaattaatgataggattattatttattagaatacaatatttaaagtaattcaaatatatcacttcataaaaaaaaaatcaaatatatcacaaaattattttttggtgtattggagatgtctgaatgatcatctctaataaatagactaaaactactaaatttagttcatttttttttgtttttttatggaatgtgcctccaatgaggagacaactaaatcacaaacaagatttaaatttcacaagaaattaaatatattcacaaaacataaattaaaggaaaattttcactatatacattttttttaaattattacatttatactggtacacagtatcttttataaaaatattgtcgaaagtttatattatatattgtatttgatataaaaagtttgttattttattgtgccatttgtcatgttaggatcttttttttttttttttttttataattttttaaaaagaaaataaaaaataaaaaagctgaaagattaaccattaaaaagttatcttcagttcattctctttcttttattttcttcttcttcttcttttcattttttttcctcttatttttgaaaaattaatcacatttttgtgttgtttatgatttaaggtgatttcttagttggttttcatcatttttattcagttttttttttttttcaaaagtcattttctctctcatttattgtcatttgttattgatttatccctataaacattgttccttttattaatggttgttacacgtttaaattcatcctctctagttataaaaaaccccaaaaattatcacaaaaattcattagtaaattgacaatgagtaagaaaaatttcaaaaaaaatccccttacacatatacatctcctatagcatcgaaaagaaaatcagttgttgattctttgaaaaaaagagaaaattaaaacgttaaaaatcgattattaaagattcagactctaatttcgaacttgatgatgaagatttcgagatacctaaagtatcgaaagtatttatgttgtttttcagctgttttaggattattttcttcttttgttgtaaatattttaggtatttttctctgatctatgtattttccttattttaatttttttaaagttgaatatacgttatcccaaatctattacttattgctcttctcatctccatcatcttcaaaatcttcttcttcttcttcttcnnnnnnttcttcttcttcttcttaagcttctttttttcaggttttttcttaatttgtttgaaaaatcgatccacatttttttaattgtggttacaattatctctatcatctttaattttttttttctttttcttaagcttattttttaaatttttttctatttgtttgaaaaattgatccacgttttttaattatggttactgatggttgttaagtttgttttttaccattttggatcaatttatattttctttcgacaaagaaggtgacgattattttatcttttttttttttgacaaagatagagaaaatgacaaatgtatttatctttttttttttgggtggtggtggtgggggattttaatcatcttattgttgtttatgttttttgttttgttttttttttaatcttgttatgcagtttaagattttttgttgttttattattattttaggatttttatttgtgttgttcagtgtcagatatcaatttgagattttattcatcgctctctaattttgttaaattttatatgttttgttattctgtatgaactattcggtgtctagtattatatacttgatttttatatttttaacggttgtctttttgttgttctgaattttttttaatgtatttagggtaagggaaaattttccaaggtgaaggttccctttcatgatgttatgaaagtctccactggcaaaagagttattgaggtatagcattttttgtaattttatttggttaatttgtttttgtagtttactagtgttttacaattgttttagttgatttttatgttattgttctaattcggtgattgactatgtactcaattatgcttctcagattttgatatttacctaattatgcccctcgaaatttgaaaaataccaaattatgcttcctgaactttgattcatgttagacttttcttactaaaattggacaaagtctttaaatccaacaacctcaataatttaggggaatttttaatgaccttaaaaattgaggagacattatttggtacatgataaagttcaaggggcaaaaatcctaattaacctaaaagtaaaattctccgtatcagagtatttttttttaaacttttgcctattttaccggtatgttaggaaattacacttactatgggatttaaaagttcttatgataaatatgacacatttaagtttgactaatttatatggtatttttttttttgtttttaggtctttttatggtatttgatatgccatatatatgtatttaagttttcaaatcccatatttaatgtttttatttgtttaggaagttttatttgtcattgatgccagaaaagtcaccggagtttgctgccggtgttggaaaagtcactggggtagcggtcggtgccagaaaagtcgacggagttgctgtcagcgccagaaaattcgtcggaattggcattgtcgctagaaaaatcactgaaaaaatcaccaggaaaccggtttcttgatgaagataccactttcttggtgatttttccgttgacaatgccaattctgacgacttttctgacgctaacagctactccggcgatttttctagcaccgacaacaaacttcaaaaaagtcatcagaattggcatattctaacaataacaattttgttaaatgaaaatattcatattaattttcttagtaaacaaaataatatgattctagttttaaatttagcaaacaacataataaaatattatttttgattattttatattttaaactgattcctagtttaacaaatgcacgcgctgtaatcatcaaactccccaaccaaaaaattgttcatcaaacccacttgaccagaaagaaaattgttctcaaatcaagtggtgagcttttgttatggagatgtactgatcttgctttctgggtggatcattactaattaattcatatgcatgataaatggcaatatgagagaaaattggatagttttaacttttattggttagtttggtatgctatattaagtcgtattgtcttgtattaaattgaattagattatatataatactttatatagggtaaattgcagcatacatacttaatgtttcagattttatatatttaaatactttatctttatttttagaggcaaaaatacccaatgttacaattctattacaccgatactaccacttccgttaacttataaatataaacacgtggaaggttcagatgcattacatttttttttattttaacttaatattcttaatatcagaaactaaatgctacttgttttttttttaaaaaaaactagttctcataacaattttcacataatattgacacttcaattcgataatcatgttccaatactgcactggtactcagctatggtattgcatctctcttatttttttttttgaaacaagtagcatttaatttgttttttatattaagaatattaaattttaaaataatataaataaatataatgcatctgggccttccacatgttcatatttatgagttaacgaaagtaatagttaaagatattgggtatttttgtctctaaaaataaaaataaagtatttaagtgtataaaatttaaaatattaggcatttatgccacaatttacccttttatataatattatattaaactttaatttatactaaaatattatatatttaggtttccataaaagtcaacacccatatagttttacataaaaatattccatgaaatacaattcaatataatactatacaatacaataaggtgtaatacctcgtaccaaacgaacctatatcttttagaacttaaaggttagctactcttttccttttaaaaatgaaataattttttttagcttttgcttatttaaagttgttttcccagcaaaatttaatgtgggtttggtttttgtaattgttgccgaatagagacggagaaggaaaggaagagccaaaaaggttcatcggcggatggttacgtcgatgatggcggagactaatagataaaggggtttcgatgtgttgaaggtgaagaaagtccaaagtttgaaagcctaaatcaccttcagcttgtctgaataaattaaaattagttatctcttgcttgctttcatgttctttttttttttgaaaataagcgtgttcgtaccattaattaaataagctagacctctcggtcattacataaaaggtccaccggaaccgaagcaaccggaatagtactatacaacttgtgaataaaagcccaattagccacattatgggcatcaaaattacaagttctactagcatacacaaaattacaacaaataaaagatggagaagacttagaacaaaaagagacattgaactcaattgcccaatgagattccgtcccattgagagcattgataactattctcgagtcactctccaccaaaacaaacttgaaaccttgctcaagcaccaacggaacagctgatcaacaagtcgctgcttctccacataatacatccgcaaagtctaaccgagccgtttgaatccgaaccacatttcccagatggtttctagctaccaccgctatgcacatgctttctaagcccaccctgacatcacagtttaatttatccaatcctgaggaggaggcctccaggtccctcccaaagatggggtagggcaaggcaagaaaacatcatgaagatctgcataagaattacaaatcatgtcaatacatttcgtgtcactacaagaaatgtcacttttaccagcacatttttgtgctggcaaaagttagaattacgctggtaaaatagaatttactt

SEQ ID NO: 21373 - DNA, 5674 bp, Cannabis sativa
  modified_base (1698)..(1713): a, c, t, g, unknown or other
agaggtatgtttcaaataaatataaaattagagataaatttgattaattgatgaataaaagaggcatttttcaacttaccccattttgtggcgtgcctcgtgtggggccgaatccaagttcgtgctagcccattttgcttatttggatctaaattgcgcgtgcctacttttaaacttatatttgagactattttattattgctaagagaaagttgggttgagttgagatttaaacttcatctcctttttaaggactcgccacttagttaaatatatttttagttttaattatttttatatgtttttcaacaatactttaaatatgattatattaaaaatattcatttattaatggaatttgaatacttataactaataaatatttgatattttaactcacaaattagagttgtatatatatatatgattgttattatattttaatataattgaaaaataaatgaatatttgtattataaatatcattttttttacgtatcttacatttaaactaatttatttatatgtctgtattatagaggaattaactactgtagtaagtgtatatttgaaaaccatcatttttctatattttttccttcaagcttattttgtttaaacgcttgttgtgatgtgccattttacagtattgtatctattttctcatgttgtatttttgctttctaaactctatatatgttgtttaataaaataagttgtgatattttataatagttattaaattaaattatatgaaatttaacacgtaattgcactaataataatactgcacttttagatagttctaagcattattagtgttttttaatatttctcaaaataaattatgtaattcatatactctctcaagaattttcagaaaaaaattagagaaaagatttatgagttaacttatgagtattgctttagcatcaattatggaagaacggtaaattttggtttgttattttggtcaaatatggaaaaataagatatagccacaaaaattaaataataaatcaagctcaagctctatgtattcaatctactcatagccaactatcaaagactagacataatttctagttgacttttgatttaatactataagccaatgtcatcaaaatgtttgttagacataaatccaaataaagttgaagtagaagactattaaagagtttcacattgttaatgagtagaaagataataaaatatataaaataaataaattaaataataaatatataagataaactactcctcttattatcaattaattttgagatagaatcttattcattttatcctaaattttaacaaagaaagaactaaatatattgacttacatatgtcaccatgccttctctttggtcaaggtgctaattgttttttagatgtcatgtaattcacaataattattagagtcaatatatttattaatgtttgccttcatttacttactaatatcaaggccggcccaagtattttgcgggctttgtgcgaaatttttaaattgggtcctctaaaaaaaacaccatgtacatcaaaactacaattctattagtagcttttttttttctttaaattgcttcataaattttcaattaatttttttttatttatgtataaataatagaaaaaaaaaacaaatagccctttttttaaaaaaaaaaaaaattgggccttaaaaaaatgggnnnnnnnnnnnnnnnnccaagctgcccaatgcttgggccagcttgggccggccctgactaatatattaaaagaatatgagaaaataagagatgaattttattacttataaatgtatatttttacaagatgatcatcaccttatttataggataatgatcataaagtatagaaattaaataaactaaataatcaatagttactagacttacataagaaaattactaggagctagagttatatatataaaataaattggagaatcaatagtaataaagcaaggatagatagataaagacatccattaattattatttcatgacactctctccttaaatatcgtatattaaaaatatgcttcattaaaactttactataaaaaataataataataaaaaccttgtaggaacaaaattctgataaagatagagtacattattttcttatctctccttctttgcagcattgatgaaatctttgattcgatacacaccaattctatgtactaatttctcaaatattattgtaggaagggcttttgtaaataagtctgccaaataattatcacaagaacgtatctgatgaacatctatatcctctttcttcttaagctcatgggtgaaaaagaattttggggaaatgttcttagttctaacatctttgaaggaacttcctttcatttgagcaatacatgcaacattatcttcatacatgttaggattaaaatcacttaatttgtcaaaatcattatatccatcttatcactcattagatgaatctaaagaaagctgttcttagttataacagttggctttgtcaccaacttaaaggaagtcccaccaacatctataaatagaagtgtctctactctctcaagaaaatctccaatgctcatactttaaatttcagagtcaagtttagagagagaaagataaagtctaagattacagtgagagtgtgtggagggatgttatgggagtatcactcttgaagtgatttctctcattgtgtgttgtggtaattttatatgcaagtatacgtatcgttttaacaagtattactcaagtttaggactcttccagagaatcatggggtacagttcttaactacaatccttatgggatcaaccttactctttgtgagtctattacttgttaacgatacatatacttgtatgttgaaaataccacaacagtaagactttaaaagtgcatcaaacacaatcacatcagtttctcaacatcttttagcctcactggctttcaatggcggacgaaaaatttcaatccaaatgggaaggttagtccaagtgaaaggcctaacgacaaatcaagtttggcctttcctagaagatttttgcaacttccacaagttgcactaggtggttgacacgtgttaccaagtagatcagaacccatcagccacgaaagttgtcagtaataggccaggtttgatccactactgctcctccacaagcacatcaccattcagtgtgtcttcagtgatttgggccaaagagaggctcgtagagatggatccagctcaatagtgtttgacctacaagactagtgatagagaagctgaatagaatcgccgatgcaaagtttctttctctctagactagatagatagagaattagtttagtagtggggtagtataataaataaagaagaaaagttaaaacttaaaatatggtattccaaactttatttacaaaaatatagcataaagaagctcatacaaattgtaaaaaaaaaaaaactaagtcaataatctttatgcattaaaaaattatgccataaaaagttaagtctttatttttttttcatatattgtgtaatttatactattgtaatgacttttttaaatctcatatttaatgttttaaagcttctttgtctccctatttgaaacataaattagagaaaccaaatgtatgaaatatcacagaaactagttttttaaactgaaaaatcggtttcttaataaacaaatcttcaacataagcatataacaattaaaaaaagagataaaatctataacattaagaagtttttgaatttaagtatgagtatataactatatatcaactattttttagacgtatgtacggaactattttcgtagactatatatatattatattctctacagtgattcaattaagaaactaattattagattgtttttttcatgttatttttttaatgagttttttttgttggtaaatgagtaagattctattgcccaagaacctttaaaaaaaacaacttagttgagcaaacacaacttgtcaaaccaaatcctatcctttttacctatcttctctcttttaaaatgagaaaattaacctattacaaatctctttcttaattctatttacaacaatatgaatactatacattctacatcccaaaagacaatatttcttgcctcccaaattctgtaaactacaacattaataatagttgtgtgcacctccttccgaaattcagagtgcttacatctttttatccactattaggattataacagaattggactgacttaggttgtttgactgttacttacagttattagttattatcctaccgttatttcagttagttatttctgttacaatagctaccttttaggtagatatttaagccttaatgtcggttactctatgtatatatattggtgttcttcttcatttgtatgtaagcagattgtactttttcattcattcagtaaataaactttttccttttcctctgttttctctgtttcgtgttatccacttcaagcttttttctagatcgaagttgttgacactaatacatgcccaaaaaagcactctgctacatattctttgctatatataccaacactcaaagaagatatgactatgagattcagatttggtattacataaaagacaagtataattattaatgataccaaacttggtaagtctatctcaggtattcaatctcttcttgcaagctaaccaagtgatgaacttgtgtttgggagtactataacgattctaaataaaggaattccacacctttgtgctaaaattttcagactcacaatcagcaatgcttattttcttttttatctcattcttgacctccacaattttcttccaacaccagctcctcccttgtggagcattacagctccaccaatcaatttttttaatatagactgtattcacccatttaacccacaagttatctttcttttggacaatattccaaacatatcttcccaaagtacctgtattccattgctcaatatttctaaaacccaaactaccataagctttaggttgacaaacctcattccaagctaccaaacccggggcagtagttttagcttttcctttccataagaagttcctacaaatactgttgattctctccaaaatatacttcgaaagaatcattaattatgcccaataaatgtgtattgtaatcaaaactaagtttattaagacacatctcccagcataagagatattcaccatcttctccacaatattgtcacactctacttttgagatttttcttcgaacaaataggaattctaggatatctaaaagagcttttagaatatcttgaacaatcaattatattttgaatatcattcttatccattccagagcaattaatagtcattttgcttacattacgaaacaaactagaagtttcaaaaaaactcaaaaagacccgaagtaaagattaatggactgaacttctcctctcaaaaatagaagaagatcatcatcaaagcataaatggttcaatttcaacggagagcatcttggatggaacttaaaatctttcctcatagaaattttagtcatcaatctagataagtattccatggccaaaacaaaaaggagcggagacatgagatctccttgtcttagaccccttttggaaaaaaaaaataaccatgaagagtactattaatcattagagaaaa

SEQ ID NO: 21374 - DNA, 2327 bp, Cannabis sativa
  modified_base (32)..(38): a, c, t, g, unknown or other
aataatctggattacattgaaatagagttttnnnnnnngcataaaacccaacaatattctccttcatacccattctgaggttagaaacgaattttgttctgtttgaggaaatttggagatcgaggaatgaagtcatgttcaaagctaaacctgttgacattggggcggctaggagcagaattattcttagatatcaagaatttgtttcttccttagaatttgacttggtggacaataagacgtggggacaaggagcgtacctgaggaagaagatctcggagtctactaagactgtctgcatcacagatgcatctcggaaagatggagttgcaggtatttcagtgggattgctggatagggattctggaaggtggtcctggaaagcaaggcgaatctctgctagttctctggaggaaggtgagttgcaggcgatcagttgggcactaaggctgggaattgattcaaatctgtccttagtggccattatttctgatgccttactacttgtgcaagcattggaaaagaagaagtttcccactactgggagttgaggccgctaactctggaggtttgggtccttgttagtagctttgattcttgtaagttcctttatatcaagcgtgatgacaattactatgcggataggttggcaaaagatgtaagaattaatggccatttggctagttgttttcaaagggaggggtccccttatgtgatacccaattatctctattaatgaactttccgagttctttcaaaaaaaaaaaaaagggaactctcgtggaaatagctttgggaattatcaagccttaagattttctaacaatgtatttttttgatataaaatttggttcatctcaaatgagctccaaaaacctccttttataatgtttaggtgatcacacttagaattcaaatacgcaatacctaatttctctcgtataactgattattaatatagtttgtaacaactatatttcataactttgaataatatcatcaattgtgtgtaacatctcttttataacactaaaatgtgatcaacaaaaagaagttacaaaagcaattaaacttgtaactcttctacatgttacaaagtgtacgttacaattttaggttaaataaatcatatgttacacaatttatttatcaaatacttaatatatattattgtaatgagtgcattatagaatatgtattagtaaagacaattcacattaattattgatatttttataattatgcatgattttattatgatttgggtgccattattagaaatgggtattagagttatagtttctctatttcagagattttattaaactctaagagtattatttaagttaaatatgaatttgcaatttttataatttttgctcgacgacgatggaaaatgtgatggatgaccgttagagtcacatgggtaagtctaaaacctatttcttagtgggataaatatttgagatatttagaatatcgaatttgagtgggattatggctttttaccattttacccctaggtttaaaattacttaacttaagaggtcaaaggcattttgggaatattatttaatggaattaggtggcttgtcccttgaatggtacttggccattaatagtaattagaatggtttatccttttacatcaattagaaattacttattagggaaaaaaacaaaagaaaatctattcctctttctctctttatactcgactcccctaaaccagaaggaaccaaccttcatccttagtattttctgaaaattacgcaaagatgcaaggaataattagtgaaggtaaaccctagaactctaacttttttgttatttaagcttttaattgggttttatcttgcaattttgagagttagtggctgttagggttagaaatgataatggttcagcttttaaatttattttaagttaaaagtgattacttgtagctggttgtgttgatttgggtggatgatgaacaagtttgagtttaaaaactcaagtttggttcatctatagaactttttgttttagaacatttttcttgttgttatttcccgggaactgttattggatgttgttataggtgttctggaaagtttggcttgactttgacacgatttgggtaggattcaaactgtttggggaaacctggtgcaaaccggtttgacaggttttgtaaaaccgattaatcgaatcgggggcaggctccccgtatcgttagattcgttgattcgtgttattttcagagccttggttggttaattccttcatacttagggtattgttatataagttaccaataccagaacccttagttggaagtttga

SEQ ID NO: 21375 - DNA, 1964 bp, Cannabis sativa
ttcatgttcaatataaaaaatttggtgaattaactttttttccgtacgattctttccataccaaacattttttttgctctacattttctatgcctctttccccgctaaaatccaatttctaaacataatgttaaaaggatacttcagttaaagctgcattaattaagaaaataaaatgctatgctagtcaaattaccacgaaggcaaaggcttaaaccaggaccaatagtaacagctactgccgatagatcgcttgcagataaattagctttgtcaagtgcttgctgaacaacctgtagttaacaaccacaattatgacaaagatagcatcagccaccaagactctttcacttgcaaagacagcataaaactaacccaaaagaagtaaactaagtccataaaatagccatttatgtttgagaaaaccaatagtcccatggtgaatgaacagttatgcaatgcaagctacaacatcagacattgccttaagtaacaaccaatgattatcgtacacaatataagtagcactttactgtacctgatcaatcacttgggagtgtgcttcttcagccattttcggagcaacacccccatataaagcaagcaaatctgccttcaatgaagtaatcaataatttaaattcaggtaggtaaaaattttcccatttagcttgaatgaaccagctatgcaaaaaccagtacaatgaactcgtaataccacaaacacaaacacattcataaaacatatagatatacacatacttgggaggacacaacttgactgagaatttcgccgttgcttctgacctgtgcgcaccaaagtagtgaaaaccaaagccccatcaaataaagagcacgaaaactgtgaatgcctattattagaccataacaaaaaacgacacttaaaagaatagaaagaacagtagcttacgacagcggcggcggtgtcgtcgcagctggtttcaatacccagaacgatgagatcgtcttgggccttcataaatggagtcttgggagctatagaggtggaattttcggatgttaagcttgagcaataggccgtgaaggaattgagtgaagaaggggaagaagaagaagtagtcggaggtagcaacttggagcttcggttcagcaggagaggtttccatgatctatgaaaaataaaggaaggttttgggaagagatttaggcgcgaaaatgttgatgaaagcgccatactcacgacgaagataaagattaaccaagttatggtcctgcacaaccaaaacgaaggggacgaacaaaaaacggccaaaaaaaactttaaaagctcgaaacgttttcattatgaaaatgaaccgtttttcgcgtagtggtgtttctactgtttgggcctctcagtaaagataagcccagttgtaactagtattgaagcacagccaagattttacaagacaattttgtaggggatagtatactaatttttaccatttttctagcagtattgtttatttttatactgtttttttataagtttcatactgcagtatattgtgttaagtttttactgttgttctattggtgttttttagttattctactgttattttgaactgttcctgttttgtgttctagtggtgttttataaaaatacagtatttttgaaaagatttctatgtgacagtatttttataaaagttaacccaaatttcaatatttttataaatttcccaatttcccaattttatttctttttcaaaaaagctgttaaataaccttcaaattgaccagataaaagtatttgtcaaaaaataaaagaaaagaaaaaactagatagaagattaggtgatggaaaatttgtttgctcctactaacatatgatatgttctcagtggagttatttttgaacacctccccaccccaacaagtttcataataatttttgcacattcttttaatatcagacttcttctttttttttttttt

SEQ ID NO: 21376 - DNA, 2995 bp, Cannabis sativa
  modified_base (1874)..(1875): a, c, t, g, unknown or other
tagttaaattcactttgaaacattaaaaaaaaagcatatatttaaaataaatgacaaattagtattttgtattcgaattatataagtatatatatatcatcaaaattcccaaataataacataggtgcaaaattatatatttcaaataatagtaaaagaaatcatataagaaaacgtgaaaatttttgtaccatccatccatgtatatacagtactaaaaatactgaaacactaactcaaagtttgtattatttgattacaaaaacctatacatttatgaaacagttagagtttgttgattagttattgacgtgtcaaattgaccaaaattaacaagtacaagttgatagagtttgttagcctgttttttcttagttggaattagtttaaactaattatatttatattataagccctccttgttttcattatttttcataaaattttcagtttcagtttcacccatatatataaatatatatatgtcaccattgccacggtatccaattggtttcgggaataattgttggataaattataataaacatgccttataatttattaaatataaaactagttactaagccatgccctgctatttttttgtttctttgaaccaaattttatacctttcaaaagaaaaaaaattataacaagatcagttgcatggaagaccaaaaatgttgctttatcaattttataattctgtatgtttaaatatgccaatgattaaaaaaataataagagttaaattgtgttcatgttttctttttattaaaaagtctgagttcatcaagttattctttaaatatttatcaaaagaaaaaagttattctttatatttatattaaagaattcgattctgataatcattttttagttagttttgactcagggttatatttttgatgtgagctactgaaatttgattagccaaataaaactgtggtaaaaatgttagattcagcaacaaaatatatataaattattcttaaaaatatatatgtgcatatttttttggtaattctggagttaagagtattctaataaatttaaatttatactagatcttaggattaagtctggcttaattaaatactgtagatgagtatctaaactctaatgtttaataatatatagtagaaaaaattagagtttctagttcttaaatttatagctatcgaaagttttctttcttttctaaccaccctccaactttctttagataggtgtgacttgattgaggttgtattaatttcgctattgtaattcgatttttgttactggtgatatagttttgagtgatttagtcttgtctctgtgacatagttatgagtattttagtattgttagtgtgatatcgttttattttattttatttcattgttggttcttatttgttattcgatagcttgtcttgtatgtagttgggaataacaagttgaagtggttattatgtaccttacataattttgagtgttcaagttatgaggttgaatgaacctcctacaacagtcctattgttttgtattttgagcggtggatgaaagatgttcttaaggttaattgtaatactacaatctcttacatttgattttattttaattttttttatcgaataatctgggaaataagtagctgattatttgagtcgttattttttagttgattaccattaataaaatttcataatttattaaatatatatgtgcattatatataaagtaaattaaagcaactcaaaatatatatcagtgatattcggtaatactttttttatttttaaaattagaaaagtaaaaatattttttagaatcatgttctataaaaatgttttaacttttcaatgttttaattgagaatcaaaattttannaacaaaaaaaaaaaatcactttcaatgtttttttaaatagttttttttaattaaaattttggactccgatgagacctggaccggtcccaaatccagtctcggccctagcactgaactccgcccctaacccagactcggactcaacctcggacttagatttgacttaaataaaattaaatgataaatatgaaaatgaactttacagattacacttttgttttctgtttttgaaattgaaaaacaaaagtagttaccgaacgtatttttatttttcaaaaacaaaatttttaaaaattatttttatttttgtaattaattttttttttttttttaaaaaaaatattaccaaatggtaccatattttattttattttttttaaaaaaatacataaaccaagaaataacattttgatatttgttaggtgttaaggcccacctatgaatttgttaaacacgaccatgctgttaaatttttactttttaacgccttgattctaatgttgaggtagtactctacactttctaatttcttattattagaggctccaatcgcaccaaatattttaaatttctttcttggattattttcatagtgctctaacgataacacaaacacagttaaaaactaattaaaagcaccatacttaaaaatggcactaattaagtcctaacattaggtatacacactttaatggtaccgctagctctcacaaggtcaataatagtaatttttattagagaaaaaaatgagattcgtcttttaatgcatgtctgtgtataaatgaagtatcaacaaaaatataaataaacttaaatatttgacttatttgattgagttagtttcagcagtaatatttatataatatgattttttttttctttttttaaaacgtttatataatatgatttaaacatcttattttacactctttctggttctctaactgtaatattacttgaatattttatataatataattaccataaaagcactcttaataaaattaatggatatcacacaatataaaatgggatactagcactactcagtgctcattgttacgtgcagtctatgatggcacgttacaagctaagtgatgcccacaagttggccaagtgg

SEQ ID NO: 21377 - DNA, 4526 bp, Cannabis sativa
cagtgaaaaacgcacaaaaacgcacataaaaacgcacataaaatagatccaaaatatagactaaaaatagcctaacacacttccataactcaacatgaagagtacttggagactgctataagtataatttttttttatttgatgttgtcattagataagttgataaaaagaaaacactagcaataatttggaggaaattagaaaaattattccaacagaaatctcttacaaataagatattcttaaaggagagtatcttttgtttcaagatgggatattctaagatcttggatcaaaatcttgatgaaattcttaaagatgcatagagttggctaactcaggagagaatgaatatttaagtgatgaaaatcaagcaattatcattttaaattcattaccagactcctataaggaagttaaggctgctataaagcatggaagaacgtacattactttagaagatgtgatttctgcacttaagtccatggacatagagatgaagaatgataaactaaggagtactagtggagaggctcacctaggtaaaggcaaaaacaatcataagaagccttgataaaacagaggcatgagtcaaagccaaggcattgcaagaatcatagaaatgggcacagaggaagaccaaactctaaacggccaagtgacaacaatggttgttattattgtgggaaaccaatgcatttcaagaaggattgctaattctggaataggttaaagaataattagaaggatcagatcaagactcacaacagggagaaagtcccttctcaaagaccaagaacaatcaggcttcaaccaatctaagtgatggctatgacaatgaagaagtttatgttgttgctttaaaatttaaagatgattggatactagactgaggttgtacatttcatatgactaataacaaaagtttgcttactgattacaggaaaacaaatgagggacatgttatcttaggaaataatatcaaacatggaagatagaaggatagggaacaattagcttcaagatgttgatggagtcattagatccttaacaagggtaagatttgttcccaaactatctagaaatttgatttctattattgttctagatgacttgggtattataagtaaaattgaggtaggaacaatgaagatcagtaagggatctatgaatacaatgaataggtacaaagatgaaggattatgctatttataaggagaacctgtcactagctgtcataatactatgatgaagacacctgaggatgttaaagcaatgatatgacatagaagaatgagttatataagtgagtaaagactgcaactaatgaatgattagaaactattagagaaggagaaagttagcaagattaacttctgtgagcattgcatattgggcaagcatcactgaagtttaacataagcactcataaatctaaacatatttttgattatgtacattctgatttgtgggggccagaaaatttttttactcagagtttgtttactttttatctattgttgatgattttttttttttttaagaagatttgtgtttatcttttaaaaataagaataatgcatttaacaagtttcaagaatggaaaacattattggaaaatttatcagatagaaaagttaaaaccctaagaaatgacaatggactataattttgcaatgacctatttaacacctattgtaggaaaagtgtattacaaagacatagaaccgttaggttaataacatggcagaaaggataaataaaactatacttattacttaacgaagctatgtgtttattgttttaatgtggactaagtactatgttatggggaaatagcagtgttgacggttgcttacttaataaatagatgccgttctagtgctctagaatttaaaacacatgaagaaaagtggtgtcttggtattttaatttcagtagacaggaaaatatataaatttatgtaaagcacggttaaaaaataaattatatagcatgagaaatataactcatgatagattattttaaaaatgaatgtaataataaattagttacccttattaattttaaaaaattgggaaaacatgtaaaaatcaaataaaaaagtcataaaaagtagaaaaatttatatttatcaaacttgattttttttttttttttcatgtaatttcgtctgtattaaataataaaattgacgatatacatgttagtcaaacttttaataaaaagcataggccatagaatattacccaaatttgtaaaaatactttctttgttttattaatattaataataatataattattataatttagttgccgccttcggaagaaatgtgcttccagaaagttcacaaaaccctttacaaataattgacgacgcaatttaaattaccagacccaaaaacccccgaatttacttatcggattcaccagtttcaaatttcaaatcatcacaaaatggtgaggaaaaattaatatgattgctttcggtttttgttgattctaatttgcgtcttgaaatgttgttttagctatttgggttttctattttgtgttatttggttcctgagttttgcttttatgaagaattttgtttctttttaggcttaaaaattctagggatttcgttgtttaactgagcttctcgatgtttttctttgattgactgaaatccttgacgaaatcatcatcgttttcttgtgtgtaaagtttacactttttcgccccgaaataggtggctaatatgtaaattttggtttcagacttcagcaatgatggcgggatttgcagttgctgctgcagcatatgctggtagatacagcattctggcttggaatgccttcaaagcaagaccaccctcagcaaaactacgcagattttacgaaggtggttttcaacccgctatgaaccgaagagaggcggctttaatacttggagtcaggtacaattttcatctgcacgatgcctttctttatgacttttcgttatatatgtgatgtccacggtgatgaatgggtttgccatagagtaaatagcgagataggagtttagtgtccaagtctgatgtagctgtgctcaaacttctttaaaatggtgtaaagaattctgtcttaggaaaattgctacttttattttctctagtacttggagtagggaagcatttgcattttctccttgtttttgaaaattactagtgtgttattttgatttctaatttgagaacatgttttcgcatgattttttcgttgtgtagtaatacaccagccattaggaatcaaagaatattaagaatagctaaggtggtgtccttgttaacattacaatattcgattggagcaattcgaaagggtattttgatttggttaattattaagtcaggatctgttgtggacggtgggcgctggattggggaagtttagaagttcatttagttaaatgatccttcgaattggttatttcagtgataaatttgagcttgagctcattaatttactttattttgtggctgtggctcaaagagatgagttcaataagtattgggttagctcaaactctacctacatagcatttactattactgttttagtctccaaatattgtaagattagagaaagagcctagtttcaaaagaaaaaaagggcattagttcatactgtctcaagtttacctcttgagcagttttatagccaagaatggtgggtagctaagtggattgctcccaccagattgagggtagtccatttaggtacgtattatttgttatagtcttctgtttttcaaatataataggaaaaggagagggggccagtttcacaaaatgaaaaagaaaaaaaacttagagagcattagaaccatgtttttcctactgatgccgctgttccttccagtctgcacattgttacattttttatatgatattttttagtttggtgtattttctctcttattgtaggttaggctattagttaataacaataaaacttgtttttatgacagggaaagaactccaactgagaaggttaggacagcacatagaagggtgatggttgcaaaccatccagatgcaggtggtagccattaccttgcatcgaaaatcaatgaagccaaagatatcttacttggaaaaaccaagggcggtggttctgctttttgatgcgtttttcatagtcttactaatactgattcttcgatagtttggaaatatacgaatttgagggaggttgtgcttcacttcatatcattatttgtgtgtaattgtataccatgagtcctctgaactattagagaacaattttttgtcattcgaattatttttataacgattcatcaaaaatatatatatatttataatgtattctgtttactttcttttctttatagtaaacctggcaagaaaattgccaatttacatttacagctaagagatatccttacaaaagaaaacacaaaatttctaccacctctttttggttgatatacttgtatcatttaatgctattagtaagcaataataataataataat

SEQ ID NO: 21378 - DNA, 2777 bp, Cannabis sativa
ttaaatttattttgttttccacctaaacttttcatatcttcaatttttctacatactcatctttggtcttaagtaaataagtccaaacacatctactaaagtcatcaacaatagataggaagtattatttacctaaatgtgttgggattctacttggcccccaaatatcagcatgcacatactctaggactgcctttgtgttgtgagttgctgatgtgaactttatcttgtgtttcttactattaaccccaaaagttagcgttgttaactctcaagattggttgactaataatcacgagattaacaagaatgtgcttagggaattgctccaaaggcatagtagtgcatggtcattcaacatgcgcatactcaaagtcgctcggccatggcctgagagatgtcactcgatcatggcttgagagatgtcgcttggccatgccttaaaagatgtcacttatccttagcttgaagatgtcactcggccatggcttgaggaatgtagtcagccatggcttgagagatgtcactcagccatgccttggaggatgtcaatcgaccttagcttaaagatgtcactcgaccatggcttgaggaatgtcactcagccatgacttgagagatgtcactcaaccatgccttgaaggatgccacttggccttatcttgaagaggtcacttggcctaagtttgaaaggtgtcacttgtccatggcttgaggaatgtcactcggccatgccttgaagaatgtcactcggccttagcttaaagatgtcactcatccatggcttgaggaatgtcactcgaccgtgtcttgaaggatgtcactcgaccttagcttgaaagatgtcactctgtcatagcttgagaaaaatccactcaacatgctacttccacgatgacataacaatacatagaaaagttttcctaagtaagggaaatgaaggtaacaagggtatgatcaaaaggacaaggcgtgcatgcaggaaatgtacaaccacgtcctctacaagctttaagggagaaaaggtacacgtagtggaggcaccacacctgcaagtgttgacttcccgcctaagagtgcaaaaatccattaccgtgaaactcggttctgcctgtcactagaaaaaggtacaaggcgtgaggcttccacctgtaacgtccagctcatggatgtcttgttttcccttgggaccacaattgtatcccaagccattagagcctataaataccccatccttagatgtgagagggggttgaaaaatcattgtaacccttgacccaagaaatacaagcatttctcttccaccattgttgctctaaacattcttttaagtttttgaatttttatatttttgtcttcattcaaagtcttgagtttaaacttcaatttttcggccttaagttagttgacgagttctcactatcaacagttaccataaacacatacctcacagaaaggtaaagcacaggtctgaaacttttcaatgactccgttcttctgcaattccctcgtgccttattcactcatatgtctaagcctttgatgccatagctacatatcactttctaaactttgtactatatctgcctcggccataggtaaagtttcacccttgagtacatacaacccatgtactctctttcctttcatcacaagcattgaaccttttgtgatctttacgctcccattcaaggacttatagccataaccttcatcatctatggttccaagcgatatcagattccttctcaattttggaatatccctcacattatgtagaatcttcacttcaccattgaatttccttatagccaccttactaattccaacaaccctgtaagaaacataattttccattagtattctaccactattattggtttctttataatcaaataaagaatataaggtcggacacatatgatgaatgcattctgaatcaagtatccactctttactattactattttctaaaatagaaaataatcccatctaaacttcgatctccactactctcagccacagctgcagagttttttctttaatttccctgatcattagattttgaatattggttctagtttctattgcatctcttgtcaatgtttgatctataaccaggttgcatcttcaattgactacagaatctcttaatgtgcccaatcttcccacatttgtaacattgttgactatctttgcatttcaactttgaccttgatggtgactggtttctccttgataatcctctattttcacatcttactcttgcaagataggcttcacattttctagtctccttctcaagttgcaattcaaggtcctttgactttaatgtcacatgaataccctccaacgatatcacatccctgccatacttaattgtttgccttgacttcttgatatcccatcggcaatgatctaagcaatatgataactttactttcttcatctaccttatgatcaatgttagctaaaccaacaattatttcatcaaattcatcaatattatcatctaaggaaagagaagagtttattctaagcttgtataatctttcaagaacattaatttttctcgagattgatggtgccatgtacaagtgctctagtttgttccacaatccttttgtagtcttttcttgaattagctttcttataactccattggacaggtacatgatgatggtgtagtatgccatctcctccatttatgcaattttctttggcttcttcttagccagcaacttttcatcttcgaatacctttgtcaccttttggtg

SEQ ID NO: 21379 - DNA, 1895 bp, Cannabis sativa
  modified_base (1667)..(1669): a, c, t, g, unknown or other
  modified_base (1833)..(1839): a, c, t, g, unknown or other
tatgatcaagtgttatgtaaagtactctaacctacgattacatagtctgtcttaacacgttaaaaagtgttatggtatattttaataacacatttcttgtcttattaaaagcacttttccttgtagtaaactcatatacatatatatttatatatatatacatatacacacatttttataaaaatacacataaaattataaatttacacacatatataaactcacaaaaataaacacatatatatacatatatatatattctacctacacacaaaattaaactacaattactatacacaaaattaaacataatttaatatatgaaaaatttaacttaaatttatacacaaataaaagctaaaataaataaaatataggttaccttgacttaaatgatgaaatgcgaaaaacaatcggatgctcgggcagcagttgctagaggtgcagcggcacgtcttcgtcggagtccagtgagagaataaatgatccggtggagaaaataagggctcgagatggtgaatatggtggttcgtgggaaaaataggggctgtcggcggtggtggatcagaggagttgctgagaaagcaaagaagaagaaagataaaaaaaaattaaaaaaaaaaagaggaaaatgggggagggggtttcgtcccaagttttatttagcctggacttttgccgacgcctttaggcacgccgacaaaagtcaaagctgaataaaaacacatgaaacgtattgtttcattaatgttggaacttttgccggtgcaaattagtgcgccggcaaaattcccaccaaagttttcacccacgttttcatttgggcgggaagttgaccaccaaaaaatttcacagcttttactggtgcatttgtgcaccggcaaaagccaaaacctaatgcaacatgtcgattcgatcaaatgcgaatacttttgccggtgcaattaaatgcgacggtataagttttcacctacttttgcatgcacgtttttacactacgagagaatttgatcgcctttttttaacacttttgcaggtgcattaacgcgcccgcaaaaggtaataaatattttttcatttttatcggtgcatttgggttcgctggcaaaaggtgactcgaactgtcaaaagttcccaccttttggcggttggattgcccacatttgtcgacaaatttaaggattttggcggcaaaactaactattatcggcgagataatgcgccggtaaaagggggaactggaccaattaatttgactacttttaccaacagatttgttgacttttgtcggcaaatgtacacttctaccgaggcaatcaattaattacagcggcaaaagtgtacgttcttgtagtgagggtagaacggtaaatttatccctattcggtgtagatcatctatagaggatctttgactattaagattttagcaatagataatcataacaattttatatcttgatacatatagagcgttctatataattgacagtggaattccgaatctatagtggtgcaaagagaaattaataagttaaggaatttacttgataaattttagatctacttattgaaagctcgtttatataggcccatggtcccctcacaagttgagataatactctttgcagactcagctaattgcttttaattaatcaattataattnnnaaattagactatgtcttatttattaatttttactaagcaatgacttaattgtgaagaaaagaggttttggagtctatttgttaattaagagactttgtatggtataattaacaaataatagtaaaagtaattttatttgatagttaattataattattaaatannnnnnnttggcatttataggattgaaattgaaaaatagagtattattaaaagaagaataagt

SEQ ID NO: 21380 - DNA, 1242 bp, Cannabis sativa
ttgaagtcgacatcgagttgtggaaaataatagtgtacaactgtgattctaccatttgcagtaaaagtgagttggattccatcatgaagccctgagaggacctgttgccttgtttgatacatgcatctagcaagttcccgcataacaaccaaacgctagcagtagatttgaaggacaacagccagatcccaataatgcaatacacacgagctagtcacaacattttcccgaaggcaaaaacgaggtaaaaatcttaaatatgttaattaaaatctctattcttttctacttattacttatagtttttttttgatgcagtggtggttgtggcgtttacgccatagagtctgtgcaccatcttatgatgcaacatcccctggttgatgtctgcgatagcaacctcaggacgttttgggagcagtggtgtgtggatcttttctaccagaatcttagttgatatattctattattttcatgtatataattttttgaaacaattgtggtatttgattggtaatattttgacaatagttgatgtaattatgtctcctatgaactcttttcttttattgatatgaaaatatgacttttaagcttttacaattaataagtacaatatatatcgataacatctcaataaattctcaagatgcatgaaccttatatagagaccatttcattaagaacatatcgataacatgtcgatataatgtcgacaaatcttaacatgcacaaatcacaaaaacataacttttcatcgataaaatgtcgataagacgttgacaaaagctcgagatgcataaaccttaaattcatacattcccatcgacatcatattgataaaatatcaataatatgtcgaaaaatctaaagatgcatgaatcagaaaataccagcctttaaatcattcaaatgtcgataaaatgttgacaaaccatcgataaaccatcaatacaatgaaaacactagtttttctacatataaaaaacccacttgctaacaacctgatcttaaagcagaaacccgaacaaaataagcagttttcaatgacaaatccagttcaaaaaacatattattacaactaatagtagagtacgtctcaaatacaagctttggatgttgctctgttgtggcctgaactgccacaaatgccgcagttttgaggtatcgtgacttttttatcactagacgagaaacaattctcccgtcttcttccaaccttacttttccttggacgaccta

SEQ ID NO: 21381 - DNA, 3193 bp, Cannabis sativa
atttttaacggccaaaaaagttcaggggacacgatttagtacatatcaaagttcgaggagaaaaaattactaattaactttttttttttttcaccatttcgttttggagtctttatacgggcaagggcaacccactctgcagttatttatttatttatttatttttgaaaggaaatgaatttttaataataactgaagaagaagaagaaaaactcccatttggattaagtatggccatagatacagttgaatctccgtctccttctccatcttctccatcaatttcccatttcaggtatagttttcgttacccgaaaggaaattcctttatgccaacccccatttctttaacaacttcttctgaatcatcaaaaattcatgctttcttttcagtccacagcgtcacttctatgtcgccgttgacaggcaccactacaagatggtctctaccctcaattttcccacatatatatatttatatattctaatattctataacttatatggaaagacattgttttttcttttttgttttaatcaaagttggaaattttaaattaggtgactttgctggaattattgggtatggcggccggaagccgtccgggccttccaatggtggtcatctgcagctcacgtgacgagctcgacgccgtgtgttccgccgtttcaagcctttcctttatctctttggcctctttggtaattactactaatgtctttgaagatttaaacatgtttgtattgttttaatcaatttaattggaaaccctattttggattttaattaggcaaaaatgaggtttagttgtgtcttattcttcaacttgattcaacagttgcaattagataagtaagtggattttgtgattgagtcagttggtgaatgtttatatctctttgaatatgataaatggattgatataagagctttgggtaagtttgataggaagtagttctgtgtcccaaccaaattcttgagtaaaattgctggaattgcttacttcagtggaacacacatttacaatttaggttccaagctttctagaggattgttctctaccaaaagagtctaactcttcccaaaacataaataattttattcctttttttctgaataagataacctataactttataggtgtacatgactaggatagattcttattgattaacaatcctaatattcttactcctctctatcctttggtctaataatgttagaatgaatctatccaagagaaaaaaaactatatacatatataaagcaatgttagaaagaacatgctagtaaaagcatcttgattacaggctttgttgttttctagctgtaatgagttctaatatagagtgctttgagtttttattatgccagtacagtgaccttgcagaagcagaacgtgcttcagttctagagaaatttaggcaagcaacagtgagatggaaccaaaatgctactgctgaagcaggagaggacactgatagtgggaaagatgagcgaaagtcttatatgattgttgtaacagatgcatgtcttccacttctttcttctggagagtcacctattgctgctcatgttttgataaattacgagttaccaactaagaaggtagagaaaccattcttcctccagcactttgtgcatgatattgtttgtgtgcgtatatgctaatggcttttactgttttgcatacatattttactctttccttagggacttctctgcagtttggtattatactcaattgactaagtagtcctggatatgtaactagtctaaaagactaaaaactggttgactgattttgcatttgtccgaaaaagcttgagacgctttacttctcatatgcagtatcttactttgcagttcctataatcattgggttacagaggtaacctcattgctaaatcagtaactggggaaccattgtaagcatttcatggtttctccccatgtttgacttttttattattgtcatcttggacacacatcagattcaggacataccacgagaagggatttactattttttatgatttttctcatgtttagaaattttgctgttacctgtaaattatccggttttggcttacaactcctaggtttcttaaagctatccatcatatattcttggagttgatgtcccttcatctatctaatatgatatctatgagcacataacggcatcccttatagctttcccgtgttctaatgtgccggcttcctttcacttcgttgtttgtacaggagacatacatgagacgcatgacaacttgtttggcaacaggtttccctttactgctgttattttgtcaggtgtagatgctatgtaattttgctatgttgaaataactcaatacaaaaaatacagatggtatcgtaatcaatatggttgtcggtggtgaagtagtaactctcaaaagcattgaagatggcagcaacctacttatagctgagatgcccataaatgtaagtttgttcctctcttaatgtttgacttgagcactcaacgagtcactcagggagtgaggagttgagttattttttgacattgcttatcatatttgcagatttacgagatactctgaagaaacattgaactttttgacaagtcaaatgacatctcagaataacacttgaaaccacatatttcctgtgatggttgaatcatgtctgtgattgaagcttttctagtagtttaaactaagcattttatttattctagtcagatgcagatttgtgtacatcttgtttcttccttaacgtgaacaaaacagaaacgatcgaacgattctcatatggtttagatatgtaatgtaccattgaaaaatttgatgggaaatgaaggccaaagcttcatgagtaacattattgcaagtgctgacaaatgttagcacctagtatgccaattttctctctctctctctctctctctctctctctctgggtacaagagttcagtcacagactcacagtgcaagcccaaagagaattctaagttttgtgtctaatgaattaagggctcgtttggaacgttgtattaggtagtattgtattgtattgtattatattgaattacattttatgcaatattgttatgtaaaactatgtatggtattaaatttgatagacacctaaatatataatattttagtgtaaattaaagtttaacatagtattatataaaaatat

SEQ ID NO: 21382 - DNA, 2673 bp, Cannabis sativa
acttcccatccagtcgtggggccttgttgctactcatggcaaagagagtcctacgaatttcttcattagtagggcctttcacaagatctacctgatcagcagtagatatcctatcctaaatgaggtctttgcagtttaaatcctgaccattgtccgaactagagaaaatggcaaagaagttaatgaattccttgccaatcaagtcccgtttggaaatccaaacattatctttattcaagatactttaaataacattttgtctccctctaatagcagccgagaggaagaagaattttgaacatttatccccatcctttagccaagagaccctggccttttgcttccaataaagttcttttctttcgtaggcctcattgagagcacaccaaatatcatcaatctgaaaagtgccaaccatcggtttagccaagatagcatctctatcgttggaactcccttaaacggggtgtcaaggcatccaatagagttggagttatcattagaagattcttccaatgccactttggaatctagatcttgattactcgtatcccacgggaaagtcgtgattgacaccggggtgctggtgaagaagcttgagtggtctagagcaaacagaagaagaaatatcattgaattttctttccttgaaaggagtagttctaacatttgtttcagaagtgggcctgaccccaatgtcacctccaatctcatgaatctcatataaatccaaaccaccaaaatgtttgagctcttgcaaaaagtatcttgggcatggaaaaagttagataaggccttatcttcatcaagctaaaggttgacctattgcccacaaactgagcgatccttagaattaatagccacacttttatccttcctcaacttattttgtccaatagtctcatacgacccacataaagctgaaccattaagattacgcctgggccccacatctaaaacatcttttgacaacctagggcctttctcatggcaaggggagacacaggtctcagcatcgggcccaaaaacacaattcttactatttggcccacaaagaaaaaaataagtaggggcagcctgagaaccagtcgtaccctccctaaccaaattggtacacggctcattcacaacacatgccagctagcccacagccccaacagaagagcacaggttgaccgagtcaaccaaataattcacatcatctcttccaatgatacccccttccccatgaaaattcggattaggctttacaataggaatatgatcaggtttctttcccacctccaggggagttgaaagagagtccacactcgtattggcaaaaactttccccgtcgactctgtcaccttaggacgccacaccctacgatcagaaaccgtaccccatctcttcaacgtctgactgtgtctaggtatcaaggcacaagaatgaacgaccagagcgacgcgaggaggcaagacatcaacccccgacgccggcaccggggaagagaccccatccttgagcccttgaccttcaattaaagccatacaagaattgtcagtccttcttgaaaaatagctcgggtaattcaaggggacattgagccacggtccgaacaatgggtacaggataccccgttcattaagcacggtgatcgacgaagtgaggtcacagttcccacgttggtgacccaacagaccgcactggtaacaaaatttacctaacttctcatatttcatttgtacccactggttttccccattttctaatttgaaaaaacaaccactgaatagaggtctattcatatccaagttgaccaagacacggatctagctcttccacgtaaccggctttgactcatcaagctcaatggacacaaccttacccaccagtgaacccaacacattggcattagcccgtgagtaatagtcatgaggaaatgcatttggacccaaaggcaaatcgaattaaatgacaactccttacacccaaacgtagaagaccacaaaagtaacactagcattttacccttaacacaccaagaaccttggtccaaaacccacttacaattagcaccattatcaaacaagaaccgaaaagtattagaagtatcctggccatgctcagacgcctccactttgacaagtttgttccgaatatttaagcaggccagctccacctctctagctgaaaaagtcatggaagataggattttacctaaaagatacaacattgaaagaactttagtagtcacaacacatggagcaagagaaatagagacctcatttaaagcgaggcacctacccttcttccctccagccgactcaccaacatcactcatggtcataaatacaaaaccgaataaaactgaaaaaaaaaccacaaggaccactcaccaatccaccaaactacaaaaagaataatctgagtttaccaacaaagaactacaaagacacaacacacacacattgagaatagccccttaccacacaaaagccaaaaagaaagaatgacacacaagtagaaaaagaaacaaggaaacaagcaaacttcaactcaagaagggaaagaacaagggacaaacgaatgaaaaagcaatggtcaactcaagcagggaaacaacaagagacaaccaaaagaaaggagagaatagtagaagacatattctccaaaagtgacgaagaatacaa

SEQ ID NO: 21383 - DNA, 1419 bp, Cannabis sativa
aaaatatttcgacatgtaatttcgaacgtgaaggttgactaagagattgaaataggagattgtaattaacactcctcaaattatatttaagggattattgttaataacaaggccgaggcgagcaatgtgtgcgtttcggactcccgcacactcgcactttgacattatgaaaaattatcagaatataaataaaatattaaataataaaagaatataataaaataatgtttaatgtagtagtagaaagtgtacttttaagaaaaaaattgagagattaatcctcaatctctacttttatattcttttaaagatatttaatatataactatgatggattaaatcttaaagctattaagagtttaaaaatttttattactacaccaaaataatagaatcattattttcataataattaaaaatttatttaaattttattttattttaggtcacaaaaatttaattttattttaagtctcatatactttagaatcgatattatgttgtatagtaacttattgaattgtattgtattattataatttataatgtacaatatcatttattattatgatgatattgtattatattgtagtattttttcaaataaataaaatatatatttttaattatatcatatatgatactattactaaccctgatcttgatcccaaatcataattcttaccttaaattcaaattaaggacttgacctcagaattgaatcccaactccaaccttagacctggatcccgaccatgagcttgacaccgctctaaccttgggacttgacccccgacttggacccaaacgtcaaatcacaaccttaaacactaatcaggacccaacaccgaaccacgaccttggaccttgatcttgagcttagcttaaacccttggtccagaccctgaccctgactttgacccgaaatttagaccctcgccttggtcgagatttggagcctagacttggactcaaacatgtgacgacgacctagaccgtaaacctagaacaaattcctaacgttggacttagactaaaacttataactcaaccctaactcgggatctaagacgtagatcatcagttggagcattttgtataaaaaatcacattatatatagaattttgcctctagttagagatggtctcaaaatctgcaaaactataaatatttaagtgaaatttttagcgcaacttaaattattttacctcaaataatattttaaattaattacactaatatgacaataattaacagcaaatatttaccgtataactaaaattgatattataagtagttttgttgtaagtaaaataaatttaaatacttaatgttggagaatgagtgtaagaaagatgttacttcataaagaagtggtatcgttaatctcaagaccgatcttgaaatttagtgggtca

SEQ ID NO: 21384 - DNA, 5126 bp, Cannabis sativa
aagcaattgaagtagcctcagacatgggaaaaacaattggagagttcaccaaatgtttgttgttgtggatagtgatagtatggctaggcggagggtaagttgcaaaggtgttactggacaatggtaaagatatcattagcatgtaaattgctgagagatcagtaattatttgaggggtcatcgatggaggatttggctgtcactttattcaccttacccccaacaggttggtgacttataatggaatactgatttagcgtggacagtttaaaataacaaatggttcttcagagctagaaactaattgatcaccattaagtgatctatccacagtagatgcattgccgacattctcatcaacaccagaattctcatggatttgagaagattcaacaccatacaaatgtcgaggttgaggcaatcctcttaattgtaattgagaatggttgagattaagctttcttttgcaagtcgggtcaacaacggccaagcatctcctttaaattttttttttttctatatcgatcataacccgaaattggaagagcatcatctttgataaatggctggtactcaagtttaggttcttcaccattgttaattttttcgagataaatcaaacatttgttaaaagaatggccaattctcttacactccatacaatattcaggcagtctctcatagtgaaaatcgtgaatatgagtcaaagaaatcattcgttccctcttaagaggcttagagacatcaatgtttactctgactcgcaagaaagggccctaactttcattgagggaatcctcaaaaacatcaataaatgtaccaattatgttaccaagagcagttgctattgacttggtcttgcttaggaaggggaggccgtaaaattgcacccagaaaggagtaaattttaaatcatccgaagtaaaatttttcccaacctccggagtgtgtagtacaatatggtagttctgaaagtggtaaggctcacgatgcagaactctaattttatctccttcacagtcaaaagtaagcagaaacatgtctgaggattcagaaattttaactggaaatctcccatcccagtgctcagccatttctttttgcaatgtagaaaaccaaacctttttctttgtaaaaaatttagcataaaggactgagtcgacggaggccaggggagaaatagcttcagtgtcatcgaagtcagaaacagactcctcatcctcagttaaagttatttttgctttgattttgttagtgaatggatcaataagagagtaataaccaatgtacagcagtgaaagaagagaaaaagaaagaaaaagcagaagagtagataaagaacgagcgtggagaaaggagaaaacaagaaactgatagaaactgctaaattctgagtaaaactggaagaaaaactgatagaaccccaggacggtaactgcctcagagcacaaagtgcttttttttttttttttttttgaaataattaaattttgatttaaggtatatttttttaattattactagacaaaatacggtttattttgtaacttagtataaatatggaactgtcgtaataaaatcagaaattatttgttaacaagttgtgcattatacagctaagaataaggtggaggtcaatttttgtgtttctgtagaaaagttccatttcttttctcaaaaggaaagcaactattgagtttgtttaattatggaagagaaagtagataaacggacatgatgactacacgtggatttgatcgaacttgcccattaccacgtgtccagatatcaaaatgccacgtggtcctcataaagaatcatgcgtgacatactcatctgaattttcattactgaaattcacagagaaaaatccaaagatttatttgagaaccaaccagagccatggattcagaagatcccaacttagagctcgtcaatgtcgccatccagaagctcaaggaggaacagagacaaatcaaagaaatctccgaagatgacgacgacgatcagctcttgctctcccgattgctttctcaggtttctctctcgtttcttttttcaatctatgtgtacatgttcttggtataaagattttgaatttaaattttggtttgttgcaattgaagaaacttaatcgggtatttattggtttgtttcaacttaaatttatttacagttggagtcactaaaaggagaaaacaatctagagcaagacgtagtgggcttaaagaaactaggagaaaaaggtgataataatgatatagatgaagagataaagagtgaggcttcaaatgaatcggacagtaataatggctcctctgatattttggacaaagaagagattgtaaaagaacttaagaaggttaagaatcagaaccgtttaactcactggcttctttcaaccatgattgttctcactattgcttggcaaatatctgaggtgtctctcattttgaaaattaaacaaggatttaaccacccttttaaatccgttggtggcatattaacatggatgttgaaaggctcaggtgatacaaataatagcaaagatgaagaaaaccacaacaacccatttgaatttgaagctccttcactcccttccctcaagattcctgagcttccccatgtggaattgcaggatttaacttcttctaaccaagaagaacactaatgtcttattgtttgtttcttctatttatatatatacctactatttatatatgtgtgtgcgtgtgcagttgtgatgtgaaaatcttttttgctctataatcgacctcttattgtacttgtttgctattttgtttctagtagcatttctatcactacatacaagaagagctgttgtcttgtggaaaatgcttttgtctgcctaaatgacttcaaaccacagcacagcagagagaactattattatcaacttgagcttactttagcagagccattatgattgtgatcaactgaaaggaatgaaaaatggaataaaaaaacaaaaacggcaaagtacagaatctgtcaacaatgctagccaatagttagaaacgaagtttaaataatgttattcctttctttcttttactttttaatatggagtgaaaaaaaagctatataatttgattcgcacctttatgcattttccttctctcaattgtttggccgggaaaaatggtgtctatcatttttccacatgtaggcagttgtcaatttttgatcaattgttagatgattcgatgagaaagaatgaattgacaatttgagtctgtgactacatacaatatatatggaataaagccaaatacacacttctttatttgtttataggtgcattctacgaccattatattaatagaaaatcccacctgaaaagaaacgtaaaggtaagatttgcctcatagaaacttcctggattataactattattaaaattcaacattaataaagatactgtgaaaaggtaaacttcaatttaagccttcagtaccgaattcaattcaatagttatcaggaaagtaacttgaatccatttaaccaatcacaaccaagaaaaactcagaaccatagacacaatggggaaactacaacttaaacaacaattttttttaaaattttaaaaaataaaaataaaaattccaacttttcatttgagaagtctaaaagtaacgagtgataatagcaaactggtttgtttcccaaacaatgcagacatcatttcccatcttctcttcgaattgcagagaatgttttcattcatgcataattcaaccggaaaatgtcattaaacacatagaagcttccctgcggtgttggcatcaagtggaacatctgaaaatgaaaacaaatacacaatcacttaggttatttgacaccatacatacacattgccactaataagctcacaaaaaacagccatgatttcaagtttaagcaaaccccagaaggaaaaacattatacacaagatgataaaatactataacccatgtttagataccaaagtaggtgtcaagggagacttgaacatcaaaaactaaccaccatttatgtctgaccatttgaacaactcatgaatattatagcaattaatgaatatattcaattcaagaaaagtgatcaaggaacccagaaacaaattaaccatacctaatgcaaaaccacatatacactaaaagtatcatcccaaacacacaaaacagcgacagtagcagacataatatcgtatctacataagattaactggcgaagtagattaatcaataaattgaaatcaccagaccaattgccaagaacagtaacaaaatcaattaatagctgcttcaatttcagatagatcagctgaataattagctggattaagacaataatttcaaatcaaataattcattttcgctttccaactgttaaaaatcgaatacacacgccaaccttttacaaggaaaaaaaaacagtgatctcaaatcaatcaacaatgaatcaaccaaaaaaaaaaaggtctggtccgaaaccctaaaaccctatcgaaagatccagaatcataatagcaaccaaacaaataaatggagcaaataaaaagaaagcagaagaaatagggaggtacctggctaaacttgagagcgtgctgttcgccggcaagctggagattgccgctgacgaagacaagcattccaccggctgggccagagggctggcaatcgacggtgctgatgttgtgcttgcactgctcaaaaggaagactagcgagcttggctacgatgttctgggccccttggaacttctgaccttcgaaggtcaacatggaggcgtcctggtatagggtacccagattggcacggctggtatcgaaggtggagtagtagtgctccacgaatgcctttgaaactgcgtctggatccatttccgactccgatcaaggcctacccaccgccgaaagcgtttcgtttttcgcttaagtttcacgctaaatgcaaatctaaataagagaatgaatgagatgaaagactgcgagggaagtgaagtaagtgatgacaatcctattttttattattatttttatgtttaatacattagcttttttaaaaaggacaaaaataaaatgggcctactattagttttatgggctttttgttgatccttt

SEQ ID NO: 21385 - DNA, 1803 bp, Cannabis sativa
aggaagagcaatgttcttgacacctcagtgattgacttatcgaagaagcaatacaaggttgtccaagacaaagggaagaaactcgcagtggatctgaccaccaagactcgtgatttggtagccctgcaagagcttttacctgaatgatgatttcttcctcgatcttgagagtgctccaatcacagacacttggagttgttattttgagaatatgatcgaggggatggcaaagtatgctcgatccttcacgctgactcagcatatgctgaaagacagtaagcttttcaagaagtagaatctcgttctgtaagagggaatgaagtaggccaagatctcgatgaccaacaagcataaagctattgaagacgcaggtaaagagaaaaagaaagcaaaaaaggagatcaaagagctaatagacaaagttgctgctctccaagctgaattggaagcgaagaagggtaaggtcacaacttctcaaatcaaaatggaattagagaagaagaaatggtatgaccaggcagtcaacgactacatctatacaaccttgactagcgttccctcttttgacttcactgtgtgtggtctggaggctgttgagatggctaatactttttgcactatgtctctgagtgaaactcaaggtgtcgtgcggatcccttttcctgagaatgcaaatcctgctactgagattgttgaggggagaaggtcgcaggcaatggtgaagaaaatgccctagcttcttaagaaaatttattctatcttttacttttagcggtacatgggtactcgtgagatgtactcattttttatttaagtagatagatggccttttgccttttcttttgatcgtggggattttattcttcgctccttttgtataaacattatgttccaacggggaacttttattcaaaatattttccaagtatgaaatatctcatctttatcatgtgttttgtgactacaactagtgcacaaaaaagtaatgacttttaataatacgattttagaacatctcagttttcattgagcatattaactaaccaagtaaagaaaatgcgaatataataaaattttgtaaaattccacgagcaataatatatgcgataaattagtagtacttttcattaatgtcatacgggaacatacacatcttccctagacttagagaatcaaatgtaattaaaattgactaaatatatacatgtgagtactactgataataatatggaacaacctaaatgtatgtgtaagatggggaagatcaaaaggtttaaaagttgtttaaattcattttatggattaaagtaagcctctagatcttggaatatcacataaaaaaactattaaagagtatggcttcgaacaaaatgaggatgaagcatgtgtttacaaatacattgaaggtaatgtagtgttattccttattatttatgttgatgacattctagttattgaaaacaatgcagaaagtttatcaaacgtaaaaaactagttagctgaaaaattttaaatgaagaatttaggagaagcaagctatgttctcagtatcaaaatctatagagatagaaagaggagaaccttagcactttctcaagaaacttgtatagataagatgctagaaatattctcaatagagaattctaagaaataatagttattgtccaggcatggaatttttctatacaagcatcaatgtataaagactccgtaggagatggagcatatgacaaagtattcctatgcattaggagttgggagcttaatgtacgcaatattgtgtacaaggcctagcatatgcta

SEQ ID NO: 21386 - DNA, 2948 bp, Cannabis sativa
agtcaaaaaaaccacaaaaactctgggacgccgcccaagaagccagcatatgagctgcatcattgttcacacgagaaattcagcaaacattacacaaactaatggtatggtatgttaggttaaattatataatctgttttcctttatatggaaataaacataatagttcctaaggaaatattctattgtcttgtcttatgacatggtgagttaatctgtattgttgtgtgttgatcatattggttaaggttattttggaaagttttgtttcggttggacagatttggtttgtgggatttctgtcttcggagaatggaagaacaatatgcggcgttctcgattcatgatgaggatgaagaagaatgggcttagaaaaagaaattgggctcaatgaaacacaaaaggtggagctgggccgtgagacaagtattcataattagggggtcaaaaatatggacatctccaacttagaagagaatgatgatgcagcccaaattgatgtcttaaaaaacttgatagaggcgggtgttggtttctaggcccgccaagcattatgaatgtattgagttggaattgccgaggcctgggaaccaacggaccattcaattcctaaaagaaattgtatttcaaaagagaccagattttatatttctgtgtgagacaaagtgtcataaatcaaaagtggtgggcctggcccaggctttgaattttgatagtgttttcgtggttgatgctaatggggcctcgggtggtattgctttgctttggaaaaataaggattctaggtctttgctgggttattctaagcatcacattgacttgcaaatctctatatcgcccacttctccaacttggcgtctcataggattttatggagaacctaatagaaatagaagaagtgactcatggacactccttcaaagtttaaaagacagatcatcacttccttggtgtgttataggggacattaacaacattgtgcggcaagaggataagagaggtgggcgcccttatccccagtggctcttaactgggtttcaacaaacattgttgcagtgtggtttggaagatattgagctgcaaggtcatcaattcacttgggaaaaaggaagaggtacaagcgcatggattgaggtacgtcctgatcgagctcttgtttctacatcttggaatcaattatttctttcggctactctctctaatttggggttcgctacttcggatcactctccattgtttcttgaaccagtcgtggttaataactttgcccctagtcgtagatttcgttttgaaaattcttggttgaaggagcctatttgttttgaaattattcgagatgtttggtcccaagaacacaatattagcatctctaataagattaatatgtttgctgagaagctatctagctgggggaaggagttaactggcactctaaatcaccgtattaagagttataaggctgacttgaaaaagcttcatggtttaagggatcctacttcagtccgaagatatgccgaaacaaagaagaagctttatgatgcgtttgatcaaagagagagtttttggaagcaaagggctaaacaattttggttgaaagaaggggaccataatagtagctatttccataaggctgctagtagtagggaaaaaaaacaaccagattactcaactaaaagatgatcatggaaattgggtctcatgggagtcgggtttgccgattgttgtatcaaattacttccatgaattattccaagcttcggggtgtgcgtgtgatgaagttattgattgtcttcctagtgcggtgactgatttggtgaatccagaactttgtcaaccaatagaggacaaagaagttcgagaagccgtttttcaaatgcatcctgataagagcctggggcctgatgggatgacttctgctttctttcaaaagtgttggacgattgtgggagaggaagtggtcaaaaatgttcgttctttttttgagagtggattacttgccgaggggtgtggggatgctaatgtggtggttctaccaaagacgagaaacctggaatgtatgtcggatcttcgtccaatagccttgtgtaatgttctgttcaaaattataacaaaagtcatggtgaatagaatgaagcctttcatggactcaatcatatctgaaaatccaagcgcattcattcccggtaggctgatctcggacaacattcttgttccttttgaggtgttgcattaccttagaaggaagcgaaaggttaaggatggttttatggctttaaaactggatatgagcaaggcatatgatcacattgaatgagactttcttgaggcaatgttgcggaatttaggatttgttgaaaagtggattcagctcattatgaaatgtgtcaagtcggcaaaatactgtgttactcatgctaataatgaggttggtccaattattccaacaagaggtataagacagggtgaccctttatcaccatacctcttcattctttgtgcagagggtttctctgctttgcttcgaaaatatgaacgcagaggatggcttcatggatgtaaagtggccaatggggctcctagagtctcgcatatgttgttcgctgataatagttatctgtactgcaaggctacagaaaatgaagctcagcggatcgaggaggtattactcaaatttgaacttgccacgggtcaaaaggtgaatttctccaaatcctctatcttctttagtgtcaatacactgagttccatgaaagatcgaatcaactcaatcttgggtatggtcacggctgctgaagatagtctatatttgggtctgcctagttcaatgggaagaaataaatcggctactttgggtttcttgaaaaacaaagtgaaaaatagacttcttggctatggtacaaagtttctatcaagggcgggcaagaagatattaataaaaacggtggcgc

SEQ ID NO: 21387 - DNA, 2165 bp, Cannabis sativa
tcatttcataagtaacaacttgataacatcatttcttataaaactaaaccaacattaacttattttaatccaccacatcaactcacccaacttcccaaatgctactctagtcgttgtataacattactcattttataattaacatgcatctaaatgcataaaatttatgattggtatcaattacacgattaaaaataatatgttctctacctaattttttattatttcatattaaaaagataatcacattatgttgatccctgcacccctttttccatcttaaatgaacttaaggatgatgtgtcaactctaaaaaaaagtatttaggacattgttattggactacaccagtaatacttaatactttttataagtggctttttacgatgacttagtaatattacctaaaaattattttttttaacttatataagacccgatacttaattacaccaataacgatatgataccgaattttttttaacaattctaaaagtacttatacctcatttcttttgagaatctttcgtagctgctacaacatgctactacttaaaagatcaaacatgattcatcttcatagaagttatgatgagattccaactttttcaatcaaagatgttataatttatacctactactactacacacaaaaggtagtttatatgattttaaacgaagagaaatactaaacaattcttagtaatactatatcataattattattaatgcaattaaatattaatttttacacagagtcgattttgaggttattgagcttggcatgcgccttggacacccgaattctcaagatcttgaaattgtaagaaaaaaaatcatcagtttataaaaaaaatattaaataataacaaaaatataataaaatagtattattatagagaatgttatttttttttattgtagcgtaatagttatacttatttactagtaatttagagcatctccaaatatgttctctaaacacaatccttagttgaaatagggagtaaatattttttttaaaaaagagctccaaccataaaaaaaaaaggctcactataatagagaatggatagagaacttcttctttttttgcaaattcttttttgtattattttaataaaaatattattacttttttaattatttaacaaattaatttatatttaataaattaaaagaataaaatattattaaaataattaaataccgactaaaataagatgcataattggggcaagaataataaaattaactctctattctaatttttttagctattttagctcaaatttggataaaaaaataaagaacaccttagagatactctttggggtattgagtttgagtggtagtaacatttctaatagtactctctattataggtaaataatgtgtttagagaacatgagaaatgagttcaattctaaatctcaaattttatatttttttagggtaaatatcattttgcaaaagttacaaattgaatcctctatatttttcagaatagtacaaataggactttgaattgattttttttgttaaaaatacttcgatttaaatgtattatgataaaactgtttacattttctatatctatttgtgttagaaattatcttcaagttggttatatatataaaaaaaataatttcaaaaattaagttcagggttctatttttactattttaaaaaatacagtatctattttatcatttcacaagacagaaagttcaatcggtaacataaggtctaattaaaatatatttaccttctttcaaaaaaaaaaatgatatttacctttttttaaaaaaaaattaatatatagctaaaattattaaataattattataaataaaataaccactaattattagcatgtgagagactactagtattagtaatagtaatgtagcattttattaatgtcgtacgttacacgtagtgaaagcgcgtgggaggaatttgatggtatgtggcaaaagagtccaccaataccctcatttgagccagtccaacacgctaagccaacaaaaactcgtgacgagcccctccttagctctcggcctaaccaacccccccaaaccccaacccaaaaagcccccaccaccaccaccacaactcactaaccaaaacccatcccaacaagaaaaaaaaaaaaaagaaaa

SEQ ID NO: 21388 - DNA, 1807 bp, Cannabis sativa
attaatcacaaccatttaatagtgatccaatggctaaaaaaatgtaaccatgtggttataataaaaatataaccattagaacctcctccatagtgtttatgtacattttaagcattttttttttttgtgaaggttgtggagaactcaaaataaaagctctcaacatcaattattattgaaagtgcgtatgtattcatacctaatattaaattatgtttgaattcttatgggatatatgagttttgttgtcgccataataagtataatattcattgttatatttaaatttacactcattacttagtaattcttacaaaaataagttcatgtggtcgtccacaagtggttttgtagacaaataaacgttgtttgtcaaagttttttttttttttttttccattttcttattggttgttataattaaaaaaataattaaaatataatgcgaagtccggcgcaatcacattgtcacactcttcaataggtcatcaacaatcaagagagttttttttttcttgccattgtaccaataactaaaacgtcactacaaaaaaaaagtcacaagtcactcttagtgataaatttttaattacaacataaattttttgtgactaaatgtaatttttagtcgcaacaaaaaattacttgttactaaagcatagtatttaaatacaaattatctctaatttagttttagtcacaacaagtattgtgattaaaaatatatttagccacaacaaattgtgattttcgtgactaatacttttaactataaactttttagtcacaacgtaggaatgataatttataattagtcacaacttttttacttttattcacaaattttgttgtgactaaaaataaaattttttatagtgcatgtagagagtttgaagaagaggagatgattaattttcctttttttttataaaagaaatgacgataataaaacactataaaagatgtcacttttaccagcaccgtttgcttccgtgctggtaaaagtaacttttatcagcgtatttcacaaactgcgctggcaaatgagtcaaagttttatcagcgtacatttgcagtggttaaaatcttacttttaccaatgcatttacgtgctggaaaaagtcatttttgccagcgcttttcatattatgccggcaaaagttctaacactaacattgatttgctaccccttttgccaacacattattagtaaattctattttaccagcgcaatactttgtcctaacaaaagtgacatttgttgtagtgaaataagaggaaaggtaaatggagtttataaatattatatttgattcaatatgataaatgttaaaaggtgtaatgttcagtattaggtatgatattgttattaatataatttaataattttttaaaaaatattactaactagttataaaatgtttaaaatgttacctataattagtagtagacaatattactattgcttaataacaattaacaatccttaattggtaaaatataattagttggacatgatataaccggaatatgaggagtggtgatttttttggaaggtaatgttagccggcgaaaactacaattcttatatttttgttgaaaagtcaaggaaggcaattgcattgtagatgccggttgatgtaagagcaaagagaaatgctaaccaacaatttataaatgtattataaaaggtgactaaatattgagttatatataatttaatttaataaataatataaaaattgttaactactatcaatatggtgttagatatactaatgcttgttagggatagttagttttctgt

SEQ ID NO: 21389 - DNA, 4967 bp, Cannabis sativa
ctagccttattagaagttgatttgcaacatgtaggagagggtgtaagtgcaagaggggaggaaagagtactcagcgagcttgatgattcgtcaaaattcttatgcatttaatgtgacatactaaaagaccatagacaatttttaaacatgaatagtccaatttccctttctatttcctaccgtactaacccccaatacatatatatttatataaatatatacacattgatggaaagataatggagtcatagcacttatgaagctcaacatacatctcctcttgtactactataatcacctatcaatatgtaaaatgcctaattcctatttcctaccgtactaaccccgaaatatatgtacacatattgatggaaaatgagagggggagaatgctaaaatgtattaatggtgccaaacactctctttcgtgtcaaattgttattagtataattaaatagcgggtcctatataatttaaaaagattatttttagagaatatcactaaccaatcgtaaagtgacacttataaaaggtgttaggcatcattagtgccaataacaaattccgctatgaagcatataggggtggcaatacatacctatatatgctcttgtattattgtccaagactggccataggctgtgaaagctgagcaaattgcacgagacctaaaaaattaaaggacctaatttatttattttttaatgaaatatgagttgttattttttatacacacaaattatgagtctaaaattcactcagttcccaaaattcttcataacttttatagtgctattcatttatatacacacgttttcaaaattaattcagatttttttttttaaaaaaaagaaatcttttatatgaatttatatatactcagacgtttaattcaaaattattgttatcatcactatttacttcttaaattgtgcaatttctattattattgttattttaaaaaatattattattttttttaactttgtaaaatatataatcttaacatgataatattaaaaaaatatatatattattcataatttacatttttttaaggaaaattatctaatgtactattttttattattttttttaaatttacagtttgggttgtagtttttccggtagtttctatgtgaattgttatgtgaattttggtggtaagttgctccgttagttgctatagagatttttgtgtagaaatacaaaaaaaaaaaattattaaaaaaataaaataaaatagtagggtccaatttttaaggctacaacatagcccaaaaatatttaagagggactgctactttcacaagcccctgttaggctcaacatacctccgctcgtgtactagtgtcacaataaatcaatcacctattaggtaaaatgcccaatttttatttcctaccatactaaccctacatatatttatatatataaaaacacatattgatgaaattatggaaagatgagggggctacgaagctaaacatacctcccctcctgtactaccattacaataaaataggtaaaatactcaattcttatttttattgtactaacccccatatatgtacattttaatggtaagaattaacaagatgaaattattggcaattagttaaagtttggcgattcagcaaagaaaagaaatatagatggagtttggcctattgggtgccaattaaattagagtttggccaacatggcattgaataaatgatcctataagctttttttttctctgcaacaaaatgatcctaacctattaattacttatagacaaaatttaaaaaatgatcctaccctattaattacttgtagacaatttaaaattaataacggggaacaattttagacctacgtacaagttagtttttttttctctttttcttgaaatatatggagatgtatcaaatctttttaatacatgggtattatgaactctacaaaattttttatttttaattataataaaatttgtgactaaaattacaaatattgtaattattcataaattattatttttatgttgtgactagtatattcgtggctaaaggtatttataacaaatatgtctttgagtggggctgttgttagatcttttaggttcttgttaattgtcttttcgggtgtatgtcttcaacatattatgcgaaatagtaataactaataacgcagtacatagtgagtatgatatgcactacagatggaaaacgaaatttcttggttggaagaaatttctccttgtttaataaccaatgtattgtttgactctcagcaataaaattggttattatattaaaaaaaatgtattaataacaaaaattacaatttgttgtgattaaaggtatttttagtgacaatacttgttatgactaaaactaaattcgtgaaaacttgtatctaaatactatgttttagtcaaataattttttgttgtgactaaaaatcacaacaaatttatattgtgaggaaaaagttgtcactaaagttatttttttttttttttttgtagtgatataatggttatacttttttataacctactataacatgttattaataggtatttttttttttaatttttagacttaaattaattataattaactatatacttaaaaataaattaatttttttaataaaaatatttaagaatatatttttttaataattaatatttataaatttttttattcataaaaataaatataattagattattatcatattacaaataatttattaattattatcattttataattatcgaacaactaaacataaatgtaactatcataattacatatttgatcacccatcataggataataaaaatgtggtattggaattttaaagttaaagacatttatacccttgtattttaagactattttaccctttataaaataaaatatttacttttatttcaaattatactatacatgctattaatttttttaaaatcttatagctgtagtatttttgtcttattaggattattgaacccctaccaattatgtcatttgaatttttcttttcaaaaaattatttcaacatatatctacgtgttaatatcttttactagatgtgttcatggtttggtttagtctgaatttttattttttatatttgaattaaattagtaatgttgattttttaaaattcaaaatcaaatcagactaattaaatactcaaaccaaacaaaacaaaaccaacccaaccgtaatttgtaatttgtcaaacatataatttaattttataaaataataataataaaaagtaatagtacttttgaataaagaacaaaaaagatttaacaaaaaggtatctatatccattttctattagagagtcttttttttatagttggagtttatttttttttttaaactcactccctattttagctaagagtgtatttagttagagagcatggttggtgaacacataactctttagaccttctccaaggcatcgtataaattttatagtaaatttaactaaaaaataatttaatattatatttgacctaaatttataattacactttaatgtgcaaatgacaaattaacccttaaagtcagcataatcattaaatttttattgaaactatatatgttattatgtataaattatttaaatggataaataaaatgttatattaattaaacttcttttgtttaagtctaagcagtgcttgcatatagaattatctatatatattgaatatttctctcaaaaaatattgaacaatcatcacttccaacatggagatccaaataccaatatcatttccaacatgccttttcttttcattcattttcttgttaatgggaatttatgtaataataagcaactcatcatcttcaaaactccctccaggaccatggaaacttcccattgtgggaaacattcaccaactcatgattgggtcttcattattactccatcaaacactcagagatttagccaagaaacatggaccattgatgtacttaaaatttgggaatgttccaaccatagtaatctcatcaacagaatatgccaaacaagtgatgatgagagtccatgatgttaatttttcatcatcaagaccctcaattcttttttcgaaagtcatgttatatgatggagctggtcttgcttttgctccatacaatgagcattggaggcagttgcggaggattttcatgcaggagcttttgagtacaacaagaattcagtgtttcaaatccattagagaagaagaaatgtccaacttcatagaatcaatttcatcaaatgttggtgatgttataaatatcagtgagagactcaacatgttgatgtataacattatttcacgtgcagcatgtggtaggacaaggattcgcaacaaagaattcttatcagtattgacagaagtgactgaggtatcattagggtttgaacttgctgacttgtttccttctttgaagttattttatcagatgagtcgttctaggcctaaactcgagaggcttagagaaagggcaacaacaatatttgaagagatcattcatgagcataaggaccaaaaaccaaaagatagaagtcatgaagatttggttgatgttcttcttaagtttcataacaatgatgatcaccttggattttctttgacaaacgaaaatatttatgcaataatctttgtaagtatgtatatatgcttactttttatttcaattagaaacacatagtatttgtttggtcagtcaatattagagttagtcccacattgctaatgcgtgaaaataaattatcacatataagatgaatgagttactcctctcattgccaattagttttgagatataaactcattcatcttatttcaaattctaacaattaattaaccactttgttttagtttatatttatcatcatcaccattactttcattttatgctacttttatatcgattacattactatgtgtgtaggta

SEQ ID NO: 21390 - DNA, 2471 bp, Cannabis sativa
  modified_base (2200)..(2202): a, c, t, g, unknown or other
  modified_base (2423)..(2443): a, c, t, g, unknown or other
tttttgaaaatatttttgtgtgaccgtatttttgtaaaacttatcccaaattccagtatttttgtaagtttcccaactaaaataatactttatttcacctcatttccctattttaccccctcataacaataaagctaaaaaaaacaacaactctctccctctatctcaatctctcctttcacgaggatgacggtcggcgacgccagagagatcactaaggccacgaatcacgcacatattagaaaaactaaataactcaatatataaaaatttatatatatagaacacaataataatagataataattagaaatctgtatctaatagattcatataaattatcgcaattcgatagtgtaattctattaactaagtcttcctctctaggtctaggtctcaaaatcataaacaattttatttatttgattatcaaaagtatacaattgtgatgagatattagagacttagctacgtaattacataaggcaccattttttgtaaaaaaaaaattacatttttatgtttaaagatttttttttacatttttacgggttttcattgaaataacacaaaaacaacaagattactacataaaagtaacataaaaataacatttaaataatatcaaaacaacaacaaaaaataacatatagataataaaaaatcaacaacaaattaacaagagtataacataaaaagagtgtattttctgtaaataaaatcaaaaaattcgtaaaattatttaaaatttcgtaaaattgtatttttgtattttttgttgtttttgtgtatttgtgaaataatctcaaaaatttatctgttggtttcaagaggaataataaatagtattgatggaaattaaaaatgaatttattatgggaattggtttatttggatggagtcaatctctctctattcactattttagttatcaaagaatgtaaaaaaaaaataaaaaaataaaagggcattaaataaggaaaagaaatcataaaaagaaaaaaaaaatatatattgctttttttttttaatttgggcatgttgcattagtggaacgctgagttaaaaaaaatatataaaaagtaacacctttttaatttttgggccctgtgcatcagcactttttggacgtgtacatggccgaccttgcttgtaaggtatagaattttatgaggatcttctctaaaaattatgattcaagttgagaaagacattgagattgagttttttaatttttcttaggattagaagttctctgaatattcgtaacaagagtgtgtgatatttatcttttattgtataattaaatctaataaaaattaaaagaaaataataaaataattataatctcatgttaatttaactttaaataaaataattaaataataattttattcattagatataagttttaaatttaaatttcaaaacttaggatttctatgttaaatttaacaagtcgtaaatttgtagctcaattttgaacccaataaagttcaaattacaataaatttatttctacatgatttgttttatatgtcgtataaaacctaaaaactatatacatataaatttgaggaaatctaaaaaaggttaattagattaaacttttttctatcatcatcagagttcttgctcatgtgttgcgacaaaaataagaacctaatatacaatttatactattagcccatactaattcttgtgtgtggtggaaggttcagaagatcacggtgtgagttcttcatcaccatcttgaggatacaacttacgaaaagaaaaaaaaaataccctaatttgctttgagagataaattattctttttgtctatttatttcagatttcacatatatatacatgtggtgatcccaacgatatggtacggtgataatcataattattatttcgttgcatacctgatttagtaccacaaaactaaaaactggtatgagagtgattcgaataatctttattatatacaccttcacttagatatcatactgcatcagtaattcgaatcgagattgcttgcaccgaataacatgcatcagtgaatcatactagcaaccgttgattaaaaattccatatctttaatacgttgctgattgttttatttatggctaaatgattttaattatacatacaatacaagtcacaactttatgtatgggtaagaaattttctgatatttatatataaatnnntcaatattaaatattaataattttggatagtacatatcaaaatattcaatttttatttataaacataaatgcaaatctgccacaacttttatttataaacaaattgtctttacagaaatataaactatttagatttttctgaaactttacaggtggtcctaaataactataaggtatatgatcgtgaaaaaaataaattaaaaaattattctgaataccgnnnnnnnnnnnnnnnnnnnnntttgattttatatacttaaaaaataaaa

SEQ ID NO: 21391 - DNA, 2620 bp, Cannabis sativa
ttaacaaaacacggggtccaattgataaattgataacttttgcaaaattgataacttttgcaaaacagaacttttgcaaaacagagggttttgcaaaacagagggtccaaaatagtatttaccttaaaataaatacaaactaaatggcttgtgagctttagtacattaacatcactttaaattttataaaaaaagtacaaaaacattaatgtacaataaaattgagaataaaacagaccagtatgtactaattaatctttaagcaattattctagtacaaaagtgcttcatgctatgtggatttagggtgtgagtatgaagaatctatgagagttacttgaaaatagatggatccaccactacacaatacaataatgacatggagtacttatcagccattgtctagtagttcaaataataatttaaattttaaggacaaatagtgcatactaatatattttctttttacttatcgacagtgaaagggaaatcaatattaatttataaaagagatagatggctatgtatttatatattacagatagatataatttctcattatactatatgaatatgcacatgcttataagcttagaagtagcgaaaactgtgaccactactttaagctcactaactagtgggtaacattagaatttatatagttttactatctcaaataatatattaagaactctatcctaaactgccaaaaccagacacaaaggcttaagaatttttgcgatcaagttaggccaatagagacctacccacgatctctatacagtaaacaaaagttctcacgactctctctttttacaatctacaattcaaagaaaaacatcatcatttttttttatatttctctcaaagtgcttagaatactaataattagtataatcaaacaaattgcctaaaatattaagcagtcaagtatttcatcaacacctattaaaataataaagcaaatatgaagaatacctttcttagttcttgcaatctcctcccaaaccaaatgttccctaaaaaagaggaaaagaaatcacaatttggcataaggaaatcacaagaacccaatatagatatttcatcccaaaatttgtgtcaagtcaaaaaaaaaaaagagaagcaattatgacatgtatcaattcttttcaaaagaccattatattatcacaaatcagaaagtgacacataaaactaacaacaaaagagaaataagaaacaaatagagataaggaccaaacatccaaccaaaacttcctctgttaaatcaaattttgagcaaacttacgaccatcatctttggatgcaatttacaactttagatgcacaataaatatacaacaaaaaagttttttgctgctactgataaaatggtcaaatccaagcatactataatccaacattataaattcaaaacaatgaaaagctactcagctcaactatggggttcaagaactgatattggcaatgataatggtaatacaacatactatactaacagttttattataatcttctacatatctataccaaactgcatacacacaattttagaattgatagaaaaaaaccaaaagccaatagaagagaattagagttgaggaaactggaaaaaatttattactttaccaaatgaatttaaatatttaatatggaatggaaatggggtttcggttttactatctcaaaggtgaaagtaattcggttagagattcattctgaaatagtagcaccacaaactaaccctaacctcactcctcactctccactcttcttcttctttcttcttctctattctcctctaatgggggccttttggttttgttgccaccaatacaaattacaatacaatatataaaaataaattttcatacattaattatttatatatacttataattaaaaaaatttatatatataccaagagccggcgagtggagctcttgaggtagatggtcgaatgtcctatggcggtcgagttttcaacagaggagagcatcgtcgttcaaaaggtgtggagctcaaatggtggtcgtgggtttgaagtgaaggtcggtgggggtttttcgttaaagtcggtgttcgtcaggggtttcagacgaggttggtggagaaggaaagacgggtggcaatattcgctaaagccttcgatttggatggacaaaatgatggaaacctaatatttgtgaaaattggggaagacgatatgggagggggagttaattattttggggttaaataagaaaggcatatagcttcagttatcaagagacgccacacagtagatgcataggtggttagcgtcaaatgctaaccgacacaatatgtatattagtgtcgaagtaccaaccgatgcaaattcattatcatttgcgtctcttaacaactgaagcaaaaaagtaaatgttttcttttgcgtcagtcaacaagtttgactagacgcattgaccgacgcaaaaaccctattttttagtagtgattcaacctagatgagagagttccttccataattatttcacctccttcattgttctccaccattctaaaccatagtgaaagagtgccatgcccacacatagcaagtcaagcactcaatcatagtgagtaagacggtggt

SEQ ID NO: 21392 - DNA, 6175 bp, Cannabis sativa
gtataaatcttaaattttttcataagtgcataaataagcataatttattaattacggaaatttatttagcatgtgtgaatataatatgagatattcgttgaataaaaatattttcaagtttggcaacgttgcagactcgatcgagggccaaatatatcattacatgtttaattagtaactttaacaagaatatttagtagtatatttattaaggtaattagaagtacttgaaatttgacctagtacgctaaaagtaaagattaatagctaaaaaataataaataacttttattaaagtttcattattattactatcataactattattattattaagttttaaacttatcagaatataaatacatatattaaagttctcttaaaaataaagaacaaaaatgaactcatactcttttagtgcgacaaaacccttacaccctatatccattctcttcgatttccaactggaaacctagtgattcaagccccagtagtagctggatacttattcattgaagaaggagagcttaaggtaaggatcaatttccattttaaatttaaaagattaattttatatgttgacattgttattttgagtagttgtgggatttttgacttcatgaaactatttttgggttgctatgggattagttttgatgtttacttgttgaatttgaggtggttttgaggtgaaaaattgagtttatgtttttaaagctaaaagctcaagctttaatggaattttccatttgaagacttgttttttatttttgatatgctaggactattgtatggatgatatatatgtgtcatgtgaagtttagaatgatttggataagttttggtggtatttttgagagtgcgaaacatgggacaaacgtttcctgcagaaaatagtctaccattttggggaaaacaactagccatttcttgtcaggaaacttagagaaaacggttagtcatttcctaaaatgacatgccgtttctaatggtatttttgaaccccgtttgttgtatttcttggaattttaagtaaggataccctagcgacctatagagaatctttggaaatgatttttggacatggaataagattaaattacttggttaatcgttcttttattgtatgacataggacccgagatcgtcgatcattctccaaccaagtcggccaatatacctgaaccgaaacttgaagtaagaaaagtataatgtaccacataacatgacaaatttcttgattatcgattatgttattaggaaatggcaatgtaatctacgggctaacctgattaggtgatgcgatatattagtgccaagttagggcataggcttgcgtgattaggtgatgcgatacattggtgccaggttatggcacgggctcacttgattgggtgatgcgatatattggtgcgaggttaggacacgagcttatttgattaggcgatgcgatatatgggtgtcaggttatgacacaaactcacttgattaggtgatgcagtgatgttatatatattgtcacactatagcacgggcttgcctgattaggaaatgcaatatacagttactttttattttctatacatatgatttttaatattatataatcgttggaatattattgttcaattattttatgatggtaaaatggataataaatgattacatttacttcctttattactttcttgttgagtccttttgattaacgggtgctctgtggtgtaggtaagggcaaggaaaagttagaacagccatgaggcgatggtcttctctggcgaatgtacatattgactatatcggcatgtgtgccgtattgctaggagttgttttgggctttatctgctatgtattttgacttgttattgtatatagtcattttgtaaaacttttataacagggatcccaaaaaaaaatttagtgtcgttatgttgtttattataaggatttcattttagtgaagtttttatatcacatttgttaataattaattaatctattattactaaactaatttataaaatcacacatgtgacgttcttatagattaatgcattacaatatatatttccaccaagatccataacatttatgtaaaagatataaatataaatatatatggatttttcttaattctttactaatcacagtgctacttggctacatttagtttaagttttaaattttgattggatatgttctaatttatcatttgagttaaagaattatctaataaaattaataatgtgatttgtgtttgtgcaaggaatttaccatcaatatagtattcaaaatatgtttttgaaaaatatgacaatttatagtgtcattttttgtgggattatgttggaaataaaaagaatattagagagaataataaagaagaggctatattttataactcaatttgtgtgtttttttacttggtacaaaattgtgctattacattctatttatagaaatgactattctagaaacattattaaatgaataggttctacacttttcaacataatttctactactaacacaagtaaaggagaattctagaaattttaagagtacttaaacaaactagtaaacacaagaatattctagaaaatttcgtaaatgtagaaatactctagaaactctagcaacaacaagaaaattctaaaaattaactatattaaatcaagtttaatatttcaacacctcccttaaacttgatttgtgactctaagaatgcttcataatttgatgaatatttctctcttgaatgaactcataaaagtgtttgcggcttaattttcagatttgacatattccactcttattttttttctccaatgcattctcgtatgtaatgatagtgggtgtcgatgtgcttcgcttgtttcgtgaaagactggattctttgctagtgcaagtgctgatttgctatcaacatgaatctcaatcggctcctcttatggcacattcaaatcctttagcaagtttcttagccaaatatcatgacaaacacatgaagttacactaacataattagcttgacatgtttatagcataacaattgattgtttctttgacatccaagtaaagcttgtatttgtcatgaagaacacaaatccagtggtgctctttttatcatccaagtatccactcccatcgctatcactatatccaacaatctcataattgttaaaggatgaataaaatagcccataaatggtcgtacctttgatgtaccgaagtattctctttctattcttcaaatgagttattgttggagctttcatatagcgactaacgattccaagatcatagagaatatccgttcttgtacaagttaggtaccacagacatccaacaaggcttttgaagaaagttggatctactttttctccttcatcatgctttgacaatttcactccacattctatttgtgtgctaattggattagaataatccatcttaaacttcttaagtacttcattagcataactttcttgagtggtgaaaattcatttgtcttcttgcaacacttcaatgccaaggtaatatgacatgagcctaatatctataatctcaaattcttttgccatatgtttcatgaactcttcaaacatactcgagctactaccaatgaagatcaagtcatcctcatacaagcatacaatcaaaatttcttaattttttatagagtgcatgctcatatggacacttggtaaaatccttgtctagaaattacttgttaatttgagtattctaagatctcgacacttgctttaggtcatataaagccttcttaacttcagaacttttctttcgtgcccttttatttcatagcccaatgattgctagatgtagacttttttctcgaggaaacaatttaggaaaacagactttacatccagttggtggatcttccatctattttgggctgctaaaaaaattattaatctaatagtttcaagacaagcaactaaagcaaatatctcatcataatcgatgccttctctttgactgtagccttttccaatcttgcttcatatctctccacatatcatttagcattctttttttccttgtacacccactttactccaattgacttgtatccttgtggacatgtgttgttttttgtaattgaattaattatttcatccattgcatctctccatttcttgcttcccactgcttcttagtagtatagaggttcataatcaccaaatagacacataagagaaatgtcattttgatttttagttacctcataaagttcttgcgagcttctaaagcatggcgtctttccatttgagatttcacttgaatcttcttgtacgtttctagttggcgagaccagtggagtagtaggctcttgaagttcttcttccatcattggtttctctctacatcttcctcttcaaattaggctagaaaatcgtactcgccttcttctgtgttcttattccaagaatcctctttacgaaactctatgtctcgactgatgatagtcttgtcggtaattgggttgtataacttatagcctttggatcttgaatcataccagatgaaggtgtacttttcacttttgtcatcaagcttggttatcttatgatcaggaacatgaacataagaaaaaatttcaaagactttgaggtgagaaattctaagttttcttccactccatgcttcttgaggtgtcttctcatgcacacttcttgttagagagggattctccaagtaaactacacaagctatcggttccgcccaaaactcatttgacattcttttgcttttgaacatgttgcgagccatgttgagtatggttcgattctttctctctgccactccattttattatggggatcatcactgttaatgtaatgataacttagctttattatgtgatttagtagataataagggcttaatttaagaattagacttttaattattatttatgcaattatggagatatatttgaattctagattaattaaatatgataaatgtaaatttttatatttttgttatatttttatgcccagtaacagtggagtgcggcatttggcctatagagtcactcagacaaggtttaatatccttgttttagtggggcaatatttttaaatacttggaatgttaggagtatccggggttatgattttggaccatattgcccctacattataggttacttcttagtgaaagaaaatagaaattagtaatattatcatagtttgttttttattagatagttgattttatagtaaatcttaagattaatttgttcagattaagttaaataaaagataagtatttcactattatctcttatctaaaaatcaaagagaaaaatcattcaaaaaaaaaatcaaggagaaaattaattctctctgttctctcttcacatttggacctaaagaacgctaatggggaaactaaatttttacaccaaaatcttgggtgttggcagcatggatttaagtagttagcacatgattaacttaaggtaagcatctccttccttttttctttgtaattcatattaaaacagttaggttttcatagtttttatgaatttagcttttatatgtttgggttgcatagaattgttttttaaggctgttttgaggttattaaaggtttttttaagtaggtttcgtttggttatgggtaagtttaagcttgatttgagttattgaactaaagcttagaccttccatggtggattttgttatagattcttgttgttgattttttcagctggtttatgattattatggcttaattaggtagtctagagagtttggtttgattgggggtaaaattgagttgatggtgaagtttttaggattttcttacagagaaccgattaaccaattctcgcagtcctgtagaaccgattaaccatttcccaaggtagaaccctaggaactgattttccattttcggaatctgatttactggttctaacaattgtaggacactttgtgttttagcaatgttagggtattgccacgatatctatcgatagcgatacttttagttttaaaagtcccgaagaattcatttagagtatcacttatcagttttacgaatgttgtgacttagaggcatgtaaatcgtcgagtaacaatttctactcaagttgaccagcacacaaaaattcagaatcaaggtaagatta

SEQ ID NO: 21393 - DNA, 11379 bp, Cannabis sativa
tcccaaaaagaaacaaaactaaaaacgtccaaaagaaaaaaaaacaagactaaaattctctaccatgaatgttaaaagccctactactataacaatagcaaggtggtgaaacaacatcattattaaaaacaaaaaaataaacatagcaaataaaaataagaaaatcaacaccagtgaagattcaatccaaagctaatgaacaactcaaatctctaagacatacctctaaacaaagaagatggagaagaaaataactcatagacagaaggatagcaacaatcccaaaagtagtgtgggaattaacacgactcgaccagagccatagtgtaaggctaagaaactgctggcaaaccctagtcaggctaaaaaaatcaagcaatggctaatggtgagattaattactagttggagagatttgaaagaaaatggtaaagtctttttagtttccttgtttctaaaacttttaattaatcatttatgtgaacttccatagttcaaaaatgataaaaaagaatcattttaatatatgtcgtttattccataatattgtcgtttgaaaaccaaattcaagtaagtttgatggtctgtcatttgaaaaataaaaaataaaataaaataagaagaggtagagaactttgattatgaaatattgaaatgaaatgagcactaaaaaactcataatgtccaaagctcatttccattcaatcccacacatggttcgaagctccttacaaaaccccataacccaaccaaacacacccttcttgcccaaagcaccatcaatcttggccaccaatctaatgaaatcctacttagaccaaggcttggtcaaagatgcacgcttggtgttcgatgaaatgcctcacagagacgtggttgcatggactgccatggtggaaggctacacttcttgcaatcaccatacccaatcatgggttttgttttctgagatggtaaagaatgaagtcaccccaaatgcttttactttcaccagtgtcatcaaagcttgtaagggaatgaagtctctttcatgtggggctttagtgcatggtttggctattaagcttggcatggaaggaagcatttacgtggaaaatgcagtcatggatatgtatgctacttgttgtgctaccatggacgatgcgtgtcgggtttttcgggatttatgtgtgaaaaatgctgtttcctggactactttgatcactggtttcactcacagaggtgatggttatatggggcttcgagttttccagcaaatgctacaggtaaatgactgttacaatctctaacgtttgattgaatgatcacttgaattcaagttgtgttactgaatttgggagctttctgccatgttaatgaatttcttgaatatcttggctagcaggaggatgcagaactgaacccctttagcttttcaattgcagttagagcttgcgcttcaattggctcgcgtacttctgggaggcaaatacaggcggccgtgatcaaatgtgggtttgaatccaatcttgctgtgatgaactcaatactagatatgtattgtaggtttacttgtttgccagaggctaaccaatgctttcttgaaatgagtgaaaagaatttgattacttggaacactttgattgccggatatcaaagaatagattcaagtgaatgtctatatttgttttcacagatggaatcacaaggctttagtccaaattgcttcacgtttagcagtgtagcagctggttgtgccgacttagctgttttggcctgtggacaacaggttcatggtgggatttttcggcgaggttttaaccagaatctggaagtaactaacgcccttattgacatgtatgcgaaatgtggaaacatagctgactcgcgcaaagtttttgacgaaatgtgtgataagaatttagtctcctggacttccatgatgattggatatggatcccatggatttggaaaagaagctgttgaattgtttgatgagatggtaacatcaggaattagacctgatcaaatagtgtttatggcagttttgagtgcctgtagtcatgctggccttgttgaagaaggcttgaggtatttccatacaatgacaagtgattataatgttactccagatcaggagatttatggatgtgtggttgatttgcttggccgttctggccgagttgctgaggcttatgaattaattcaaaatatgcctataaagcctaatgagtctgtctggggtgctcttcttggagcttgtaaagcacacaagcttccacatttgggaaaattggctgctaccgaaatattggatttgaagccaaatacggtggaggcctatgtgttgctatcgataatttacgctgctgatggtaagtggagggaatatgcaaagacaatgaacttgattagaggtatggggaacaagaaagaagcagggaggagttggattgaggtaagaaaccaggtgtatagttttgttgttggagataaaatagggtctcatacaaagagggtgtatgcaattttggaattgttgattcaacagatgagagagacagagtatgaacctaatttagattgcttaatacatgacctacaagatggaacttgaagaaggaagctggtattgaagaccgaaaaggcattttaatcttgtcaacatctttgcaaaatgcatgaaggtggaccaactaggaacagaagagtatttttttcactatacaaagaggataatgtgaagaataggaaaaataatgcatcttttgttgagaagggggtttagagtattggttagatttaaaggaaaacaaacaagaagaaattgaaggtagaaatacatatgcataaccagaatgattatttgtacatttcgagattcattctaaatgtataatatctgcttaccctattgatttaatttgttaaccaaagtgataataaaaacaagcaagttggttttcttgctattttattattgatctgtttaactatatacaatcatggtttgtggatgaacttgctagactccatgaaaatggtatttggaccttaattcaaataattgctaactcaatattaaagattcaaaataacaaagtaatttccaaatctttacaatatgatgttttgattccaagagttggccatttagcttacatcttatcttctactaccaatactccaggcaagaacaagaaccattgttgaaatgatgaaaacgatgtcgatccctcaccacaatcacgcgattatatgctttcgagattaactttgctgctgtatgacagtcattgcatattctcagattcttcattatccttattggtgttggaggactggtactgataagtccaaaggcaatggcaagcttttcactgtgttttaaaagagcagtttccttttcttctacatcaatgtcgagtgaaacctcattagtctctggtgcataaccttccatcttcaatctcgtcgccatttcatccaacttttcctcaatctcttgtatcatggggtgtgttttgtccccggcaagaaactcgtgaactataccatttgcttcaataatgctacaacccggggtcttcaccaccccacgacgcatcattgttcccctgacatcaagaacatcattccagtttcctcttgaagcacatatgttcgacaacagcacatggaaaccatcatgatctggctgaagctcaatgagcattcttccaatcctctcccccatctcatggtttccatgtttcttacaagccccaagtaaggcaccccaagtcgaaacatctggtgtcataggcatacttttgatcagttcctcggcctctttcagcatacctgcacgtcctaaaagatcaaccatacagccataatgcttaacattgggttctaccttgtgttcttgaatcatggaattgaaatggcgacgcccctcctcaaccaagcccatgtgtcggcatgccccaagaacagcaacaaaagtgatctcattaggtgctacctcacatgatttcatctctgaaaacatgtgcagtgacttctctaccaacccattcatagccaatccaagaatgagggcattccaagtggaaattcccttctctggcatcccccgaaaaacttccattgcattatctacacagccacatttcacgtacatgtctataagggttgtgcccaatatgggattgacctttaaactgtttttccttatataggcatgaatccattttcccaaatccagggcagccaagtgagtacaagctgagataacacttaccaaagtggtctcatcaggcttgactccaaacctctgcatttcctggaataacgccagagtctcagagaagcagtcatgttgagcatagcctgatatcattgcactccatgagatgacatctttctctggcatggaatcaaataatgccttggcattgtcaactaaaccacatcttaagtacccagatagcatggtgttccaagttatctgattcaaaagatgagctgcattaaacaaactctgagcagccattatttcaccgcaactcgagtacatgtgaatcaaagcattttgcaggttaacataagtttcgattccaattttcgcgaccaaaccatggaccattttccctgtctggacgatcaacaagtttgtacaagcagaaagaacagtaatcaccacaacttcatccaacttaattccattagcattcattttcgtaaacatagccaaagcctcattgaacatctcattctgttcataacaagaaatgacagcgctccacgaagccatgtctttctcaggcatatcatcgaacaaatgacaagcctcggttaccaaacctgccttaccaaacatcgcaatcatcgagcttgaagcgattgtgttctttactggcatacgatcatagatataactagcctcttctacattggccgtttgaacatagcctcctaatattgaattccatgttactaaatctaagcaaggactttcatcaaacagcttccttgcatcagccatattttcacaaacagcatacatgttaatcaatgtgttctgaacataaacatctaactcaaaacccattttgaagacatgactatgcatctgtttcccttcaatttgagataaccgaacagcacaagcatgaaccagaagtgggtatgtgtagtaatcaggacccatgttttcctccaacatagatttgtacataaacagagccttttgaggacagtttctctgtacataagctctcatcatagtattccaaatgaacccatttgagttctcaatgagattgaatatatagagggagtaatcaacatgaataaagggtaactcagttgagaacttgagaagcctacttgctgcaaatgtgtctttgatgaacccagtcaagaccatttgagaaagtacttgcttaaattgcttgaaattttggcatttgttcaagtgtgtctctaagattgatacatttatagttgtcttgtgattcagagtggattttatggctgaagaaaggtgtctcagatggaccaaactcatagataaagatttgatttttagataaactaatggagtaatgggatcaattcaagcaaaataaggcaaaaaacttatagtacaagccatatacatatataattatgtaagtgtgtgacattaaagatttgatttttggtccttgggatatcttgatggttttcctctcttactcgttccccaaggatataaagaaaagaggaatctttccaatgcaatttaagacttgaaagactagagagtcaaatactcaaaaaacccttctaaaacctcgaaagaaaatccaaaatgcctcgaaagcctatactcgaaccaatctctacctctaaaaacagcatctttactcccggttccgccgtcgagatcagctccaaggagccaggtttccgaggatccttctacttgggttccatagtgagttcccaagcttctgactcatacttggtcgaatacaaaaccctggttgaagaatcgccaaatgggttccaacccttgagggaagtggtgcgtttagctcagctccggccggcgcttccgccggacaccaaatgggtttgcacgattggggaagaggtcgacgtgtaccacgatgatgggtggtgggaggctacggtgacaagggacttgggaaatgggaggtttcgagtgttctttggtgattataaggaggaaatggagtttgccaaggagagtatgaggctccaccgcaagtgggtcgatgggatttggactccacagttggttgaaaacaaagaagatgaacaacaggtttgaaaagctttcacttttcgtaatggggtttaactcttatactcaactctgtctctgtttttacaagtttggaacttttctttacctttaaagtttggacattttctctcctgtattttcgcatgttggcttcttttcccaaatgtaactattttctacatgagaacgattggttcattgtgtttatgaagtttgatgcattttgtttgtgtataggggaacaagaacaaaacaaaatattcttcttagatgaggacaaaatcatttgaaattgtggtattagttcctataaatccaacccaccaaatccgttaggacagttggtttttcaatcaacttcaacaaactttccttcctactgggatttcaaatcatatgcctaataaatagccaacttcatctacttttcgagacaagagagaagagaagagcaaactgagagggtacaaagaaagagtgagaggtttttcttgggttttgtatggagctccatatgttgatgaatatgctagctcggtttcgagtttgaggaaagatacacttgagtgaatctatgagagctgttgttcctgctcgactgtggtgtacaaagattattgctcaatcaatacttagaagagatagtgttcccaaactggaataaggccatggattgcattgatctatggtcttgaaccagtatatttctctgtttaatttgtgttcttactaacttgaataatcctttagctgttaagttcttgattaacattgttagttagattattttcccacagatatcttttgacttacaatagtaagaaattttcttatagcaaactcacattttgttctttattatctttgctctattcattcattcaaatacatatgatggagtgtcatcttctgcattgtcttgcttagcttttacaagcttagtttctcatgtatacagaaaatgcaaattgaaatggagataaattctactgaagaaacaaaggaagaaacgcttgggtttgagaaggggactataattgaggtgaacagtgatgaagatggtttccaaggtgcttggttcacagcaaccattgttgaaccaataggggaagacaagtttcttgtggagtaccagaacttgaggacagatgatgacaaagagtttctgagagaagagatagataaaatccatattagaccttctccaccagaaactttaagggatggttgttttcggttgtttgaagaggttgatgctttttacaatgatggctggtgggttggtgtgatttcgaagattgatacaaactcaagatattttgtctactttaagagtactaaggaggaaatgcaatttcatcactctgaattgaggcctcatcaggaatggattaatggtaaatggcttgtggcttttcaggtatgtattctatatttgtaagcagaataattcttcaagtgaggatatacatggcatttgtatattaagctgttttcttacaactattataacacttggcttgcttgctctgttgggaaatgaatcatatcaaaatatttatatatatgtaaaggttttttcatgaataaagcaatgtggaaagttatataacttatttgagtaaagtcaagaaaatatggtgaaacatgtggtttgcttccacaagattcaagtgattacttttttattctgcagtatacccttattctaaatgagtatttaggtagactctgatatagtctaattctttttcacttatgttgtagttatttaggatttcttataaatttttaaaacattcaaaatagtttatagtgtcaaaaataaggttcaaacagttacttaccacactaataagaaaaaaatagtaacacggcaacaaaatatttgaattttatttttaatattataaaaaattagaaaatttttaaaaatttacaagagatcctaaataattaaaatatcatgaaaaaaaaaaatggcttaaaaaattctcttggatgccatccaaatagatagaaaatctactgaaatatcactttagagggtttattgtagacttgtttttttgtgtatatatattagaaaaagaaggattggaatttagaactctttataagaagaatgtgaaactactaggccctactatgaccacatgtactatagactttattattttggtcctcaaatagtttcaagaagaataaaaaatggaaagaaatctgtagaaggtttgggaatagccttaaggagctaatttataatttactgacatcaaatccagaagtgtgagcagtgaaatttgtgaaaaatgtttgataaacaagtaagagctttaaatagagcttcaactgccaactgaaaacctctcaaagcaaatcattgtggggtagtaaagatgtaaaaggatatcatattctttgaccaaaaacaaaacaagctttaaatgtctttcttatgagttaagtttttccaattgtattgtacattaccaggattctaacacttgtccttgacaggcattaaagttttgatggccaaaccaaattactacaaaattgcggttgaacttgtcgttttgattgaagccattaactctacttactattgatgaagaaaacagagttcagatcacagcttctttgctttttcaatttcaaccatgtttatatgcctgtaaatttctggcttaattgttacttatttcgaggttaagtaagttcaatacaatcccagcttttctttttcttacttgatagtttttctcaggcacaatttttaccatttgggataacaaaatttgaatgaatagattgagaaatagccttcattgttaaactctttggctttatctgatttatttgcattaaagttaagatctttataggtttacttgttcacctaaaaaaaagaagttattctgttaaatgggttatctacctaataataattggtagaatgctaattttaatttccggtggaatataatttttaatttatttttagaattattatataatatattatttttctatatttttacgtttaattttattttatatatttttacagtattttataaaaacaatgttaaaataataaaaaaattacatgaaaataacatcaaaacagctaaaaaataacaaaaaaatcaataataaattaacaagagtacaatataaaatacatcaacatattgtattttcaataaataaaattaaaaaaattataaaaatatttaaaattacaaccgtatttttgtaatcttttattgtttttatgtatttgtaaaataatctctttactttttatagcaatttacgttatacttataataatctctttattttattttttgaattttttttaagaaaataatgtgtttctataattatttagaatttaaaaaaaaaattataattttaatttataactataatatacaattgacaaaaaatatctagaaatatgttttgagacattaaaattgagaaaaaaaaaattgcaataagatcttaattagaactcctgctacctacctatatacaagaaattaaatatcatctgtcttacaacatagacactctacactagtctgtactttctttttttgtaccattttgactttctgtactgggttgtttccagcaatgcagtgattaaatgcatccagttgagacatcatttcaaggttcagtaagtattcccataacccaaaaattggtgtaaattggtgtaaattggaaagtgattgaagatgatgataaatgattctttctattaatctaatccaaaccaatgacaacttctaaagttcccatgatgtttatattatatatttacccttttgatccaaacatctaattagtaaagtagacacattaatttttgctttaaaatctctgtaaatcaatatctctgtcttgtctctaaataacccattaaacaaaagttcagttctttaattgtgtcataacataaagcactaaacttttatttcattataagtaaagaaagagaaagaaaaaaaaacactagtaaaagggacttgaaagcagtagaacttgaagtagaaaaaacatggaaaaacaaaacagaaaaaccaatggaacagacaacaaagatttgggtaataggattttaattttcctttctacaagtcctcatcttgaagagaatccctaaacctctttgacctgaagagaagccacagctcctccattgacatccttagtgctctccttgacatctttgttgtcctttgcttctttcttgggttcttcttcaacctgaaaagcagagacaggaaaactcctagaaaggcctgaaggggtcttgaaagtgatcttctcagttggagggttatccacatagatatcactgagtgtaatccaaaccaaaagctctttggttttgaccccagttagctttttgatcctgtgtggctcagcaatggctgtaacttcattagcataagaaaccaatttcccaatcttgtcaaatttatgggtaacactctttttctgctttaaccaaacaaaaccagtctctctcacataaccacactcctcaatgtccttcaatggcaacaacccatttggaaggaatatctcatttagcaattcctttgatttttcttgacagatttcatctccacggtatacctcagctttggctctgatctcttctgttactagtgacatttttctttctttgaatataaaatctcaacaaaggattttgatggtggtggtggtgatggcctatagaggtgtgtaagtggggttcatatatagttgtgatgccaaatatttgcccttctatttcctcaaaaatttccaaacttgcctttcaaaactacccttgtttttcatcaaaatttcacaaatgccattgtaattcattgtgtctttttctttttttcagctcactgttcaactaactatctttctcacacctgtatttattgttattattattattattatttatgtttaaaataaataaaatttttgtccttactataatttatcaaaaagtgtataatcatcaaatagtctgtacaaaatgaaagaactaaaaatgccagttttttttt

SEQ ID NO: 21394 - DNA, 1798 bp, Cannabis sativa
ctctctcttctcttaatctctcttacacaccaaccctaggctggcaaacacctaaggttgtccaacaccctaggctgtccaacacttaagatcggcctactgagtcatactttgtaatcctaagtgtgctatagtagatcccacctatagtgatctggatagtatttccctcggtataaatacaaccaaaaggagagtaggtcattacccgctatcacaagggggtcgaaccactatgacaaatttttgtgcttattgcttgttcattccgtttgtgtaacatgtagtaagcgtcagatctatacgacccaactgtcagtcgattattttttgaggtcaacaccaattaccccataaatttttctaactatacataaatttttctctactaattctaagttgctaaactgtatctgggtgacactcctggccaaaacttcaattgtactgctatcaggcataaaacatgaaaatgccaaaatttataaatgacatgcatgacacacatgaaatttaattaagtctccatgactgagaaattatctctctaatgcctatttctgacaaagggttttattttctactactgcacatataatcgtaaataataaataaattactaataatgtactaattccatatctaattatgtggtcattacaatgggctaaaccccaaacacatcttcttattgagggaaggttcacactgtcgtctccattgaagcaatcatatgcattccttcatcttgggagatgtgtcgagaacactggtagctcttagatgctaggtgattcaggaggctatcactctcccgaaggacaaagttcaaactcagtttcaatgatccttttggaatcgtttttcactctcgaatgcccacgtgtctctcaaatattttttagatttagcctgttaatattgattttttatgtcttctgcggtagccctattgttacgtggtccactctacttaccacatattttagttaaaaaatatagacaacagtatgataaaactaaaagaaattaaatttaaatgggaaaaatgaaatataaaaaaaaagttatatgaaaaattgactatgctatgtgtccatgttcttacctggcagacacatcataagaatcatctaactttgtcatactaaattaagaaaaaaaaaaatcaagtttttctatatttcgtttttaagaaaatatgaatagtattttagtttaatttcttttccttaatcttttagtataatgtttaacttttttttttttgagaagagcatcttgttttattatacatatataatattacttaattatataaaatttatataaaaatttaaaaatatataataaattctcatatgataaatagtagatattcattttttaaaaaaatatttttgaagaatgaatattttgttgattagttatatatatgtagtagataatattatgttttagcttattgtggatactggatgcattacaatgtcattatatttattttaaattttgtgtcacctctaatctttaatcaatgataattcttaacccataaagaatatagggtctagcacagtagttagtagaaagtgatttatataggtacaaattgaaccttgatttctgggatgatggttttaattaattaattaattaatcgaaaaattattaatcataatttgacttttaatagatctccttcgacccattaattatctgacaatgtcccctccctggatgacaagaaaactaaacttaacattagtaataataatgacaatgaaaacaatttatt

SEQ ID NO: 21395 - DNA, 4637 bp, Cannabis sativa
  modified_base (3594)..(3595): a, c, t, g, unknown or other
cgtgataaaagctagaaaaatccctcctaaccaaaaagaaaacttttctccatggctgacaacagggaaaataataataatcaacctgaagagactacttatcatcctggaaaagagccggctgactaagggaggcctcccaattcatggacaatacgatctacacggttagcacgttcgaggagaactcaatgtgaaggtgactaaaacccagaaactaggaatgaggaaactaatactgaagctggtggttatgtacctagggaggaggatgcatatgaccccactagatacgtgccattgatggagttggaaaatcgtcaactcaagcgacatttggaggaggcaaattgacgaaatgttgagttggaacaggaggcaaccgcggctagggaggctcaggaagacaatgctcaaaaccaacccttaccttggagtgaggaggccacgaggcaagcctcgcggttcacgaaccaggagacaggagacagcacaatggcacccttagaacgcttaggaagaacaacccggggaaactgagatgcccctgaagatgagcaaccaaatgatcagacacatcatcaagaagtaccttggaggccccggggatttacaacctaggagaatggaaaccgtgatttgccagaatcttctcgcaggaatgcaaatagaaggcaaccccagactagggaacaagaaatccctcatggtaacgagagagatcctgggattgaacctaggacaggtaggttgcccccgagacatcgtcaacgtccttctcgcactaataagaaaggggctcatacaaatcctagctgggggcatgtatcaacccgttcccaaaggagaaggctagtacgtgatgaggtcagttctagctctgaacgtacaagaactcatagtcgatctacgcgaggaagggatagaactcgccgtagtactgatcgagagagtacggtacgggcacaactagaattgatagttactcaaggacgaggtctgtaagtaactatgatcaacaacaatcggatcttcgtaatcaactaaattagaagaaacctgacctacgccaatagctcaatcaaaagtaagagcatcctatccaattgcgaatcaacaagttagagaacaagtttaggaggtaccgagatggggaatttgggaaactgcctggttacaactcgaacgaggaaccagagcctttccatccagacattatgaatgtcgaattccctagggatttaaaaaccctcatgtctcatcatacgataggactacagatccagtcacacacttaaataatttcaatactatcatgcgagccaggaatgtgacgaataattttcgctgtattttattccctatctcactagttggggcagcgagcagttggttcaacaaatttaccaatcattcaatcacctcttgggaacagctgtctaaagattttaagaagcagttccaggtagcaagagacaggcgacccgaagcgtcttcccttactaacataaagcagcagccgagcgagacacttaaggcctacttgagtcgtttcagtacagctgctgcgagggttagaaatttgaacgacagtatccagctcactgcccttcaagcatggatcacgactgatctctcaactgctggaggcgagctgtgggatgacttgtagggtcgcctagtgaaaaacatcagtgagttcactgagagggctcaggtgtgtattcaaaaagaggaagcaaggaaagagatgaagttgttaaagactggcttgggaagtaaacccagtactatctctacaagtaccgtctcgacaaaggctgacaatccaggaggctctaagaggaaagataactctaaggaatcaaccaaggacaagaaaaaatagaagaaacacgacaagtacgtgccaatctacacaatttataccgagcttaatgaaactcgggaaaatatttatcttgcacatgagcacagggtcgcattccgtaaacctgagcccatgaggcatgcgagacacaaaaaggatgcaacaaaattttgtaagtatcacaaggacattgggcatacaacagaagaatgtcgtcaactgaaagacgagatagaaagtcttatctcgtgaggttacttctggcagtatgtgaactgacaaggtgatggacataaccagccaaatctgcccaataacctaggcaaccagggattacaacctcctcctcttgaaggagaggacattctggttatctcgggagggccacatctcgctggagaaagtaacaaaatgcccaaaagagatatgtaaaggaagttaagaacgagcagtctgtttttgctcccgaatcttctaagaaagctaagactgaagaacttccaattgtgttcttggaggaggatgcaaagcatttgagatatcctcacgtcgacccactagtgatcacaatccagatcaccaacaaaaggaaaaaaaaggtgttggtggataacggaagttcagtaaatatcctttacaaggatacactgaagaaaatggggctggagaaagcaaaattaaaatcttgcatggtaaatctatgcagatttacaggcgacagcgtccccagtcaaggaatcattgagctcccattaactgtgggcgagacaaatttatccaccactataatgcaagactttttagttgtcgacctgccatcagcctacaacatactgctgggttgaccatcattaattggactaggggcaattagttcaattaagcaccgctccctgaagtttcagaaaccgataggtatgggagtggtgcgaggtgaccaacttgtggctcgtgaatgcgaacacatagagttgcacaatagaaaggctggtcaccaactaatggcagtcatgactgaagaaggcaagaagcaagatgaggatcttgattctcgaattgaagattaacggaatctattgaaaccaatcgaggaattggaagaagttattgtagatcctataatttccaccagaggcctttaaaagcataaagaggcatttgtcaacacgtccagtattggcgaaaccaataactggagaaacattactcctctacttggctgtctcagacaatacgattagtgtagcaattgtgtgagaagagggaaagcaccggaaacctgtttactatgttagtaagaggttactgggggcagaatcgaggtatcccgctcttgaaaaacttgccttatgcctagtccatgcatcttgcaagttaaggccttacttccaagcacatctgattaaggttttaactgatcagcccctgagacaagttttatcaaaaccagatgcttctagaagattgataaaatggtcaattgagctggagcagttcggcataacctatcacccaagaacatttatcaaaggccaagccttggcagatttcctaataggagggataactccagatgagaacccacttgttcagcgagacgcagacacctggaagttgtacgtggatggagcgtccaatgagcatggctcgggtgcagggttgatactaatttcgccagaaggcttcaagtttcactatgccttaagatttcaatttgacacttnnaacaacgaggctgagtatgaagccttgatcactggtttaaagatagttgaagtgttgaaggttaaaaatcttatatgccatagtgattcacaattaattgtaaatcaagtcctaggggaataccaagctaagagcttaaaaatggcaaagtacctagagaaggttcggaagaatttggaaaagtttgattatttcaaaatcgaacccaagagaacaaaactttaatgctgatgccttagcaaaattggcctcccagaatgaactggatgaattaaacttggtatcgattgaggtgttaaacgagccaagtatatgtgagaaagaagaagttgagatgatagatagctcgcctacctggatgacacccataatcaactattttctcaatgggaaacttccaactgacaaaaacgaggcacgaaaactctttacacagtgcctcgctataccatagtaaaaggcaaattgtatagaaggggctatttaatgcctctcctacggtgtgttcttcccgcagaagcaaacaagatcatcacataaatccacgagggcttttgtggagatcatgcaggatggaaaagcttgtcaaagaagattattcgacaaggatattactggccaactataaataaggacacccatgaatttgtcaagaaatatggtaagtgtcagaggtgacatatacctcccataccaccaacggaattgaggatgatgacctcgccttacccatttgtaatatgggggattgatttgattggggcactccccatagggcaaggaggagcaaaatacgcagtagtggctgtcgacttctttacaaagtggatagaggctgaacctctagttttcaaaacctgcaagagagttctcgactttttcgtcaagaacataatttgtaggtttggtacacccattaagatagtatctaataacagaatttagttcgatggtgaattattcactgtgttctgcgagaggaataagattattaagagcttctcatcagtatccaggcctcaggcgaatggacaagtagaag

SEQ ID NO: 21396 - DNA, 12465 bp, Cannabis sativa
atattgaacgaaaaaaaaggagtaaattactaaaaagattaatacataagatacatacactaaaagataagaagaaattcgcccgccccctacatattttataccttcccctacaaaaaaactcgaaatacccaccccattcgtaattccatcaattattcgtctatcaaaaaaatgaattagttcagccaatcttcttataccttgaattaagaatgttgcataaacaaaatcgatataaccacgattatatgcccaatcatatatcacatttagtattttatttccaaaaatttgaagtttattaggaatacgtttaccaaatgaattcaaaaaattcaaattttgtaaagatgaataaacaggcttatataaaaaggatgctataagaattcccaacgaagctatactgactgaaaaggttgcatttgttagaaattcataccaattccaatccatcaaattttcttccttttgatgtaaaagatttatagacggagttaacaattttgataatatatccaattgcattccttcttgattgagttgagtgaacaaaggaattcctataactccaatgaacaaagtaaatatacccaatacaagcataggaaatagcatagtattgtctgactcatgaggatacgaaaaagtgtttttagtaccaaaatttggaatagtaataaaaggcgccaccatacttctttcattcctattaatacaatatttctttttataaaaaaaagaagtcttttcattatttttcattgttaataaaggtactaagcgaaaatttgttttaatcttcttttgcccttcgctaccccataaagatattgaatagaccaaactattttttttgccactgtaagtttgaaactgaacatttaaatggccctcaaaagttagtaaataaatccgaaacatataaaatgcggttaatcccgctgtggaacaagctattattgcaaaaatgggtgaatacaaccaactatcagtaagaatttcatcttttgaccaaaaacagccaagaggtggaataccacaaagagaaagggtacctaataaaaaagatgtttttgtaattggtacgtgttttcttaaaccccccataagaaccagattctggcttttatttggggaatatccaacaatagtttccattgaatgaataatggatccagatcctaaaaacaacagcgctttagaataagcgtgagtaatcaaatgaaacaaagcagttcgataagaccccatacctagagccagcatcatataacccaattgagacattgtagaatacgctaaacctctcttaatatctttttgagcaagagctaaagtagcgccgaaaaataatgttattatacctatcaaagctattatattcattatgtaaggtataactatgaaaagcggaagtagccgagctacaagaaaaattccggctgcgaccatagtagctgcatgtataagagctgagataggggtgggtccttccatagcatcaggtaaccatacatgaagaggaaattgggcagatttagcaattgcaccagaaaataatagaaaggcacacaaagtaacaaataaaaaatttacttgattattagaaaccaagtcattgaatatttgaaacaaatcccgaaattctaaacttcccgttatccaataaaaacctaaaattcctaataataaaccaaaatcccccacgcgattagttataaacgctttttgacaagcattcgccgcagtaggtcgtgtgaaccaaaaacctattaataaatacgaacacattccaaccaattcccaaaaaaaataaatttgtatcatattcgaactagtaactaatcccaccattgaagtattgaaaaaactcatataagcaaaaaatctcaaatatccctgatcatgagacatataattgtcactataaataagaaccataattccaacagtcgtaattaagattaacataatagaagtaagcgggtcaaccaaatatccaacttctaacgaaaagtcattatttatagtccaagaccatatagatagataaatagaagggttatttatttgttgaatagatagatagattgaaaaaaccataactatacttaacaataaaacactaggaaaaacccacatacggcgcaaattttttgttgccgttggaaatagtaggagtcctactccgattaatatcggaactggaagtggaataaaaggtataatccatgaatactgatatgtagattccataaaaataaataaattttttttatcttaattaaattaattttttctgatttaccggttattatttcttttgaaatgaaaggaatcagttaataaaaaataaaaatatacaatatatagaattttctagtctaaatatagaattttctagtctaaatgattctgaatctttttcaactctttgaaatattatattttcaactctttgaaatattatattgaaaaagtaagaggttaaaataggtcaaatgatatgattcctttttttaattgaaaaaaaaaaaagaattgaaaaaaaaaaaagtacttaaaattatattaattatattaaaatatattaaaattcacgaattaaatatttcattctaatttttgaatggcagttccaaaaaaacgtacttctatatcaaaaaagcggattcgtaaaaatatttggaaaaagaaaggatattgggcagcattaaaagctttttctttaggtaaatctctttctacaagaaattcaaaaagtttcttttatacgccaaataaataatacaaaattggcataatctttgttgttctgactcgaaaaaaaaaaataagcataatttttaatttacaactcgaaaacttcgaaagacattagaaaaaaattctaagaattataataatacttcactttatttatatatttattcctttccttttaaaatagaataaaaaaaaaaacgacaaattctattagatagaaatctataaaaaaaaatataaaaactaaaaaaaaaatatatgttcaaagatttctaaaaggacaaatttatattctatttatattctttaatgttttatgttttgttttgaactgatcaacaacaatataatattaaattcaatttgtttccttttttaaaaaaaaaaaaaactaagaattcctttgtctactcttttgaatatgctttctcatttttaggatggggaaaataagaatccccatcaattcgataataaaaataaaaatgatttctcttttatttatattatttttctattattttatactatttaaattttaaatatttcttagactaacatagaaattagagtatagaagagcatatatatataatttgtagtcaaaactaataggtcgttgaaactcattaataaagaacgtttttgatgctatctatgaattaaagtcataactatcaagtaaattataacaattagattctattcaagtataaaataagaaatttttaaaaacaccattgttaaattaaataaaaggaccctcaaagaaaaaatataccaagtggacgattgaataaaaataggttgttaggttattatgatttcgaacaagccgctatggtgaaatcggtagacacgctgctcttaggaagcagtgctagagcatctcggttcgagtccgagtagcggcatggcattttctaaaaagtacaaaaggaaatcctatactgaattcaattcccgatttctattattatcctataattgagaaacttttttatgatattttcaactttcgagcatatattacttcatatatccttttcggtcgtttcaattgtaattacaattcaattgataaccttgttagtcgatgaaatcataggactatatgattcctccgaaaaagggatgatagctactttttgctgtataacaggattattagttactcgttggatttattggggacatttaccattaagtaatttatatgaatcattaatctttctttcatggagtttctccattatttatatggttccgctttttaaaaaatataaaaactatttcaatttaaacgtaataaccgcgccgagtgttaattttacccaaggttttgctacttcgggtcttttaaatgaaatgaatcaatccgaaatattagtacccgctcttcaatcccattggttaatgatgcacgtaagtatgatggtattgagctatgcagctcttttatgcggatcattattatcactagctcttctagtcattacatttcgaaaattcataagaattcttagtcaaagtaataatttagtaaatgagtctttttcttggagcgagattgaatacgtgagagaaaaaaaaaatattttacaaaagacttcttttctttcttctaggaattattacaggtttcaattggttcaacaattggatctttggagttatcgtattattagtctagggtttatctttttaaccataggtattctttcaggcgcagtatgggctaatgaagcatggggatcctattggaattgggatccaaaggagacttgggcatttattacttggaccgtatttgcaatttatttacatactagaacaaataaaaattttgaaagtgtaaattccgcaattgtagcctcaataggttttcttataatttgggtatgttattttggggttaatttattaggaatagggttgcatagttatggtttatttcctaactgaagaaaggacttgacaaatacaaaataaacataggacggaataagtgtatatacgaaaacttggtgtaatccagtgcgaacccgaaccctttaatggaaatgaagtaattcaaagagttcgcgctggattacatacctgattagaatagaatttctatttattttattcaaacttaagcgaagaataaagaacttattttaaagtgtacaaaaccaacaaacttttttaaattttcaaaaaaaactatggataaaaataattagataaaagagcttcgactttatcgacggatagtgaaaaaacgaaatccggataaataccaatagctattataggtaataaaatacagatcgaaacaaataattctcgcggtccagaatcaacaaaataagagtttggtgcattaaaaagcctatatccatagaacatctgtcgtaacatagataatgaataaataggagttaatatgattccaattgccattacaaaagtaatgaatatttttgtcattaaaagaaatttttggctagtaagtattcctaaaaatactataaattctgcaataaaaccgctcatgcccggtaatgcaagagaagccattgataagatactgaaagttgtaaatatttttggaattgtgatagccattccgcccatttcatcgagataaacaagacgtattctatcataactcgttcctgccaagaaaaaaagcgcggcgccaataaagccgtgagatattatttgtaaaatggctccgttgagtcctgcatcgcttatagaactaagtccgataattatgaaacccatatgagatacagaggaataagctattcttttttttaaattacgctgccctggggatgttaaagctgcatagattatttgaattgtgccgactatgattaaccaaggagaaaatatagaatgggcgtggggtaataattccatattgaatcgaaccaatccatacgcccccatctttaataagattccagctagaagcatacaagtactgtaatgtgcctctccatgagtgtccggtaaccatgtatgtaagggtataatcggcaatttgacagcaaaagcaataaaaaatccaatatagaatagcatttcgagtgctacaggatacgattgattagctgatgtttcaaaatttaatgttggttcattagaaccatataaacaaacacctagaattcccattaataaaaaagcggaacttcctgcagtatacaaaataaattttgtagctgaatacaaacgtttctttcctccccacatagatagaagtagataaactggaattaattctaattcccacatgatgaaaaaaagtaaaagatcttgagaagaaaaaggtcctatttgaccgctatacattgctaacatcagaaaatggaataatcggcactctcgagtaactggccgagccgctaaggtagctaaagtcgtgataaaccccgtcaacaaaatgggtcctatagaaattccatctattcccaacctccaagaaaaattaaaaaaatcgatccatttataatcctctgtgagttggattaatggatcgtccaattggaaaaaataaccgaatgcataggttattagaaggagttctaatatacatatacaaagagtataccacctaattaccttattgcctctatggggaagaaagaaaattagggaacccgcaaatattggaaaaactacaattatcgttaaccaaggaaaataattcatggtaaaaacaagatacacttggaccagaaaaatagactagaaaaacccgttctcaaaaaaaatatattattttgagcgcgggtttttgtcgataaaagtaaaaaaaaaaaaaagaattgtattcaagccagtagggcttttttgaacgtattaataagctagacccatgcttcgagttgtttcatgccacaaataaactcgaacactcaagaaatccgtcgggcaggcggattcacatctcttacaacccacacagtcctctgttcttggagcagaagcaatttgcttagctttacacccgtcccaaggtatcatttctaatacatctgtggggcaggctcggacacattgagtacaccctatacacgtatcataaatctttactgaatgtgacattggatttataattgtttttaatcagaaattttcgatctagtaaatttctttttttgaaatgaatcatatatttagataccagatgaatcaatgatttacatttaccagaattattctaatcaatctacttccagaccgagtcatgtgatagagctaagatcctttgatttcttatattttcgcaaacatgatcatacattatgtataatacacactaattagaatttaggaatattctaatttctatggttaatactacggatcagtgatactacttattcaacaaattcgattggttgatacgagttgattttctgttacgataaattgacgaaacaatagctggtccaatagctgcttcagccgctgcaatggctataacaaaaatggagaaaatatttccttttaattggcgactatcaaaaaaatccgaaaatgttacgaaattcatattaaccgcattcagtataagttcaagacacataagagctctaaccatatttcggctggtgatcaatccatagataccgatagaaaataagtaggcactcaaaacaagtacatgttcgagcatcattgaccaactccttatcaattttaattcatttcaatagactatgaccaagaatgcaagggattcgattgactagaatagaaaaagtacggaacaaagaaatatattggtaatagatcaaataaaaatttctattttagacatattgaaggaaaaaactgaatgggataacaaataaatgtgataacagagaattccgttttattttgattgctgttgctaattttagagattttttactggcgcgccacggcaattgcccctatcaaagcaactaaaagaattatcgaaatgaattcaaacggaagaaaaaaatctgttgataaatgaattccaatttgttgactattacttagcaaatcgtgctctataatctggtttgatcttgtagtccaaataatcccgtaccatgacgtatctgtaatagtagtcattagtaaaccaaaaatacttgtacaaaccagcaaagtaaccccatccccaagggtcaaaagatgaaaatctttgtaatattctgaaccattcatgaacatcacagcaaatagaattaaaacatttatagcccccacgtaaataaggagttgtgcagcagctacaaaatacgaatttaatagaatataaaataatgatatacaaacaagaacaaatcccaacgaaaaggcagaataaattgggttggtaaataatactactcctatacttcctaagataagacctaagcccagaaagactaaaagaaaatcatgtattggtccaggcaaatccattctatgtaaaataagagaaaaaatcgaaatgtttttcatgaccctattgagaccagaccagaaaaaatggttgataattcataaaaaatttctataggacttcaaaatttttctttaatcattaatcaagggatttactttttttaatttggggcgaattaaaaattgttcgaattgtataatcgtcaagtactgatattggtaaacgacccagggcaatttgattataattcaattcgtgacgatcataagtggaaagttcgtattcttcagtcattgataaacaatttgttggacaatactcaacacagttaccacaaaatatacagattccgaaatcaatgctgtaattaagtaatcgtttcttacgaatatcggtttcaaatttccaatcaatgacggggagatctataggacatacacgaacacagacttcacaagcaatacatttatcaaattcaaaatggattcgaccgcggaaacgttccacggcaattgccttttcataaggatattgaatagttataggtaaacgatttacgtgcgataaggtaatcatgaaactttgaccaatgtaccttgcagctcgtactgtttgttggccataattcatgaacccggtgaccatagggaacatatcgtgaatatatatgaataattttctgtttgtttatttctcttgtttcatccaagttgggaatataggatataatatccgtttacagtgaaaagagttgagaagacgttgttaataatagattaccgagagaaataggtaaaagaaatttccacccaagattcaatagttggtccattcttagtctcggtaaagtccatcttgttgtgataggaatgaacaagaacaaataagttttagctaatgtaataaagatacctattgttggttcaaaaacaccatatgttttatttatttcaaaaaactcagaaacaaatatgtatggaatagagatattccaaccgcccaagtaaagaactgttacaaataatgaagaaactaataagttgagataggaagcaacgtaaaataaaccaaatttgatccccgagtattcggtttgataacctgctactaattcttcttctgcttctggtaaatcaaaaggtaatctttcacattctgctagcgaagaaattataaaaatgataaaccctataggttgacgccacaaattccatccccaaaaaccatattttgattgggcctcaactatatcaactgtacttgaactattagataattatagtcgatgataccatcactgttcccatcgctattccagaaccgtacatgagattttcacctcatacggctccttgaggaccataaataaatctaaggaccggatccctattattttagagtattttttattttagagtatttgttttttatcttgatatctttttaagatggataaggtcaaaatttctcttacgatcccaaattagaccaattgaattctgtctgttttgctttaataattatttctattaatttcaaaaaataataaaaaaaatttagtacttctgaattgatctcatcccttctttaaaaatttcaacaatcatttgaatttgtctttgttgagtaataatttaattcttcaatcaaatactcattgtaaaaatctcaataacccggctttttcacttacgaaaattctatattaattcataacgtatgatatgaattctatctatatgaatatgaattctccatatatgaatatggatagagaaaggaaagaataaaagtagaatagaaagaaagactaaaaaaaaatcctttttctactgtaattatattcctttctcttttttttttcgtttctattcttctttcttctgagaaaagaaaaaggggacttacaaaataaagataaaggattatttcgtttccaacagtcatctatttaatcgatggataggagcatactctggatcggaatcgtggggagtactgcttgatcatttctaccaacttaaagccccaattcatattctttgtatattatgcagaaatattcttttacataatctccattacaaatcctttgtgtatcttggtgtttctaatcatccactcgtttttgttcaatcatttgtttgtgttaaggtaatacatgtatgataatacatataaacgagagtgaaaacgcaatatggttgatcttttgagcccgcttcaagttaggataactaatcgcctaatcttggggtaaacgctttcttctgcttttgtttatttccgctgaactttctaactcttatacatagaaaatgagactcaatttttttactgcgttatatatataagcagttttctttcactcatataactatctgatttagttcatctattcgaataatgaataaaaaaatgaagatattttctccattcagtccacccctttcctagaaagaaagaaataacgaggaagaaatagagaacaatttatgtcttaacgaatcgcacgtagagatattgataacacacataaagttaatggtatttcataactaatcgattgagcagcagctcgtagaccacctaaaaaagaatatttattatttgacccgtatcctgacataagaaggcctatgggagcaatacttgaaatggcaatccataaaaaaacaccgatattcagatccgctaaaacaaggtgagatccaaaaggaactactgaatagcttaataaaatggatatgactgctatggatgggccaatactgaataaacgagtatctcctctagatggaaatagattttctttgaaaaggagttttgccccatctgctaaagcttgaagaaccccccaaggtccggcatattcaggtccaatacgttgttgtatccctgccgatatttctctttctaaccatacaattaccagtacacctatagtgattcccaatacaagagtaaaagtaggaataagtatccatataattccagaggtctcttttaaaaattccaatctagaaaaagaattgatatcttgtatttctgttgtatcaattatcatttcaacgatcaacctctcccataatgatatctatgctacctagtattgtcataatatcagccaatttcattcttttaactaactgaggaagaatttgcaaattgataaaacccggcgggcggattttccatctccaaggaaaaccactctgatcccctatcagaaaaattcccaattctccctttggggcttcgactctcacatagagttcttgttttggcaattcaaatgtaggagaaggttttttactaataaatcgatagtcaaaatcattccattctggcttcctttctctatcaacgtctcggatttctaaattctcatatggcccccctggaattccttctaaagcctgctgaataatttttatggattctgtcatttcaccaattcggactagataccgagctaacgaatcgccttctttttgccactgtacttcccaatcaaattcatcgtaacattcataatgatcaactttacgaagatcccattgtattccagaagctcgcagcattgggcctgataaaccccaatttattacgtcctctctcccaataatgcctactccttcaactcgttctaaaaaaataggatttcgtgtaataagtttttgatattcagtaactcctgttaaaaaataatcgcaaaaatctaaacatttatctatccagccatgaggtaaatcagccgctactcctccgatacgaaaataattatgcatcattctcataccggtggcagcttcaaatagatcatatactaattctctttctctgaaaatatagaaaaaaggagtctgtgctccaatatctgccataaaaggaccgagccataacaggtgagaagctatacgactcaactccaacataattgctctgatatagctagctcttttaggtacttggatatttcccaacaactccggtccatttacggttattgcttcggtgaacatagtagctaaataatcccaacgcgttacataagggagatattgtataattgttcggttttccgcaattttttccattcctcggtgtaaatagcctagtattggttcacagtcaataacatcttcaccgtcgagagtaacgatgagtcgaagaacgccgtgcattgatgggtgttggggacccatatttactatcatgaggtcttttcttgtagctggtatattcataggtttttcctc

SEQ ID NO: 21397 - DNA, 2511 bp, Cannabis sativa
catgtaatcataaatcacttcaaaattctaaattgataactaactagattgtaatgggttttatttagggcacaaaaatccaacaacgagtccttagagtgtgctcaaaaatatagggtaagcctacagtgcaccccttaaaagggtattttggtagatctcctatttgttttagcatacaaattaaaaaatattttagttttattttttttatgattgtgtacgttatagttattttggactacctataaatttttagaaatttttgaatagtttaaaatgctagagaaaagatttatatattttattgcacatatgactgttcttcttatatgtgtagtaagtaactatttaaacatcattatcagcactataaattattcgaaattttctaaaaatttataagtagtcttaaatagctacaatgtatgcaatcatgaaaaaaaaattgtcctaaaaagcaatcatgaaaaaaaaaaaatggcctaaaaagctatgttgaataggaggtctaccaaaatgactatttagagggtgtactacaaaaacttctaaatatataaatatatataagcaacattttctcaagaaacataacatattaggattattgttaaggcgcgcactgctacaaaattgtgcttcactgacccattttcagagactctaaaaatatttagtgaccctccaatataggtcattaaaacattttagtctccctcacagagcgtcactatagacttcaaaaatctcactttttcatactctaaaaattatagacacactaatagcgcaccattgtattttttttatatatatatatatatatataaaaaaatcaaaattatttatgttggagtgtagagattttgacgaacaaggtccaatctatggaaattgcatgagaccgaagaaaatacttaattaatttaagataataaaactctaacctagtttcgaaaatggtgaggtttttagtaacaaaataaaataaagtattttgacggtaaaaatgacagtaacaaatattttcagtgatatttggagaaattattttctaacaaaaaaatagattttacttcctttccaaacaataacttcatgtgaagcaatttaatataaatacataaaatcaaagattgttatttttaataaaatgtagaaccaagcattaatactttctaactaaaaagatgacagaaattattttaagaagcaaaaatcataagcatatattgtactgagaatcaaaataaaaagaaagactaacataaaaacactaggtttcatcgtccaccttaataataagggaacttagaaatctgtaagaaaattaactaagaaaagcgttaaactaacccataaaaagggagaaaaaattgcattataaagggtttcagctcaaaaataattaatgagagttttttcttccatatttactcggtttggttacaaggtgttagaattttcaatcttaatttcagcccataacaatttttgtttgaccaaatgatttttaaaattttattcccagcgaatcatataccaagtatcaaaaaaattaaaaataataaaaaattaggaggaagtgcgtatcatataagtgcgtaaataaaaattgaatttaaaataaaacaaaaataaataatatgtatatatttgacagaaatataaatactaatattaatatatattaaaaataaagatataataataaatatagaaataaatagttgtatataaaacaaaaatataaatattaatattgatgtaaagtgtaaaatttaaaggcagaattaaaatacagaaataaataattgtatatataacagaagtataaatactaatattaatctatagtacaaaatttaaagatgaaatataaattataggtgcaataatttaagactgcgtatttaaatatttaataaaaatataaatattaatattaattataattaataacatataaattttattatatataattataataataatatacttttcagtaatatatataataatatatataataataaaatataaattatatatataaactatttataataaaaataaacttataataataaataaaacttactttactgctaaaaaaatgtaatataatatgtataatataataaatagtagaaaaattatactaactttgattaaagtagtcttttcttcttacggtaccctggtaatggtgccaaaaacttgttggtaccaaaatagtatattttacattcattaacttgcaagcgcaaaattttttattatacttatttaatataagttattaaactctaatctagttccaaaaatagtgaggtttttggtaataaaataaagtggttagaaataacagtaacatatattttcagtgatatttgagggaattatgaagggttcagaatctacttaaatgtatacaaaatatttatatttatattgattctcataatttaattagtaatcaaagctgttaattccatttttggc

SEQ ID NO: 21398 - DNA, 4069 bp, Cannabis sativa
tatattttttttaaaaaaaaatacgaaagaagtcagattattcttatttgatctatatataaaaaatctgtttttataatttgaagctttgtggtgatcaacaccactaatgtaataatcagtgctatatagttggtaagcagtttattatagtatttattaaatcataatgggttgaatgggatatcaaaatgtttgtctatctcttcctcttctcttctcctgtgataataatacggtgtcacttaatattattcttatctattttaattaaaaaagtaaaaatattttccaaaactaaattttataaaattatttttactttttaattttttaattagaaataaaaattttaaaaacaaaaaaaaaaaattacttttgaatttttttaaataacatattttttcttaattaatattttagacctaaccccaacataaaccttgggacttggattcctacttaaataaaattataaaataaaaataaaaattataaaaacacttttgtttatgttttttaagttaaaaaatagaaatgtttaaagaacacatttttattttttataaaacaaaattttaaacatacaaatttacttttatttttgtgattaaaaacttaaataaataaaagtattaacaaacaccccttaaatttatctcttgattattaaccattattaatgtgtcatttcttcttcttctcttgtccttgtctagtttgattattaattaaggattgtaaaattttattttcttctttaccaaatattcaattatattttgttacatgatcagcaaattcattattttcctgggcactctcggtacctctccggtacttatttgattgtagcatttttaagtataatactctatgaaatttttagactcttatattaagaatgataaatttcaataaaattgatttttcattttaaacaaaattctctgaattagaatacaattaattaattccaaaattactttaatataccaacacagcaattatacttttgaaaagatttaccatttatataattaatagagcaataatatcacttgcaaacaaaataaataataaaacactaataaatagtaatacgaagccactaattcatcatctataaataataggggtattatttgttaaaaaaatagggataatataaaataatttaaatttaaatttacttttgggacatttaatgtcgttatttctttttttatatatatatataaaaaaaatagactatatatacataatttaaattaataattcgaaaaaaaaaagttatgcgaagtacatattttttttaaatacatgttttaaatttggaaatattttcaatatttgtaagatattactaaatatatatattctaaaaaattatattgttataatatattatatatatagtaaaaatctaataatcaatgtctaaccatttaaaaaaaaaatgtccaacttcccataactattccggaaaaataaaataaaatgtaataatattaaggtggactcgtgatcagaaaacagtatgggatattattattgcaatgcaattattaaagacacgtcatttcaagctttaaacttttttggctctattaatatgttctctgctgaccagaaacaccaatggcattttataattatctaataatcctattagtttcttataatagcgcaaaattagaaagaaagagagaaatcagttttcgaaaaacaatttatatatgtaacacattccgtatcccacactttaaacaaaattgttgtaaccattaatatgtattacctctgggaaaaagttcttacagtattaagagataatattgtattaaaattaaaaataataaataaagaaatgaacatttaattaaattacctatcgaagacggcgaactcagagactagagctttatagacgggaaccatatccgggtcgaagccattcatgacggcctgagccgtagcggtggtgttgtccatggcgaaagcttgttgggcgaatccattcattggaggcggctcggtggagctctcgttatcggagccgaatatctgctggcgtatggcttggaatgagtggcccggatccgggtccacgtagtgggattgattctggaagaagacccgtttggagttcgggtcagacggggttactagattggactcggaaccatctacaccgttgatttcggggttgagccgtttcatccatcccagcatgtggtcgaaagaccgattctccatgactagaacgacgactgttttgatggggttgcatgtcgtttggatcggggattgtgagagagtgatgataagtattaggaagaagatggaggtagcagccattggagagagagagagagagtgagagagaatttagctaggttggatgcttggaatttataatatgggaaaaaaaacaaataaaaactgttgatatccattctccaaattgaagcccgtgagctgttatttctaattttatttttttacaagtgactgtgcatgaaggtaattttggacttatttatttctatatatttatacagaaataaattgatgttagcaattttctgccacataactgaatattcgaataggttagacgcattgtacctagacagctttttgggattgtacctactgcgtagggaaaacctcatcaaatggaaaagcttgactaacataatagagtagtagcagttttagaaaacaatgcttaattggttaaaatgtgagtcacctctttagcttctctataaacaacaaacaaataagatacaattggttgttccattaaacttcaaatctggtgtagcaccccgttcatatcgcgacaactatcctctttctcttgaagaagttcgattgctcttaattaaatagtccgattccaccaaattggctaaaataaattgatgttatcgtgtcattctctctctgacagatgccaccatgattaacactagtttcgacattccatatatattccaagcaacaattagaaaaaaaatcaaatgtgttggagtcccaaacccttgccattgtgctcaaaaaggtggtaagtctggaatcatgttgtcacagacctgtgtccgtagtccacactccttccgcaccataacactatctcggcagccccacaatgcatgaactatatcatctcttttccctttagaacaatgagtacaacgaggttccacttggatgccacatttggataaagcataattagtaagaagccatgaaggacaaattttccaaacaaaatgggcgaaattttctacctccataataatttccaccaagcgtcagttttggacgagtcagattgaaaaagttcctcttatttttcgcatttttataagcatatgacacgtggattctaatcaaggaaagccaaaaagtcattagttgccctaatccctcaattggtgctctagggagataaagccatcaacctcacgtgaagagtctccgtgacggggagttccccgactgctggccacacgaaaggtatccgtgaaccaaaatccccttccattccaggagcaaaggttgtcaacgcccgcctggatcgagcatggattgccgagaggggccaagacattctgaaacacagtgaaccagttatgcttttaacccgcggaagcttcacccatacatgtcagactacggacctagggaccaggctttttcaagtacgacgtcagaggttgtctcccacgacacaccatcgtatagagcatgtgtgtccttgtgtactagaccaaatgatccaacgactatggataagggaaattcaaaagggagaagccctgaggcgacacgcgttcgaggcccagctcgtacgacctgacacaaatggcatatgggaaatacgccacctaccaatccgacagtgggattttgcccctactatgatccatctaaagcatcccatgcaaagaagctggcctataaataccccagataaagaacaaggaaaaggggaccttctctttcgaaaaaggagaatttaaaaatatcgaataaaatgattatacaaaataca

SEQ ID NO: 21399 - DNA, 2420 bp, Cannabis sativa
  modified_base (102)..(122): a, c, t, g, unknown or other
tagagatctaaacggaaggagacattttatttcgctgcacccaacataaggtttctcatactttatatgtgtttaattttataattgttttagaagttcatnnnnnnnnnnnnnnnnnnnnnacttgtgagtagatctaagatcgttgtggtagcccctgtttcctcaatatcaatcaaccctttctctgtttttccatcaacatcactcttttctgtttccattacattgcccaagttcccaactggtttttcctcatttgatagaaagccaatgatactaagacaatggtcagaggatatggacacaacccgaatggtcaaatcggtccttgtgtgggtaaggttgaacggtttagggctccaatactgggggaagaagaatttgagtgctcttgttagcactattagaaagcctatcattgctgataaaataactcttgagagatccatgatcaagtatgctagagtgtttgtggatgttgagattaaggatgaacctccgagaacaattgcctttgttaatgataagaagcaactgattgaacaaccggtttaatatgagtggctgccaaccaaatgtgcggcttgtgacttgcttggtcattcggtttcaaattgcaacaaagggaaacctgtagcctggaggaaaaaacagcaaggggacaagcctaaagctgttgaaaaagctactgaaaattcactctcattctagattcaacgtttaatgcatattttaaaaatatcaatataattaattctttatggactatttaattatagtttttttaatgataaataagatattataaaaatgttaatttaatataaaataaataaggcattagatgatttcgttagaaaatttgatatggggttactgatggctttactcttataattaatgtgactattctcttatatacacagtttaaagtataattattgtttaggaaagaatttagatggtggaaaattaaaaagaataatattttatgctagtgttctttatgtgttgaataagagttgcatcgtgatcctattccggtgtaagatgtttaatttattttaactttatttgagattacaattattgtgtgtcttgataggaagacgagatggaattcatatagcttatatatataaatgtatagattcttttaggtagatgtgaaggaattcttatttggcacctattaaatatatgttgattcacatgttatgtgtactatgtagtcttcttgttagtcatttttttttattttttattttacgattcaaaatagtgttatatggtggttttaatttattttcactttattttagattacaattattgtgtgtcttgataggaagatgagatggaatccatatagcttatatatatagattcctttaggtagatgtgaaggatttcttatttggcacttattaaatatttgttgattcacatattatgtgtcctgtgtagtcttcttttttttttttaagattcaaaatagtgttatatggtggttttggatctgtatgattatagaaagtaagtttggtatactctttcatttgcctttttctagatttaactgattgtctgtaaattgatggtatatttttactagtaatatttggtcttaattttttgctaggaaaaatattttattttatttgatcaagggtgttcattgtttattaacaatctgataaaatgctataaacttgtaatttgttatttatagttgcccactgaaggaaggactcgtgggccacaacccttgggaacaacaaccggatcttgtcttcagtattacgctagagaaataggactaggagttggcaagcccgcgattggtgagcctcatgtggacttaggagaggatctcgagttggccagactcagagaagccctaagccaagtaagcctagtttaagaaccacatgctgctgattgtgatggattcgctcagcagagagacggcgattcctgatggatgaccaagagtacatcatttgatctcacaagcaaaattggaccgctgcaactgagaggccaacaatatgatcaagcgatttaatgacagaaccgatgggagaggacaggatctcatcaaagatccactttaaggaagactcgttgatagatcaaggagggtctatcgataagctgaccaacctagttcctcaagaactgggacacatcttccctttccagagggaggacagacctttcctcaaaggcctaatgacgagaatagccaaatcctagcgaccaacgacatagggggttagctagggatctctagcacagcaacacccctcattgtatagcccatggttggtgagcgaccagcaaaagcgcccttggccagccaaaagacagcacttcctaccaaggggagcaaggtgcccagaggtcaatcttca

SEQ ID NO: 21400 - DNA, 1462 bp, Cannabis sativa
aaaaatcctaattagcctaataagaatgttaaaaagtagagaaatactaaaaagttttagtggtgcttattgtatctttaatggtaaaatgttaaaagatatttggtgaggtggccatattatatagtaaaatattgagatgctataccattgaagacaaaaagataccattctaaaaatttgcatagataatatgttgtggtattgatgctatttattttttttcataaaaaagtgaagctaaaaaattattgtagttaaaaattaggacatatatatataaaataataatgtatgagatcataattatagtatttttaaagagtggtataaattgaagtatttttatttagaaataaaagtgtcaaaaatgatgtgtaagaaagataaaataaaatattatatttttagatgatgtgtaaattgttactcttagcattttcttatgtgtcaacatcgttattggttcaactaaatttcagatcctatatagtttaatataataatttttaaagagtatcactagccaatcgcaaaacgacatatctagaggtgctaagcatcactagtgccctaatagcaatgctctaaaaggtactacgagtatttaacagtgttctcgatgtcatattgttattagtgcaattaaatatcaaatctcatataacttaagaaaataatttttagtgtaactataaaaagtattggacactaattgcacttaataataatgctccaataataataataataagggaaagttgttaattaatagtatctaaaagtggagttgagggctccaaaatttataacattgagtcccaaaacaagctttggtaatagcaaaaggcccaaattcttatgggaacattttttttttgggacttttaatgtacaccttttttctaagaaagaatgataagaacatttgtttaactaaaaaagtattgttattggcacccatgttccctaataattttttatagatatccccttataattagttattgatattttttaaaattatatgtttttaagttatatgaaatttaatatttaattatactttatactaatagtaatataacactgagaaaaatattagatactaataatactttttaacaattctctactaaactatatatttagtgctttaaaagtgaaattcattagttcatttatttgagagagtggaaataaaaaatataatattaggtacatttagcatttctttattttcattgttaccctactattgacaataaggaggaagaaaaaaaaatggaagtcaatttgctaggaagtttattgcgtatataattcaacaaacacttacctcattaagttttagatggttgcattacattcttcccctataatgttagaatgactcaaaaagatacaagaggaaaattaaaaccaaaatttgggatgatgtttaaaatctctcaagtaacgg

SEQ ID NO: 21401 - DNA, 2253 bp, Cannabis sativa
tatatatattttattatttttattaatttgtgaggttttatcattttgtgaaaaaaaaaattaataataaatgttttagaaacaattccacattgtttaggagctattttttatgttatcttatagcataaatacgtctattaatttttatttttatttttcacaaaattagtttttttttcacacatataatggttgtatattttaattagttagagttttttttttattcattgtttatcaaaattttagtattaagataaaattttatatcaatatctatatatttatataaaggaaagaaaaaataaatcagatggtattttatatgattttttttattattattaatttgtgagactttatcattttgtgaagaaaatttaatgataaatattttagaaacaatgccacattgtttagaaaatattttttatgttgtcctatatactactatatagtataaataagtctattaatttttatttgtcacaaaattaatttttttggtcacatataatgattgcataaaatacttttaagattcaatttatttatgttttatcaaaattttagtattaagacaaaaatctatgtatttatataaatgaaagcaaaaaataaattaagtggtattttatatgattttctttttatttttactaatttttgaggctttatcattttgtgaagaaaatttatgataaatgttttagaaacaatccaacattgttaagaaactattttttatgttgtcttatattgtataaactaggttaatattacgtgcgcataatcagtttttttttaattaggtttaattaagtaatattaagtgcaatatatcgatgttcaatttttttaattaggtaatgtatttttatgttttaatttttgaaatagggtttgaaattttgatctttgaaatttttttagctattacggttacattaatgtactctttaaatgtgattatatatgagaaatttagcttagtatgcttaaatgtaaaatatgttattttaatatacaacccaattagaaatagtatatatatatactagggcatcctagtgaaaaagttgtaaaacattggcaatttcagaaaataatgaatgtgaagttctgaaaacagagattgaagccaggcaatttcagcaacaacattggcaaggcttcgatactcggcttcagtactggaccttgagatggtgtgttgcttctgagatttccatgtgattaagttctgtcctagaaatacagcaaaccctgatgtttgatcttctgtcatcaatgtgaagcccaatcagcatcacagtaggctgttaattccagtgaggaagatttggtgagatgcagaccatgttgtaaagtgccagccacatatcgtaggattcttttgacagctaaccagtgagattgaagaggtttttgcatgaattggcaaactttattcacactgtaggacaactcgggtcttgtgattgtaagatattggagtgcccctactattgatctgtacatctgaggatcagcaaagtgttcacttccatgtgcagagagtttttgtccactgatcattggtgtggcaatgggattggcatcttgcatatctgctctatgcaacagatcttttgcatattttgattgagtcagaacaagaccattgctgttctttgtaacctctattccaagaaaatacttaagctctcccaggtccttgagagaaaaagtattgtgaagatgagtgatgatatcagtcactgttttgggattgcttccagtaatcagtatgtcatcgacatacacaagaactagagtaatcgaagatgagtcatgaagaataaaaagagagtgatcagatttggaggacaagaacccaaaagtgattaaacactggtgtagcctttcgaaccatgcccttggagcctgctacagaccaattagctgatggactcaccaaagctatctcaactcaaagcttctgcaagttcagagccaaactcaccattttggatgcatccaatgctgagtttgcgggggagtgttaaggggtacagttgtaatttcctatcttgttgttaactaccaactgtcatacagttgtaggttagttatctttctgttacaagtttgttacatcgatccttgactcttgtatcagtgtatcttgtataaatacctcaactgtatcaataacaaactctgaactctttcatcatatctttgcaccattctttctctttcctttct

SEQ ID NO: 21402 - DNA, 4104 bp, Cannabis sativa
tatatatataaatatgtagttatatatacatatttagcttgtttagaacttagctgaaaaggatttgattagattaaattggattatactgagactaattttatgtttagtttaagaataaatttattattatatttatttagttttcttaaaaaaaaaaaagaaaacttaaattaaaataaaaatatataataataaataaattctcagtaaaaataataaaaaataattaaattgtgaaataaaataaaataatatatcatatataattaaatatatatcataaatatataataaataatttattatatttatatttaataaataattacaataataaaataaaatatttaaataatataaaattatttatgctaaataataatttaaccactaatttaatacaaatattaattttctaaaataatactataatttttctagtaatttataaaaaaaaaatataattttattattataatatttctcttagaaacaatttaagtaattattattttaaattttgaaagtttatgtgtgatattttaaaattttatatttttactaattttaatgaataaatttttaataaaaaatctataaaataagtttataatattttttttattaaaattcttattaaatttaaaatataataacaaaatcaaaattaaaaaaaaatctcacttgtatgggattattctatctggatgggataaataatagattcatataaataaaattaattagattaattatctagtccaatcttagttaaaattacattatatacccactttactttatttgtttttatttttacctttatttttatattctttaaaatatacttatttttataaatgatgtccccattatactctttaaattaatataatcatgtgttgtacttaagtagagaacaagaatatattagacaacttatttataaaagtaagtagattttaataaaatgtaatataagaatatttttgataaaatataatataagaatatttttgattaatgagatatatattattcaacttatgcctcaatcctacatgccaaatagcccacatatatatacatgtgtgcgtacatattttctctgctgtactctttttttctttctcttctttttttgggtttttgttactttctctccacctttaagaaaaccatataaataaataaatatatatatacatacctatatatcactttaaatgctcccagctaaccttcattaattaattacttcttttccttaaaaaaccaaaataacctactcaaacagaaagctacataaattagaactcgactccgaattataacaacaatttgaaaagcaagattttgtcccataaattagaattagcccttaataagctaagtattaaatgtgtttatatcgatcttgaagatgaagttgaaataacttcaaaaaatgcttaactactttagttgacctgtgattcaaaattacatatcattttacgtaaaaacaaacatatttttttttaaaaaaaaaaaaaaaagataattacaaaattaaaataatacaaatatattatctgtcacttagaaaattccaaaggtcaattgggttcacccacatgaatattgaatactatcactttctttcttttcctttttttttatatatatattttattcattttatttaattatcactgtacaatagataaacatgaacttattaattataacaaatattattattattatatataaatgcattatatatcaatccagttccaataatccaaaccctactgatgtctgacataaatgggacctcatttctctctctccctttttagttcaaaataataataaaactcattcaatttttttcaaaataaaaagctcacgagcacattttgtatatgattttctaaaccttcaaaaaaaggtcatccacggaaaattatatatgcaaagtagagagagcagacccaaacaaaaaaccaaaaacataaaacaaatctctcagagatctcaacactcaattgtggttcatattaattctcttcattatatagtcccactctgtaaaacaaaaataaaaaagaccaccaacacctccattatataacacctatttgtctctttataacactatactatactcttctctcctcccacggccatctcccataaatcaatattaacataataaatataaaattttattaataataatacaaagcatatatagaagaaaattaagtgttagtatatttgggggaggaagaagaggtgtatatgattattggaatgcttgccgtgtcatcgttaagggacacttacaaagatgaaaaccaaggaggagaggccatggagaccagtaatcatatcaacttttcaatcaacggtggagatggattcccggatttcgccgactgcatcgatttcgacgatcttttcatcggtatcaatgtcgacggagatgttttacccgacttggagatggacccagaaatcctcgccgatttctcagccgaggattataactccgacgacatgaacacgtcacccctttcggccgagaaatccgctgatattgacgataacaacgttagtagtattaatagcgcaataacaagcactaccactacgactactacgacaactcatgccgaagaggaagaaaattataataataataatagaaaaatcaaatctaccactgcggagattgaagatgacaaggattcgggttccgggtcgggttcggtaacgggtggggacgttgcgtctgcgaataataataaggaagcttccgataataaaggaggagggaaaaagtcctcttcctcaacaacggctcagtccaagaataataactctcaagggaagcgaaaagttaaggtaaagaaaataaagtacaaagtaacttaacaaagtagtttttatgtgtgagttctattgggatctgtggctttttaggttttacaagtttcaatgtgggttttgggatgatcgagggtaacgttattattagaaagagctgatttatgttatgtgtatccttaaattgtgtctgtatatgtatatatatatataatattatatgtattattgtataggtggattggacaccagagttgcacagaaggttcgtacaggcagtggagcagcttggagtggataaggcagtgccttcacggattttagaactcatgggaattgattgtctcactcgacataacatagccagccaccttcaggtaattaaaacccaattaattaattagttaataacaataatattattaatttattaggattcagtttcttattattaattattattttattattttcattttacttctcaaagaatgtagaatagtttagtactttaatatactcttttgtatatgcattttataatctttagagaactataacttctttttttaatatttaaaaaattcgtcacagactattctagatttttttttcacaacactgtttaaagacgaaagaataaacaaatcaatacttatatgttacatcgatcgtatgaaacgtgaggaaaacgcccaaaaaatagaagtgtctcactgtatcggtatatatataataataatactgaaaccgtaaattaatcttatcttctaataattattaacacctcatatgcagttttcgagatttccttttatcaaaattccaaaaattaatgttaaatagtttaaacgtctcgtcaaagaagcagtagcaaaataccaaatcattacctaagacgggtagcttcttctacttaacatatatatgtgtattttatatattatatatataattctagctgaagaaaagccttgataaataaatgggtatcttttatacgtacaaagatcattaaattaggagttactgtatgtatacagtagcaattaataatatacagatgatgaccatgtgatttggtggtgtgatgtttggtacacagaaatatcgttcgcatcggaaacatttgctggcacgtgaggccgaggcagcaagctggagccagaggaggcaaatgtttggggcagcgcctggtggtggaggcggtgcagtcgccggaaa

SEQ ID NO: 21403 - DNA, 3020 bp, Cannabis sativa
ccagatagatgatcgaataaatccgtatccactgagaaagatggccatttcagatcaggccttctatttcatcgttaaaataatcgtattcatttgtggtgtgcgtaacatcaccatgatattcaaatttttttctttagtccttcttgtgccgacctcctttatacactggtcgtagcttattgtagtggactatattacaagtttccttatacatattttcccgagtatctatcatgctggcgtacccagaacaccttaattcacgctaaatttttcctctttttcgaagcctttgacttgctctggctttagcttttaccacccctcttgcccctagattgactcacatttgattttagagcctttgtttgttggcttgcctatctaggagctacactacattcaaattttgtaaccctgatgctggagaaattagtttatgtaggcacacacctttaggtagtaggcccgtaaacatgggagttgtgaattggcttccacgaggggttatcaccagagctaagaattgtggagtgtaagttgaattgcttacgtttgatgatggtgtcggagggtctccaaaagcttgtatgtatgcttcttccaaatttatgaagccttgggccctagataagaaatcagacagggtgtcaaaccttttactttgtagctcaccccataacaaggacccaacaaatattcccaatgttagggacactagctttatatcatcattaacttttgttctattcactgcttccatcatcctttggatgtaatttttgaggctctctcctccctgttgcttgatgtttttttatagaactgacctccatgtcgtagtcttttgccgctactaatttcttcttaaacattaattgtaggtccttctagctttgaacggatctacgagatagccttttccacaaatcttgagtagattttgttaaagttaatgaaaaacagaggcatttcatgtcatcttttgccttttccccttgcatcaatttgatatgtttaaacatatgggccctagggtccattcttccctcatttaactttatttgtggcattctaaagttttgaagaaaaggtgctactgtcattgcagtagacaatcattggtagaaatatttcttcagctcttaattccaccaaaatatttattgagattttcataaaccgattataataaaattaaagctaaagaaatagttgaagtgttaaaatttcaacgaggatttttacgtggttcaggtattagtaaatcccactccacgagttaatatcatttggccagaaaagcgtttgagtattacacaagtgttcttctctggtttattaaacctagatttttgtcttaacttctatgaagaaaaatcaatccctcaacatgaaagtctcatgttataattataggctaggattggatatggctatacctagacccgttagggttttcaaatgaacctggcccactaataggataaatacaagtaatatattaacattgatcccatttagtgtggttgtacgcatgaggcagcagtcattagtacacgtggagacctcctgatggatacaggttgcacgtgtgcattgtctttgcatataattttgcaaaagtaatggttgttggccaaaacgcatgtttattttaataatacacacaatttccgagtctctcgtaggggacaaggttcatatatcaagggattcatcattaatcgagcgccatatcagtcttgacttctagatgcctctttaattgctcttctggaaataccacttagacatatttgaatatgttctttctgctatgctttctctctatctagatggaacgcccttccaaatcctaggaagcctggctattaggataattgaagttgccatagagccaaaactgcggcccaactcctttagtgagtttagcccattatccaaattgggcccatgactgggcctgtgttagatgatttggataaatgaaaatacacatgttcctattttggaaacgtagataacacttagcatcggcccgagatgtctcatcttgtttattatttcgggttaaaaaagaaccaaaaaatttcacaacttccaatccacgagattttgtgttttgttctcacaaagtgttttaactctcacacttacacccaagaatcttcttcatctataaaagattcttcttacaaaacttaagcctaatctctctttctttctatgcacctctctctacctctcaattttttctctctcaaactctcattctcatctctttgagttcttaaactctttttttttttttcgaaataacaatgtcaaggtggtatatataggcttaggatcaagatcctaaagtcggtggctacaagaaacgagattattaagctagttagaaataactaacttaaccaactcgtctttgagtgaggtctccacgtcagcttaagcatcagagcctctgggaatatatataagcttccggactcacgaaccaagttataggatacttgttgaagacgctttcgaataggataaagtctgctatagtcggctattcggatctaccattctaagagtaacaactagccagttggaacttcttctagagaaaggataactatcctgaaaactggacccggagtggatgtgatagtcatctcacaactctctttttcggacttaactatcattccacataattctttttcgttgattggcaaccgcgagtgaacaatttttctaaaaaataatgcttggagagacttttttattcggagaacgtctataccacaaaaagctcatatgattatatgaaatcattttcacgacttctttctatttagtgttttctatttttccgaattcatgtttttcctttatgctgacttgggattatattgtatttattaatttacgaataaacacatgtatatatataaggaatatagtaaatactattattgattttaaagtagttattatacaaccaaatatataatcctttt

SEQ ID NO: 21404 - DNA, 1347 bp, Cannabis sativa
aaaatttttagtaattacacagtgtaattacatccaattttcatgggggccataatatttgtgtgtaattacctccaattacacataaatcaattacatggtggctttttaaacgtagtaattattctatttagtaattacacaattacttccaaacacaccctaaaaaaaattaatattagatgagtacttgtttgccgataatttgtagctgagatcgacttgaaatttcaacgatccaattatcgtgtgtgtggacatgaagactttaatttataattaattgaaaaagaaaaacattaatttccgtttggttttattaggcttttgtattatatatgtacatattatgtaaatatgatcattcacctaatatataaaagccatccttgttgacgttgaccataccttcccaccaatgtctttaattccatttttggaagaaattaaaccggttttgttcaatcatgatttattattaatatgagtattgtataaatgtacatgtgaaaatgtgtgtataaaactcactacaaaaaccttttttgttgccataaataataaagatatttttttacaaatttatatattgaattttaattagcgtgtcggattaatatttttcttcttttaattaatattctatatatatatatatttgataaattaataatagtaaaactaaaaattatatttgatcaattaatatatataaatagtaaacataaatattatatttcagagcctaattagtcactgtggtctacacatcaatatttgtgattaactagtacgcgttgtttatttatatatatttatatatttaccatcttcatgactttttgttgttctcatataataagcaaaaaatatggtgtatagttagtagagatataaagaaggtgaacccttttctgtttcattgacacttaaatatgccataatataagggtggataggtagtcatacaaatatatgttgacatcttaaaaagattgtgtgtttcaatatttataaaaatattattaatttatatatatatatatttatgtttattgttaatcttatattatataagagtcgtaataaaagcttgcagaattgaaatcatttaaaagtccacacatcatatatatacctcacgttaggagcgtttcgtcatttatcaaccactccacctaatcaatttaatttgtagggaattcttgtcaaaaaaaaaaaaaaatacaatttaagggaatctaataattaaaaaaataaattgattaggttcaactaagtatcaggtcccataaaaatgagacttttttatttttacgcttctaagcagttttttttttttttttt

SEQ ID NO: 21405 - DNA, 4643 bp, Cannabis sativa
ttccttaacatttatatccattttggtatagcacttttttttttttaaatacaattttggatcctagtgaaaattacatctgttttattaaataacaaattgtatggatgaaattcggtcggttatggtgagttttaccaattttataattgattgtttggaaattataatcgtataaaacctaccatacggtttttgataattttttgcaattttttgatttggcggtttttgatagctttttgcaatttatggagattttgacattttgatttaaccatttttttttcaaaaattgaaactgatcgtcatatcaaaaaaattgtaaccaaaatgaccaccaaaatctataatggcgtagaatcgaaaatttggttagggtctaatcggttttagtttttcaatttttatgaactaaaaaatcaattctatattttttaaaatggtacaaaataatactttgagttcaattttcatcaaatttgtttaaacataactatcttaaaattaatttttagcacgaatagatacaaaaaaaaatacataaattagtttggtcataaacacctccaagtcatgttatttttaagtcttattttgataaaaattaaacttaagaatgtataaagttattaactttacccactaaatgttcaggactcactacattctcacttaaaaaaattcaacaaatcaagtttttttagagtaaaaagatttacttcgaaggacctcacatcacaaacacatatccccgtaataaataccataagagagtgtttgttttgattattgaattttctaagaatttgtgagtggaattaagatgaagaataacgtaaaactttagtgtacaaaacagttcatattactcattaaaactcggtgagacccactatatttccacctaaaaaattatactaaacataaggtaaaactcatattcccatctatctagcactttccttcataacataaatcccacaaattattaatacattatcattctttcataatttttttcatgttatgaggggaaaggagaagaacacaacttacttgttgaggcttttattttagtttaggtgaggtaccaaattttattgactaggactaattgtttggtaaacttgtttttcaaatgaaattccccaagtttgttcacatatttttaaaatggtttcgtatttagctttaacttattcttccatacagaataccatattagcatttttttttaaatatatatatatatatatataaagtatcatatatttaaataaaacacatgagtacatactcttagggtgtgtttggtatgaggtaatattttaataggaatagtaatattttataggattaattttaaatatttttaaaaatgtggattctaaattttaccttgaatcttaatgccatggattaaatatattaatacaacaaattattaaattcttacattcaatcaaataatgtaatttgattaacagtaatctaactggatatacctatgcataaccaaacatagttataagtttctaaacaatcatattctctaattatctattccaattaatcaaattattaatatatgatgactactcaagtttcagtttatttatttatttattttttttaagaactactcaagttaaattaattgctttctaattttaccatattagaattaaaaaaaagttatattttcaccctataaaattataaatacatcataatatttaaagaaaaaataaattaacttaaattattttttaaaaatcactcttaatatgtttttttcacattattttgtatcaaattcaataaatattttaattttattttcatattttttaaaattatatatttttatttttattatgtattaataaaatttcatataatttttttgacttaatatttaaaatgtagtttatttttattttgcatgtatatattttaagagtattataaggaagaaaaaaaattaagaaaaactaagtataaaataaatatataatttttttatataaaataaaaattattaaataaggtatttttataaattttgagggtgtaaataaaatttttggaattatctcttgaaagatcatcgacaatcttaattatctcttgttagtgtcttcattacatcaattttgtgtttcattattctggttttgtgcatttagactgaacgtaacaaaaaaaaatatggcacttcaattaggaacgcttaagtgattttgagttggacatttcaatattatgatagttggctttagggacaaaaatcacataagcaaatagctaagatttctatctccccacaagttattcattggttagcacctcctatagattgttaaagttaaatgtggatactgctatttgttgcgaaaacggtactattggttttggggctttggtttgtgattctgatggcttccgttgggatattttggtaaatccttgactaattttttatccctaaagaagctgaagcgttagcaatttcgtatgttttaaaatggcgttttcacttaggctttttcgtttcttttgtggaaagtgatgctggaatcattgtcaatttagttaatttttttttctggggtgtctcccgataggattgtattattagatctagagcattgttattgggcactagtggtgcctaacacctctagacatgtcggtttgcgattgactagcgatactcactaaaagttattatattaaactatatgtgacttgatacttagtttgaccaatagcgatattaacacatagaaggatgttaggcactattggtgccctttaacatttctcttagatttattaggtccttgttatctgtctttctatgtatgtgtcttcaacatgtgatgcataatgataatagtgcattacatgagttagcaagatatgtactacaaataaaaacgagatttcttgattggaagaaactcttcttattatgataaccaatgtattatttaagtaataaaattagttattatgttaaaaaaataaaaagaaatccggaatttaattaaattgtttttacaatcctaacctttctatagtgtaggggcataataggaaattaagaagtctagtgtagtttctttctagtttctagtttctgcaataaagtgaagatgactatggggttggtgacttggtgtagtgagaaaaggagaagaaacaaagagaaatggagggtcggcaaccatggaaaccaaggttgtccttcagaatcgccaccgtttctttgtgctttatcaatgtggtcttagccctcttcttgcttcacggcttcctcgcttcttcttcttccccttccccttccaaaattcccacctctcaacttaattcaggtatttatctatctttctctctctcttctgcatagatttctcaaaaagaataattttttccatctgggtattgtagctatttgataataatgctcacccacaatcgaattttctcgttattcgttgaatttgtgaaccgtgaatgattaaagttgtgggttttgttttgttcattcctgcggattttaggttggaaattcgggtattaagtttttgtaattgagtaaaacttggtccttttctggaagatgaatattaggattgaacaaaagctagaataagttatgaagggaaagtagttctttctatcttgtaagtccaatctatggagttttggttatagtttcatccatcaaaattgtcaaaaattcatatttgtagtttgtatattttaaaatagatttttttactagttccttttgaagagtaatgtatctaatgtcttaactttttgaaggctactcatggagtttcatagctctaatcaaaccattaatgttatgtaagatggtgattatgatcatttgaaatgaatgaacatcattcatttgaatgactttgatcgttagttgtaaattgtatgatcattgcttatgtatgtacataaaccagttgccatgagcacttggtttggtgataaacaagaaacttatgtaagtttccaactgcagctcaactcagatacatcaaggaatgcgaagagattcgtcttgctatgcagccctttgaactgattaaaagggtatggatggcttcagcattgtagttgatttgtccttactcctttttctttcttctttcttcaaatagtcttagtggtatgtcaataggtgggatgaattgattctcttggtgggaatctaaggacattatgttttctgctttgatatgaattggtcttgctcttttaggtaaaagaaattcagcaagaagcatatgcagaaccagaaactgtccaacaaaaggatgcaaagcaaactgcagcagccgatctctctaaaagattaaaggatttgcgctccattaatgatgcaaatagcttgaaaggttagcattactattccccgaattcgaaaagaaaatgagttgatcagttctaagataatagatatgtactatatctttacttcatgggatgaggacaacatactatatagtttttagcagcagagagtcttttcggtctttcagataataataagtatttttatatcagtactgctaaactaggcttggttcttgtcatttttgctaatctaa

SEQ ID NO: 21406 - DNA, 10554 bp, Cannabis sativa
cattgatattttttgatattttaattttttttttttaagtgtaactctatttagttataatatctcaattagaatattatttttttttagttctaattgtattcttggatagaggttctactgtacattattacatattattattattatttattatattccgatatatatgtagatgtagtaaataagatataatataaataaatttatatatatttggtgatattaatagcatcgtcaccatcaaaatctgagagattactcattgtttttgtcaaccctgagacaaaacccaccgccataactaccagactaccaaaaaccaaaccaaacctactcaacttccaaagaaacaaaaggaaaaaaacaccatggaagaaaaagagaagaaaaagaataagaagaacagcagtagtaataagaagcaaaaacaccaacacccaaatgatcaaaatacaacaaaatatagctcagatttctctttcaaaccctgctccgacgtaaagggtgtccgattcggtggccagttcatcgttaagtctttcacaatccgccgagccagaccacttgagcttctccagcttctttctttccctccaaacagtactaatattaataagagtagtaatgaggttccttttccttcgacggtggggtttttaccgacaaatttcacgatcttagcccatcacgcttggcacaccctgactttgggcctgggtaccaagaaatcgaaggttctgctcttcgttttcgagtctgagacgatgaaggcgagcgtggaccgactgtggccaacagagatacccctgggggaagttaacaagagattgattaggggattgagcggaagcgagatggctcggttcaagttcaggaaaggttgtattacattttatgtttacgccgttcgcagagccggttgcctgggcttcacttgcgccgatgacctccgtaccatcttacaatctgttgttgccttgaaagatttcttggatcatacggctatgcttgctttgcctaatcagagaagtattagctatgctactcctcctcccccggtcgccatggctcattaactaagccacttttcttttcatttcatttttatttgtttaatctttctttctcttttattattattattattattgtcgtcatagggggaatattattggtttatttgttggagacgatcttgttgttttgatattttaacgcaaaatcggtaattttagtactaataaaaaagaaaaacttgggactttgtatatgtaattttagagtgaaattcaaggtctcctctcatctattcgtatctatttgtatatttgtttgtttcatatggatatatacatacaagttcggttaatgcttctatatcgactctatcagaaggaaaatggtacgtagaatagtatttaacttctttcctttttcttaattttttggcttagtaagtgaagagtgtaggcttctctgtttttgagttgatgggatatcattaatttacaggtttaagtgtgggaataaatctatttacaggacatgtgaacttgtaaaataagttgtttagtattttgatcaaaccccaaataatgttctgtgaaaattcggtagattttgatcgttataggaggcaaaatgttttgtttttcttataattctgacactattatcttcggtaaatcgtgcctatggattcaaaaatcaaaaacccgtgaaccaactgagtgtaaatttacactatttaattggtatagaactcgtgccccaaatattatattagaactttgcaaataaaattaataaaaacaaccaaacatgtatggattgtgggtcgagaaatccataacttctcttaatggaattaaccgatggggatggaagaaaaagaaaatgcttaaaggtgtgtttggtatgacagaaaaaaaaagcatgaaaaagaaagattaggatgaaggaccatttctccaactagtgaaagctcttttagcgtaggaaagtgagagaaaaaagaaagcgtatgtgtatgtgtatgtatatattatattgttaaagatatatattcatattgtttcactgttttgttgttccagcagttgtggctttaatgatggtgtgagactgagtgagagagcagagaaggcccatctcagctcaacttttccacatgaatcattgacatctctgtcgtccaactcaggcaacgtgaataaatgaggcttttaagcattggccactgggtggggtgaggtgggggtaataataagtatgccacagtgcttttggttggacctgttgtaagtatctattattatttatttggtgtgccccaacatccccttattatatggtgtcacatgccaatattttaattttgtgaaagactacttctaatttgttttataacccctattattttgcatactatgtagattgatattagagcttaatataaatattgtacacccctgttcatacatgtggatatggtcatggtttgtataccttttctacattctgacacgtacaattaatcgaaccattgacgcataaggtagcgtttgatgttgctagttcttaaaaatatataatatagattagatttcatatggttaggctacatgagtcctttgaatcaatttaattttctcacataagcaaagtaagattaggcaatgaaaggtaaaaaaaaaccattccagcgtagcttgttacataatcatgagttaaataattagtgcttcttggaacataaacaatagaaaggaaagaagtgagagctaattaacaagcttttgatcaagtttaatgtatctcctaaacaagatctatcagatgagctaagtttcaatttatccaccaattattacaatctaacttaatagtaacaatcggtaagagagtggcttgacaccattgcatagctcggaaagtaacttttagctccagtcaatgtaggagcaactatacatgccaatgctaaacttgtgattttctctactgcattagtgttcactttcaagaaacataattgataattctaggggaagcaatgcagctggaaattcttcttctctcatttgtgagctcttgctagctttttatcttgattttcgccaaaataaaaatcgagatatatgcgaatttaataaaacttctacgaaaatcaagataaaaggtaactttttatctcggttttcagttatttttttattaaagtaagataaaagtccacgtttttttttttgagagagaaaaaaaaaatggaaattttcattaaaaagcatatcaaataattttttatgtgatgatatatcacccaaagagcataattaataaaatatataaaccatgtcgtttacaaaaataagaatgaaaactctaataacaccttcaactaaaatacaaataagtcttctattcaaaaaaaaaaaaaaaaaaaatacaaataagtcttcaacgttgaagcattaaagaagcacaaagaatgcttgatcttcaatccgaatgaacacgtgacaaatcacaactatcaataattatcagccaaaaatctttcaatgaaaattaggaaataattattcaatttagtataaaataaaataaacgaacgaccaaccatagcgataacaatcgcaagaaacaatcgcactataaatcatggaaccaataaaaatctgagaatcccctaaatttgaacatggacaatatccccaagagaaacaagactaaaattctcgaccatgaataaataaagttctactaccataataatagaaaggtggtgtagcaacaccattattaaaaataaaaatatatagaaacaaaaaaagaaaagaaaagaaaagaaaacatagcaaataaaaataacactaagaaggttaacaccaatgaagatcccacttatattttataaaaaccagaatcaaaagcccaacatattttcctaaaaaaatcatcttgttttataatattattaaaatttgattttttatttatataattacatgtgtgtatatttatttaattgcgaatgtaattatgtaaaaaaaaataaataaataaaataatttataaaaaaaacaataattagtaactttaattaataatgagagaaattctttatgcatttacaattgacagttcgatgtatactattgttaacctaaaatttcattaaaaataatgaagctttgtcaataaaattagaatattaattatagtgactaaataaaataaacaataacattttttacgtggttttgtagttaaaatttatatactttacgagtcaaaattatttctaattattcttttacaatgttttttgatacaaaatagtatttttggatattttctatacttaattcctcaaagtttttcttcccaaaagatcgtctgtccttatggaaagaatttcacccatatttatagtatttttaagaaggtggttatttccctcgttttatctaaataattatttttgggattgtggacaaaccccacatttttccttatttacaacgtgtctgaaatcaaattactgctagtaactattttttaatcttatctagatgtgacgagtctttgctgaagtggtgcattcagagttgtctcgcattcttttgtaatagaagaaacaacgagatgaccattctgacacaactcgatgcttgctcccgtcataacattaagaagtggtctaaagctggttcttctggattggtcttctcacattgttaatagagacagatccattcttgatcacgacccttagactttcagcatactcatgagtatgttaatcaatgggctaatcaagctcttaaagaacttgttatctattctttccagcgaattcactttgggttcctatgcttttgggccatcctggttaaattcgagataatgtaagaacgttgtcaccttgctatacactgtttatttttatcgctgccatctgttagcaatattgtaacacagcgcaagatggatatctctattagttgtagcctattctaaaacaagataaccattgcatttatgagtctccttaatttctgagaccaatatccgtgtgtcatgtccatatttatggctcgaaatatgggcataataattgtctcttaaaaaaaaattctagaactaaaagggttttttaataaatcttggcaagtcaattcagtcttttcccaattggtaatgagtacacttctttggcaattttatttttcccaagaaaatattattttctcattaattaaatgtcttttcatttgacaagcttttcacctgtcttgtccttccgtatttcctagaaggatcctagccgtttgatttaattttgaacgagatcaacaattcctcgtattttaatataagaggtatctttacgatcatcctttcattcatccatttgagatacaaaactagagaaattactactttagctttagagatttttgaaaatcttgcatgcccagtctatctttgacgtatttctttcccatgattaacaatattttttctaaacctcgctctcgttacattccggacccttggtactggagatttctagtaataagaaatcatcaacgccttcagagaaacccagaatctagtaagtcttcaatttttaccttttttctctgttatttttattagtttttgtatgttcttgtatgatttttgtcctgaagtaataaggtagttaaattttaaaaatcccctattctgaataaaattatttcaaagattttaaaatccctaaaatattttctttattgagaaaaagaatgtttatatttgtttcaaaattttggtttccagagtttctagagcaggaaaacccaaaatttcttgccttacccttcaaaccaagacttgatacccaaaaataatttcaaaaataaatgatgagaaaattaggttattcaacgaaaatcttggccgagaggatgcctcatctcgctctaaatattttattaacagggttattgatgggaagcaccgcttcttacgagatgtggcttggccaaagtttcctagtttaataaagtatcctttggcaagaccattatttttacccaagattaccattgctttttctctaggtaaactttgacatcatgcatccaaaggagcacaagtctaaattaccctagaaccctacgatccaattcgaggttcaaatgattgagtctaaggttaggtcaattgccctatgtgggtccgttcttaaggtcttgtgatatcaagaatgaggaggggcgccgaatttgtttagtcgaacaaagcgagttcatttgattcctcaactcgcttgtcaaatgaagaagattgcagcagtagtggttctttaaggataggcgcttggagtatcgagcaaattaaagtaggagtcatccttcctctcaatcagtacttcaaggacttctaaaattgtattggggtcacacccttttaacttgtcccaaatacatacagaatcttagtcttctaaaagtcactttaccacatcttagtaagggagtgcacaaatcccttagagatcatgtgcttctatgccgaaataaaagagttcaagcaaggattcttttggacgattgggcttgatctaattagcaccattacctttagaattatacgtaagtattcaatatttcaaactttaattccaagtttaattttatgtttggaatttactaacttcttttaattgttgttctttcagttctttcaaaaataccaatcccaactgttgtcatccaaaggcgtcacaagatcttggtgaacttgccttatggtttgcgagcagcagaatttcttcttcacgaccaaaaattaaaaacatgcgatcttctcagaacgaaccaatgcactatgaattttaaggatccaaagtatccaacatggtaacaactcctaatgcctgaggaataagaagatcgcaattacgtcactcatacccattttttgaacaccttagctacttgggaagccttcgagactacagaaggggctccctaaggtaaaacttcttatttctatggttggtttcctaccgtccttaggaccgatccaacgagtttagtcaaatttaggaataatcaatataatttttctatttggaaatgcatcgacttaatagcccataggtttgataattggtaccatgagtctcatgtccaaacctcgtgtaatagtttatttaatgggattgcttatcaatatgggacttatgattggcgagctaatgagtgggagttatctccctcaaatatatttgacctttatgatatcaccgagtcgagaggacctgacaatcatcctattatcaagtctcctcgcactgatctttctccacttcgagtaacttctaatatttgactgtagtttaggttgaatttcactctcatgtatagagaatgtttatgtattctcccctcctttttctttctctaaccgccactttcttttattctacagaaagggagtttgactaggagaatctcctaagcagccccgctatccctattaaatgggggtaaagagcgaggtgcttctaaagttaaaactttcgagaagcagccaaaggcccaggaaagaaaagagaaactaataaaaaagattctcctcctttccaagtattgttttatagaaaaacaatagttcaccccctaatgcttccctctcggcccctaaagttgtaaacaaagaaaagtagaccctggggtcagttcatcaagtcactttctctttggcaaaccccacaatggttttgatggacccaatatgcccctgcctctggacgctgatattgaagggtccaaggcctgttctcgtcacataacctaggcgtgttgcaaccttagaagtttccagccagacgactagagcttaattaaggttggcacacctactgacctcttgacgtgaagtgcaaaacttttgcactcagttagtattctaacttctctcttcattctatcaatttttttaactttggtattctgtgtaggcctctctcttggcgagcttgggcctccaagcccatcaataaaactcaactcatcacaccttagaattgggtaaagcaaacgagcatcattagctactagccgctcaaaggaatgatcctgacaaagaggtttctcgtcttaagaaggagattaaagcactaaagaagtctaagaaggatttgaaggctgaggttgaaaccttatagaaaaatctacttgaccacattgagaaagccaaaaaggaactagattaggtgaaggaagcccttaaaattgatgcttgtgagagggtcaaaagaatgggtaaacgttcaatctatagagcttgggttgtcaataggagcatggacctcagtttcttgggtgcaaatgtcgagaagatgttggcttatttcaaataaacagaactagaaaagtgaggaagcattgaggagggggaaggagctgaactagtcgagggagaagaagatgaagtcacctctaagtctcccaccatgtagacttagtttaattatctttaatttttgaataatggcgttttggccaagaatatatcttgcattttgtggtattcttatttatgtagttaggtttatcttgctttgttggacaaccaacttagcttttgatcatatttataatttatgctactttaagatatatttccttcactttttgtgagaaaatttatccaagtttgaattatcacaaattaactagtgaaccattatttataggtagactcaatttaatgattacataatgttttgtttaatttttgcctccctctccttgttgatagcatctctacttcatataattctaaatatcatattttttatttttaatttgcctaaggcactattttttctttcattctatcgatcgttgtactctcaggaagtttccttcccgagacgtatacgttgaatttgggacatttaatatacgagccaagtcatattgccaaatgtcaatacacatgtcaagccctaatctcccatattggctgctcaaaatatgagggatagcaaataccctagctaatttgtgtgtgtgtgtgtgcgcacgcgcgcgtgtgtgcattcatgtttgtgtgtgcattgttcttgttagtttgcgtttacaagttaacacttagtttaaaagaacaaaaatttttgtggaagactttggttttaagttttctaccgccgaagatcgaggtcaatcacttattaatgctttgcaacaacaagaaacaaaggctagagtgattgacagaaggagttataaatctattgcataattagtataattactaaactttgtatttgtattatttttattagaaatatgtttaggtttttcttactttatttgtaggtaaataaaaaaaaattcttgaataaatcacgatccagtgtactattctaaaactttacccctgatatcttgtccatgttgttctgtttgagtgaaattggtgtgtcagtttccatggtaggtattataggatcttaaggatttggcattggcagctgtcttgcttgctctacatgcaaagcttcattatcctttgaagatcgtctaggcttttatctacaaatgtttgtttttcattcaacaccttaatcccagtttgcgcttcaaaaagttgttttagagtttctaaagaatccatcaaattgtagctttcagcaaagtattggtttttcatttaattctcacggtttcatctaggtacttcaaacaatttcctaaaggaacaagacttatctccaagtttaaccgatgttgccaaatgttcaaacaagcatattagtagctttcttgaagaagttctcacagacgttgccaaacattaatgtcaaaaaattaccttaacaaaagttactgaaaataaaaaactaatcaacccaagcattatgaattcttgatttcccatttgtattctgattgtcgtcctcaaagacttcgtttgttttctacaaataactctctgatgcgcaagttagtgtactttaaaatagtatagagagaagtctaagagaattggacaaaaaattctagaatgagaaggtcgacccttttccaattgtccttgctcctgtttatagtttttggtcaaagtgaggatgacgtcagctaggaaaccctttagctgatattttgttcgatcttgcttccgtgttcaatacccatactctcaattgattgtgtacaggtgaggcaacgtgtgttggtcttgggccttattgagcttgttggttatttaaggaaaaatcaaggaaaatttacaataatatatattttttttgtatataatttacaatagtaatgttactactattactgacgtgtcacgtcagctaaatatgacgtatgtgattttttttgtattattattattttcttacatttttaaaagtaactatttggttagtaatagtgtggataagaaaccaattcgttatctttacataaaaattttatttttatatcatataatttgatatatatatatatttatatctattctatataa

SEQ ID NO: 21407 - DNA, 2283 bp, Cannabis sativa
  modified_base (169)..(176): a, c, t, g, unknown or other
aattatttacgtggaccaataaaattgtaccacttgtatattgtgtccacgtggacaagccaacttggcacttaacagctaaatttgaacagaaagggtaaattgctaacagactacgagttttgggggtttacgctcagaaatttaggttttgggggtttagtgaaannnnnnnnaaagtattgggggttttgccgccatttacccttacttttaactttttttttttgggggtttagtgttgtactaatatattcttatttattttggcacttgtacagtatagttatttaagatattatgtataattttaaaaaaatcagattaaatttaacacgctgaaaataatgtacctctttaaaagtagtacactaatgtactcctactcatgtttcggcattcgcgagacttttagtctatttttttcatggtcgtgtacattatagttatttaagacattctgtaaaatttttaaaaattttaaaaaaattaatatgctaaaaataaaatttaaacggtcactttcacatgtgattcttttatttaaatataacaattgtagtgattttagttaattaatataatattatatttcttattttattaaaaaattaatataataataaatatttttttagtgtaatttttaatattatagttgaagtgaaaataatttttgacactacatttagtaatagtgccacaataaatttagtataatagactatgtagtgtgaaaggaaaaatataattttcccgattatgtggaatacaatttttttacgtgttatgcatgcgtgccaagaaaaaaaaatcttcaaacatatgttgtcaaatcaaacccacacaaaaagaaacaaagaaaattatattattggaaaatcgtatgaatatgatgagtgaatataagagaaatggcttttgtaaatatcaacaagaaaatcgcaaactgagcaatttgctttatgtagaaatcattaaaaaaaatggttacatttaatttaattggaggtaataaaatgaaatgaaataatcttcattttattatattatttataaataatataaaatattgattaaataagcgtcataaatttattattttttttttaggggagtggtgcccatcaaacagaaagaaactctttgagattacacgggtcatcaccaattcaaattgctacttcatctaaccctgtagcccaagatgccaacttatgagcgaaagtatttgctgtccgattgacgtgtgagacataggcaccggggagaagagacaaagctgcccgaatttgattaattatatcaccaaagcaagaaagatcttctttggggctcaagagcatccgagatagctttacaatctgtttccacgcaattaatatgaaaacattcttcaatacaccattgcaacgagagaaggtgggatttggcttccatagtagtaacatcccctcctccaacataagggaacgcgacagcagcaaccaccaaaccatcgctgtttcgaatgactccaccaaaaccagcttttaaagaacctttagtgactgcggcatccacattcagctttaagcaatcaggatcaggaggtctccaggatgagatcgagggggccctattcgcaaaatctggaggtttttgagctgatactgatgatttgtagtccgccaggaagctctgcgctaggttcactactgcgtgggtcgggtcctgtgattgtcctctgatagccctgttcctgttatgccaaataaaccaggcaacacaaagaaagcattctacatcttccttggttaaagcagcataaatataataagcaatgtcatgaaaagtggcagtagggggagaagaggaaatatattcataaaaaaatgtacatttccagactcttcgaacactcttgcagaagaatagagcatgagaaacagattcaacgtgggttccgcatcgatcacaagttgaggattgaattcttttcctagaagccaaatttctaagggttgggagggttgagttagaggcacgaaaagcgaaatgctttatcttaggcgggatattaagatgccagaggtttttccaccaagatgaaggggaagatgaggaagggatatcatgaggggaggtagaagagagactaatatggtagccagaatcaacagagtaaacaccagattttgtgggctcccatattaaagtatcactagagggttgaaggggaaggggaatggaggtgatttcctggacaatgtagggcgggaaacagtttctaataagggtaag

SEQ ID NO: 21408 - DNA, 2781 bp, Cannabis sativa
ttattttgtaagtttcccaatataaatcaaaacttttgaattcaactcatgatgtacaatttcaagagtcgtaaccaaatttaaaatggttgagctgaatataaaatggaacatatttcggtacagcaattgtaaaattggtctcaaagttaaagattgaattgaaagaaaccctaacctcaatgaaaatggaagaaaactctaatttgaatcagttagggtaccaacctaagtccttagaagaatagacaacttgaacgtaagtgttcattagtataatacattttgggaggatactcaaagataatccgtgagggcttagatccaaatcggataatatcatgctaatataagagttaaggtgagcttttagtccaacaaagtgaaagaacaaggcccaactaatgacattatagctaaagtttcatgagttgggctataatgggctacatttgcgttgtgtgagagaaaccctcaatatgaccttatgattcaatatactgaattaatggtgtcttgcatcaaaagtctacatgatattatggtggttagacgacgtatcccgttggtgattacagcagtcccagatggaaatttacgtttagtgccttctgtcgaaggtcttcataacaatgttaatgttcagacgacaaaatctattggtgattacattagtacaagagggtttcgctggaggggaggccacaagtacgtggtttgagggaataattattggcgtaccaaccaaagtcctacattagaataatatataaatttttttttgaatataaatgttcacctactccatcagtatgagtcattttgagaaaatatctaaattcaaagctgatagcctgataatattatgctagacttctccaataatccttaattggttagtgagtaaaaaataaaataactaaccttgaataatgtacatccaattattacacattttttctttcatacaataataaaaatgagttttttatttttatattttaaaacagtttttttttttttttcgaatttcacataaaaatccctataacaactaataaatcaacttaaatcgcaactaaaattcggaataactaccaaagaaactgtaaattaaaaaaaaaaagggttaaaaaatacttttttgaggtaattctcctactaaaaactaaccttgaaacatgaacattcaattattgccttcgtattatataggttttaataatttttttttttgaatcaattgatattatttattaagctcaagcttgattggaaaagtattgttgtagtgacatttatatttggtggatatatttaattttgggaaattatgaggtgaatagcatgataaatgggtatgtacgtagcaatattacaaatgtaattattgatatgagtctgcataacaaactaacaacttttgttgggtgatgatgctgacatgacatgttactgacctgtagtattctaacaatacagaataattgacaaaattaactctaagaaataagaatatggaaataataatagccttcctagctctaaatgctaaatatcagccccattatttgagtacctatttaatttaattatgacaccatacactgatatcatcatatgtgggatgaagtagatttgcattatttccatgttctttcaacttcaattcaattaattacacttttgtaccatggttgattatatatatatatatatatgaactgagtattactcttttatatataatttatattattaaaatttttaaaatattaattttaataatattaaatcattaaattttgattcaataataaataatacaagaaaattagagtttttatacttaattttactatttaattaaaaaaatttaaaaatattttttttacactaaattaaaaatatgtttgcataaaaatatttgaattaaagtcaatttttttatcttatttttttgtcaaataaacatttttttttttttattatttctttcctttcctgtataatgtaaacaaaatagagtttttttttattagatagaaaaattacaatttttttttaataatactcataataatacttattaacatatatatataagagaataaatgagctaattattttaaactaattagttttgtataaagtttttgatttaatggtgaatcaaagatatcatttctaacactttcaagctcataaatcacaatggaacaaaattaatttggttgaaattctgctttacagaattgctgaaaatgttattgtctaattttccaaaaaaaatttcttaagttctcattgcggtatatgaattgactaaacatgtcttttaaatatagctacaataaccttttccaacctataatgatatattctttatagttttaatcaattaactaggaaacagtacagttgtattttgtttaatcatcattaataaatcataaaattattgttactaaaaaaaataataatattgtagaaaatttcatcatacaatttcaaagtaaacaaagatattttcaaacctagtaagaaaaaaaaattgaaattgaagaatcctcacacaaataagagatctaaaaagctattatttgataaatttattaaaaaactcattatatgattttaaaattgttgttatcaccatagtttacttgtaatcgtcactacattcaagctaattgtcaaaataataatagatcatgattccaaaatatttgatcgatagagattttagctaaaaaaaaatcagtgtatatatatatatat

SEQ ID NO: 21409 - DNA, 5999 bp, Cannabis sativa
ttttaaaaaatgcattatatatcaatattgataggtgcattcaaaaattacactaaaatgctactgataatgacaaaagtaattttttttatattagtcatatttgtatatctacaccaaaatctatatgtccaaacttagaactaaaatttatttcgttgtttcatatttcagttcagtttattgaacggtttgggaaccaaacgactaattggttagctcgttcttctagttcatgtcctgaccgtattttcagtaaggggattgtccctattggtttggaaactattttaataactattttgcattaataaagttgcaatctttgattcaaaaaaataaattgatggaggcacttttttttagaatgggtaaaaagtaaactaaataaagatgattttgttaagatttgaatctttcatctctataatatgtgtaaaataacttaattatcatgtcaaaattaatattatatatatttatcacttttaattataaatatatattgtaattaattaaaatataatattaattctaatttgtgaatacatatattattactaatattatataaattatctgtaattatagttttttttaagaagcttgtggaatgatctctaattgcttttttttttttttggagactatgtttttatattgttaattaaaaaaaatcccaaagtaaaataaaatacatttcttttcttaacaaatcattagtccctttatatattgttcctagtaacttttgacacatatcttgacttaaccaatgcatggtttccattttcccttattaaaattaaaataaattatatatttgtcttgactatattctattggaaacttggaataatgattgttctaacttctaattccaatcatgattccttccaaaataaaataaaataaatccaattatgattattttccatgttgggtagaaaggaagcaaattgatcaataatttattatgatatataggagccttttatgctttcagttattatgtataataaaattaatatacatataacatacatatatgattgagttgattaccttgtcaaaagtagattattggtgaaaagtatatattaaatgttaataccttttatttttgcatttagtgtgatttgttatttaattttagaaatattttctaaaggcaacatttattgttaaataaaaaaatcatatatactttcaaaaagaaaaaaaaaataatcaaatacactccacttttgatttttgcatcggcaattaaaatggtaaaaattcactcatattttttttcttatcaagaaagaaaatattttcactaatcacaaacaaagttataatcaaaggctaatcaagcaaggttcaacaatctacttacaactcacaaaatttgatgagaaaacgcctctcattcttttaaaattcatcagtaaaaaactataaattttataatgaacatctattttaatcttatctactatatgattcacactatgagagtaattataaaaaatgcaagtatttctattatcccaattgtagtatacgactcctccatcacagtcgaaataataccagttttgatctctctcttcgaatcttctagccaagagagccagttctcatcattctaaacctactaaatcaccaattgagtaggggtgttcatataattcataatccgtggttccaaatcccaatcaattcggaccaaactatttcagaccgtaccaaatgaatcttgtataaataatttgatcaatccaaaccgttttatattctctgattcggtcaaggttttaaaaatttcagtagcggttgaaaccaaaccaatccgtataattattattatatacttaatttattattttattcaaaatgttaatatttaagaacaattttaggtagaataattggaaaggttacttgcttaattctattttttatagaccaaatcaatatttagaataacttttttgccaaagttgcccaaattgagcaataatgccagtgatagagagaaaaattcttagtcacctcactcaaagattcacacgaagctttgcaacccacaatgacacgaagttgccctaagggtggtatcagagttctactattcctactttctcaactttaacattatatcaaaattaaataaaattctaacgaatattcaaactaaatttaaaactagtttaagaaatacaaccaaacgaatcactcataattcgaggatattaagcaaaaaataaaaaataatcattatgatcgagccgcataagattgatgaataaaaactaagtaccattttaagaaaaatgttaaaaaatcttattttaataatgcgtgaaaatttactattactaacaatactataagtattttatttatcaccaattaattttgagataaaacatcaaatttttactatattgttctcattctactttctcaatcatattttgacattgtaaccaaggatagtaattataatttcataactttctttaaggttaatttatatctttaggagggcttaaattgaaaattgttctatgagtttagtgtatatagtaaaaattgcatttgtttgccgccccttttggtaatatactatactcttattattttggggtatttgaataatcatcattatttgattccataaacaatttcaatacaatgccacccacaaaagacaaaaaggaagataagtctcccactagaaaagatttccttaaaacaactttatataaaaacactcttctcctcttacttatcaaaaaaaaaaaaaaaaacactcttctcctcttttggtgcagttgtcgattttgagtaatgactttgtgcacaatgagataagaattagaggcaaaataagatagggtaagtcttagttcatttttttctttttattttacagttatttactatcacctgtaaatttttaacaactttcaaactattttttatttttttgaaaataagcgtattcatgcattaaaaaagaaaactgttagcctctcggtcattacaaagtagttcctccgaaacagaggagatcaaaatagaatcgtacaactgtttacaatattaaaaataaaattcaaatattttattacacaaataactattttttcttatacacgagataaacaatttaaactttattttcggcacaataagctattgattttttttttcaaaaacttacagattactctaaataattaaacgtacaggatcatgaaaggaaattgaactaaaaaattcttctgaatgctcaaactgataaagaatgtattgaaacattctttaagaagggtgtatagtaaatttttccaatattaaggtataaaataactaaagctacaaaattataatttctcaagaaaaaggaagatgtagttaggttgggcatggattttttaagattttctcaattcaaattcattcatatgtataagcttttaaacccttttttgatcttagaaaaggggagggtgtgtaagaatcatatgatataccattaaacctagaatccctcaacatgataatttccatcataatacaaagaaaaagttgtacaatagcaacaaatgaagagcaaacatgaaagatattcactaaaacatgggttgtgatctgcatgttgggcaataccactttcccttgaatcttgtctccggtgtcagtccaacacaagcgtaatgaaaccattcgcctccttggcactgtcaacgagcaaaacatgacaatgattataaaaaactcaagcaggaacaacagtgcattatctgctgttatgaatcagaagtttcttcatttgagtgacattaaaagttaagatgagaaattgataaccgataaaaaggaacgaaaactcacattttcattgtcacaagcaatcatatctccaaaagatacctaaagaaacgatataattgattatgttgggttagtagattcgaagtactagataattgggcaaaaagttacatcgaaaagacaatggtaagagatgtgaactataagtcagaacctgatggcaaacacagtaagtaggttcattaggatcaatgggttgctctgcatcaacaggagtggcgaaatccttcttatggctgcctggaggaggcatgagctcaaaatccctatcacgatctcgatcccaatctctttctctataatcaaacctcttcggttgaggtgttccatattgtacatgcttgcgtttttcagcctttgggactaaaggcattgggggaagaatagctggctcatcaggtcctatttttccttctgatagatgaaatcaaaaagtggaaacaaaacaacaagcattagttttgttttgacatcctaaaatgatgaatgtaacccgaaaaataggcaagtgtttcgataaaaaccaactaaaaagtatatctatgtggcttccctataactggttatgattggagttaaaacaacttaagcctcactcaatttggcaataaaagagctactcgaaaaaagggaaaaataataacagaatatcttaagcataaaatttgatacttgtgtattttgattgagttaataataaggcgagttattgacataagttaagtgaatataaacatattaaatatatacttgtatatatgtagaaaactgaacttagataactaggcactatggcaaagatgaatggacaactgatttaagcagtcttatggcaaagataattgcagcacattgtattaaatttaagataagaagtatagtttacagttgtaccttgctttagatcttctgcaaaatgggttagatcctcatcaagtcgtttcacatgactatctatctgaaaagaaacataatacaaataaatttcataagaaggttttctaaaaggcaggatacattgatgcaaaacttcaactgaagatcagtgacaccaatatagttctcggtcatatggcattgacaattcaaattcaaatgaaactattggtacgccaactaataacacaataaagaagtaaggagatagcattaagcatacgaattgatatagctgaaatcaaactcatgatatagaccatgacagcaaaccaaattttcttctttaaactaataacgattaaaactgaaatggttaaagagaactctcattgttctctaatttttcatgtaagcttttctcaatagtgttataatcacaaccatattaagataattcaaacagaaagtaactgaaaaataccctttaccatatcaaattcaataagctttagcaaaatatagcaaaaaaattagaaatagttaagatagaaagaaagactgagcataccagatcataagcttgctgagccaataaaaccttctcagtacaaagattcaatgcattatcttgattaagctcaatatcctttcgcattttctcaatggtagcatcatcatcttcattgttattgttattataatgattattattattattattattataattgttgtaattgttattgttatgattccctttctttgagctctgtgaagacaatcccaaacagtacttggtttgctgtttcgtctggtttatcatagcttcatcaattccattaaaaccctcatcattgagtaaaaattgaaactttatatatacaaacataaagattaaagaaagagagatatgggttgcgtacagtgggagcgatcatcgagttctcgaacggtgttgaggagtctctgaagctcagcgggcaaagtgcttgcgtcttagagagtaagagaaaaaaaaatggaatgagataaattgggaaatgggtagaatgaaattgaaagaggtaaaattgcttacattccaaatagtcatcaacgtaaacaccggttcgtgcaatcgccattaaaggtgctgaaattgaggttttggtttcctagggcttttctctgttcttcgtttgcggattcgaatagagaaaaacgttgcaacgacgccgtttcattcc

SEQ ID NO: 21410 - DNA, 6708 bp, Cannabis sativa
  modified_base (6549)..(6556): a, c, t, g, unknown or other
  modified_base (6582)..(6591): a, c, t, g, unknown or other
attttagtggacagaagagtgtgacgaggccttgaagagcatagaaaggcatctgtcgacacctctagttctggaaaaacctataactggagagacattactcctctacttggctatcttggaaaatgcaattagtgctgcaatactgcaagaagagggaaagcaccagcaacctgtttactattttagtaagaggttactacggaagaatcgaggtatccccctcttgaaaaacttgacttatgcctaatccacgcatctcgcaagttatgaccttacttccaggcacatccaattaaggtgttaattgatcaactcctgagacaagttttatcaaaaccagatgcttctgaaagattgataaaatggccaattgaactggggcagtttgacataacttgtcacttacgaacattcatcaagagccaagccttgacagatttctagaaggaataaccttaaaggaaaatttgcttgttcagcgagatgcagatacttggaagttatatgcagatggtccatccaatgagcatgcctcgggtgtaggggtgatattaattttgccagaaggcttctagtttcactatgccttaagatttcaattcgacacgtcaaacaacgaggctgagtatgaagtcttgatcgctggattgaagatagctaaagtgttaatggttaaaaatcttatatgccatagttattcgcaattaattgtaaatcaagtactaggggaataccagtctaacagattaaaaatggcaaagtacctagaaaaggttcagaagaacttggaaaagtttgattatttcaaaatcgaacaagtttcaagaaaacaaaactctaatgttgatgccttagcaaaactggcctcacagaatgaactggatgaattaaatttggttctggtggagatgttaaacgagccaagtatatatgagaaagaagaagttgagatgatagatatctcacgtacctagatgacacctatagttaactatcttctcaatggattgcttccaattgacaagaacgaggcacgaaaactcctgtattcagtgcctcactacacgatagtagagggaaaattgtatagaaggggctattcaatgcctctcacagaagcaaatgagatcatcagagaaatccatgagggcttttgtggggaccatgcaggttggcaaagcttgtcaaaaaagattatttgacaaggatattactagccaaccataaacaaggacacccacgaatttgtcaagaaatgtgataaatgttagagactctcacacatacttcgcataccaccaacggaactgagaatgatgacctcacctcacccatttgcaatatggggaattaatttaattggggcacttcctacagggcgaggaggagcaaagtacacagtggtggctatcgacttctttacaaagtggacagaggttgacccactggtatccataacctgcaaaaaagttctcgactttgttgtaaagaacataatctgtaagtttggaatacccattaagatagtatctaataacggaactcagtttgatggtgacttattcactgagttctgcgaaaggaacaagattattaagagcttctcatcagtgtccaggcctcaaggaaatgggcaagtagaagttgttaataaaaccttgaaggatactatccaaaagaagttcaacgctgccaaaggtagatgggtcgatgaactacctcaagtactttgggctcattacgcaactgagaagacagcaacagggcactccattctcattagcatttgtcttggaggcaatgctaccggtagaagtaaatatcgcaacacacagacaaaatttctataatcaagaagaaaactaagaactcttaaaattttccttggatctactttaggaaaaacgtgctgagtcacaaattactaatgcaacatatcaacaccgagttacgagatacttcaacaagaaagtgaagaagaggctcttcaacattagagacttggtgctaagatgagtatttgcgaatacaagagacgcttctgcatgagcatttaatctaaactgggagggtccttatgtaatcgaggcaatagttggaaccggggtttacaaattagctcggctaaatggctcgctgataaagaaatactggaacatggaatatttgcgaccctactaccagtaaactgatgttgtaacttctatttctgatgtaatattttgaacatcaattattaataaagttgaatcattattcaagtaattacaaagtgtcatcctttataattacttgaggggcatatgtatatgcttaaccggaatctatctagaaatacatgatatattgcaaacccactactttataatttgttaaaaaaaattgaagtttttgattaaagaacctttcccacgagaaatgaaaattaaaagtagcatttgtaaatgagatataactcatagaaacaacaataagctacatacgaggttgaatactaacaactcgcattttgtaggaaagtattaaacgtgacaccaagatgccttgaaaaaaatacttaaacctaatatatgaataaaaggcctaacttgtaaaggccgcttaagatcaatatgctgagttgttgaataatttggggttaaatataaaattgaaatattaattatagtattgcatattggtgaaaatttatttaatttaaatatatgttaattatgttatatgtgaatttcttgtttacctgtgactatgtttggaaacggtggaaagcgatgttgggctattagagagttgaattttgtgttatagaattttattaataccggggtatcattgtaaggcattagagtgtcggtaaattgtcagagtttaaatgacaaaattacccttggtggacatggtagcttttattttaaatcaaggggcatataggtcttttactatggggtttttgtcttttgtagacactattattaggatcattatattaacccaagtaattaatattagagattcatttaatttgaaaaaaaacctagaattctctaaagtctctctctttctcttttgaacaacaagggaaccagctgggaatttgttatgtttagctcaattttgtgtcatcctagcagattagaagactctaattcaagctatagtatcctagccctcttttccttgatttttttttaactcaaagtaggttttatgcatgaactttggtactttggttgctgtaggttttagggtggtttaatttcatgtcttggggttagattaggtttatgttggttgatttgagctgaattggtaagctttgatgaggtttggctaaggcttgagttcaagaactcaagccatgccctttaatggtagattgaatttccgtgattgttgaggaattctattgcttctttatggttcatcatagtgtatacaagtattgtagagattattggagagtttggggtttttttgtgtttagggggtcaattttagggtttccctgcactaaatcggtcaaccgattttgtgggacatgagtaatcggtaaaccagttttgtcccttaggaaacccagtgaaccggttaaccagtttgttggttggggtttttccaggaccctagttttccccaaattattgatttttagggtatggtcatgtctttcattgatagggttattcctagtttgattttaaagtccgtaaaaagtgtttgagcgtgtctctcaccaaaattacaaatgatgtaaattagggccccaagaaacatcgagctgcaattccactcaggctgaccggcacacctgaacacagaaatgaggtaagatagcaaaaagcatataaatgagaatgaattcatattattatttgtttacactactaacactaacaatgatgtagtttaacggtgttaatacactgtaggatcttagagtagttatggtgttaccaacacgagtacagaattggtactctagtgcatgtggtacaacactcggtaactcccgggagtataatttggccctaccaacacgagtacgaagttggtactctagtgcatatggtacagtggtcaaccctaccgacacgagtacagagttaatgttgtagtacatatggtacagtggtcgtacatccattaagttcgctctaaatcatttggtaagctcagttgttgggctcaggacagcttaatcattaagtcgctatagcatcgcttatttatatgttatgcatatccaactgagtccattgactcatcagtttgctaccttgtgtaggtaagggaaaggctaagcaggaggagcagtgagttagagcttggcaaggattgtacatatcgcaacagtgcaacctggagggtttcggtcttatggcagtttgaactgccttgtattttgtaaaaaaatatattacataactatatatagtaaatgaaatttgcaactgtgttttaaaacttgggatcccgacctataaggtcatataattataatataataagattaaatttggtttagcaagttttcagatacgggggttacagtttggtatcagagccaccaggttattcactgaagaccgtcaagagatgtacaatcaaggccaatgtcgagctcaactcgcggctccgtaagttttactttttagcaaactatttaagatgtattgcatatatttgtgaaatgttacataaactctaaagtggtattaaaaatactttgaccattgtctaacctacatgccttgtgggtttgtaggctaagtcctaaataatggacgcccggcgaaacattagaggacagggtgaaatgaatgagaccaaaggtggtcggggtgttagaaatccgcaaaacccccatggacgcagtagaggctgaggtcgtgctcctagagacggccaagagaatccaccccaagctccatttgattgggagccgaggtttgctgagatgcgtgccagaattactaagcaagaagaagagattcaaagactgaggcagcgggatgctcctgttgagcctcccctacaaccacctgctgctatggctcccgcagtgccaacagaacaactttatatgtgtttaaattctattgttttagaaattcatatttaggatgttaaacaatatacatggtagtaaatcttgatcctggtaaaataatccccaacacttgacatctgataaagagaagtttgtggtttactgagatgcatctagacagggtttggggtgtgttttgatgcaagccaattaggtcatcacttatgcctcccgtaagttaatggaatatgaacagtgatacccaactctcaatttagaacttggggcagtagtttttgctttaaagatttggcggcattatctctacggagagaagtgtgagatttataccgatcacaagagcctcaaatatttctttacctataaagatttgaatatgtgggagagacattggttggagttggttaaggattacgactgtgaaatcctttaccatcctaggaaggccaatgtggtggcagatgccttgcgcagaaagggtcccggacaggtgactagtatgattaagatctaacctcacctagtgaatgacatggttagatcatgtattgagtttgttgtaggaaaacttcataatttgacgttgaaatctgatctgctggactaaattaaagctgctcagttaacagatccagaactggtaatgatctgagaagaggttttagctggtcaagctaaagattttacggtgtcaagtaacgggatgttgttatacaaaactagagtttgtgttccaagtagtgtgaaactaagaaatgagattcttgaggaagctcatattactccatattccctgcatcttggcacaaccaagatgtatcaagatttaagagctttatactggttgtgcgggatgaagaaagatgtggttgaatttgtatcccagtgtttaacttgtcagtagattaaggctgaacattagagacctgcagggttattgagccacttacacttcctgagtggaagtgggaggatgtcaccatggatattgtggttgggttacctaggaccacgggaatgtacgattctatttaggttgtggtagattaattttaaaatttgcacatttcctaccggtgaaaataacctttactgtggatcagtatgcagacctatacgtgaaagagatagtgaggttacatagggctttaaagtccattatatcggatagagattcgaagttcacctcaaaattttggcagagtctccagcgggccatgggtactaaactgaagttcagtacatctttccatcctcagactaatggacagtctgaaagcacaatacagatactggaagatatattatatgcatgtgtgttagatttctaaggctcttggagcaagtatctgttgggttttgtgccctaaataaaacccattacaatctgattagttatcaacataagaaattgaagtgatttatgtttgcatgaatttcacatacttatgtttaatatgtttatacacaaaatnnnnnnnntccagaacatatatttattcacaatnnnnnnnnnntcaacacagtggaatgtgattatgcgtatctgattcaaaagactaagtccctgtttcattaatgttttggatttacactaatgtgataatcagtgatgatgtgtacttacacttgga

SEQ ID NO: 21411 - DNA, 3386 bp, Cannabis sativa
gtggttagttgtatctttgctcagaactgttggagaaaactatttcgcgccggccaggacagtgtagaaggtacttttgcagcatgatttcggcgaagattctcttacttggcttcgagagatgtcgagtttttgttgggcagcttggtttcgacaaagattctcttacttggcttgtttcaaggaagctcgtggcgatggaagactacatgattgaagttgcatcttttactaaaaagaaaaaatgtgcattgtaaagcctctagaattgatttacttgtaaaattcattttcaagaaaggttactacattcattgtgaaaaggttacttgatttaatctatttgtgtccttgtcttataatctaatactttcttatataataacacaaccactacattcatggttagctctctcatatgtttcatattcccttaaaggcttctattagttatccatagatagtataagttcatggttgatgatgatcatatatatatataaatatatatatatatatatatttacaaccaaaatgccatcactacccttttcacataaagctttcaacaaaagcctaccaccccaaaaaaaccagaagattcaaaaagatacaaactttcttcttttcactcttctgtgactatcacagcatccttctcttcaaacttaactgccaccaaaaaccttatagaaacctatcaacacacaaaatagaggaaccataatcacaatcactaatcacaaacttattagaaaaagatcaaacctttaatatttgatttcctcatttacctgttttgggtcataaactgcatattcattatactcaagtgaactatcttcatgctctgaagggattaaactcccacaagggactttgatatctccttcccaagtcaagtgctctgattcatctgttttctttctacctaaacctttcacaccaactttcttctcttccaaagactttgtatcctgtttttgtcaaatatttactcaaatgctgaaatgttcaataagaaaagagaacagtatatgataattttgtttacctcaggtgggcttttcacttctgtaatttcattccctaatgaagctacagccaaaaccaagaacccttctggtctatccactgcggtgtatccataccgagctgcttcggctgctgcatcagaacaaacaatggctttcccaaactgaaacatagttttggcaatcatcagtttataaccgaaaacaatgtactcagagaagatgatggtgttaaagagacattaccatgtatcccggaacaggaagagagcatactgctggcaagaaaccttgatgcaggtgccttaacatgttggaacttcttgagccttaaaacatatgagaagaaaggatcaacaaagtttagagctttaggattaaatgacagaaatatttagtcttttatgttcataggctgagtggtcttagtgtcttcatcctcatttagacttagctcggaaatagaataggagataacaatcctcaatgagcctcttgaaaactcaatattgtaaggcaaatgttttagtgagagtacaacataagagaagaaagggctaataaagtttagagctttaagtgttgaagataaaggttttagttagtgagagtatcttaccacaccataataggactttgtttggaagtttcttcatttcttcaagagaaggacaagcctttgattcaactacaaaaatgttctctacagaaacaccatattcctgaaaatcatgaaaccatgtaagagtttgttgtgtccataattttattgttgaatacaagttcttcttttgataagcttacaatgtcaccaactttaacaggttcataggtcttttcgaggtaattcaagatcatcatataatcatctgagtttttctcaagtggagagattgaacaacccaacttcttgtatctatctgataaaggatcatcaatggtacctccactcatgtctcctatgagattcgatgctaccgttatgtcacgaacggtctcaaatgcagacgcagcctacataataaagacaggatttttataagcaccgaaaagaggtttttgacaagtacaatggtaaaatatctttcacttacatgatctgcaagttcatgaaaatccctgaaaatgaaaggcctagtagaatgcatgagagtaaaccatctttggctgaaatcagaccaaactgcttcagcctttctccccgattctcgcattgttttcacggtttcaatgaactccaagagcacttcctcacatcttttcaagtgaagatcagtaaccattcctattggcaggtcaggagagtccaatcccatctccataaaggcatatctgtactcaaaataacaaactttttagactcttagtacacgaaatcgaaaaacaaaaatgaagcaacaagaggtaagttgttgttacttgtatatctcttgactgcacattactttcatcaaattcgcaacaagaggttcgagtctgcaatgtgttacagcgattcctagctgccgaagacttagagccccgtgccttacttctactccatcggcctatgcaataaggtatcgaaaaaggttaagacaagcaagattcacaagaaagaaatgaaaatggggaaaacttttagtaccatatcgatgggatagaatttcaatggcttcttttggatctttttctctctttcccatggttcaaactcgttgccagtaacttcctcaaacatcctcacaaactccttcaaagcctcatctacattctcccactcttcttgcctttcctctgcattagggtcatcgccaacttttcctttcttgtaatacaaaaagagacggttctcgggcaccatgatcagctgcattatgcagtaactgcaaaattcggggggcaggagttaaacaacgaaacactattcgattcccacaacataaaaataagaactttatagtgttttctttactgatttagtcctcgggccatatcgcaaagggaaaaggcgcagttgtatagtaagccatctttctcaaagattttccctccttgttcttgcaacttagtatctttgtacactcctctcttcccgaaaagcttgagctgtaagtaacccgaaacaaacaacattattagtatcatcaataaagttctgatttttagtaaaattgcaccaaactttacgattcatacttcagctgagattgattctagtgcttcttcacttggatcttgtttatcccaagggattccttttccatccacagagagatcagacactatatcgtaagactcgagaggctgcggttcttgtttctcaatgctatcaaccaaccattcttctctcacaacaggtatgcctctttc

SEQ ID NO: 21412 - DNA, 5708 bp, Cannabis sativa
gcttgaccattcatcaacgtctttggttgttttgtgatcacggccaagttctgatcatgagatttcagacttggggcggccaatagtgttgttgatgctttatctcgagttcccataatggcatgctcagttctcacctctaccacttggttaaactgggatattgttgtggaacaacgtctggtgacacctaacaatcaaaagtggctggttaagttgcttggctattattttgtagcagcatcggtccaactaaagcgatccttcttgcatcaaaacagcttcgattccataaccgaagcatctgtttccaccacaaaagttttagaaaagtctgcgagaggaaggaccggtacctttgactaatgcgccagctaccttcaaggcactcatagatgaattttttaggccttttcttcatcgttttgtgttggtattctttgatgatatccttgtttatagtcctgatgaagctactcatgttgagcatctcaacattgtgttgcaaactctttccaagcatcagttatatgctaatatgaagatgtgttgctttgctcgacgacagttggaatacttggggcaaataatttaatctaaaggtatgacagatgactcgtctaaagtccaagccatgctagattggccgctacctcgaaccatcaaagaactccaaggcttttcgagcctcactggttattactggaagtttgtggctgggtatggcaccattgctcaaactctcactgatcaatccaagaaattcaacaagatgtctttctctctcgggttcgagctgatttagccaatggtactatggtccctggctttgccttggaacatgatcgcttggtgtatcaagggaggatggttttatctgttacatcaacgttaatcccttcctttttaaaaaagtatcattgtttaccaattggcgatcattttggggagtctcacacttaccaacaactttgtggtgacgtttcttgggttggtatgaagcggatggtgattgagtttgtaagggagtgtgaggtgtaccaagaccataaacaagtctcctgctagtttgttgcaaccattggtgctacccgagcagggttaggaggatctaactatggatttcattgaagggttacccaaatacaaaagtcttgacaccatctttgttgtggtggatcgtttgagtaagtacgctcatttgatattgctgaaacatccatttgctgctcgaacagtcgctgaagcttttctccataatgtggtcaaacttcatgggttgcctaagtatcatatctgacagggatcgcatttttcttagtcacttctggactgaactcttccgtctccacgatgctaaattgaaacatagtaccacttatcaccctcaaactgatgggaaaacagaggttgttaactgctgccttgagacttatttacaatgcttcgcttccaagaaaccaagagtttgggccaagtggctagcatggcctgagtattggtacaatacttcttttcactcctccttaggatgtaccccttccaaggtattgtatggaagggatcctccttcactggtttaatattcttctagtaccactgctgccattgcagtggataagcggttagaagagcgagattcctttctagatgacttaaaaatgcatttactcaaggctcaagaaaagatgaaatcttcagatgacgtgtctcgtcgattggtggaatttaaagagggcaatcctatgtttgttaagttgtgaccttatcgacaaaagtcattggctatttgcaaaaatgagaaacttgctactcgtttctatggtccctttaaggtgctgaagcgcattggtgttgtcgcctatcgtttggatttacctccatcttcagtagttcactcagtatttcatgtgtctcaactacgagcagtcattggcatgtcgcactcctctcctaccttgccaccaactctaacaacggatttggatttgattgttgaacctattgcaattcttgatgtgcaatggagcagactctaattctgtattgaggtgcttattcagcgaaagaatctgcctttgttcgtagccacttggaaaaaatttgacaccatccgagctcaattttcgacatttaaggacaaggttaaagaaattgtggggtggggtggggaggggggtaatgttagacccttggttcgcttcacttatgctaggagaagtaaaaggtctcactagaagtaatttagagaagtaaaaggtctttagtatatttattgtgtgattattgttggctttggtttggcttggtgagtgtgtgagtgctatatatatgtgttttgagtgttgtagtgggtatgcttgatctggttgtttgtttcagcatcaataggagaggctcaggctctcgaaacctatggagttgtgattgtgtgaatcacatttcatcaagtttttccttcatcatccctttcaatactgaaacacatattattcctattactattatattatattatccctttcatcatcaaatcatatcatcgacagaatggatatcatatctcatttcgctttctaaaacatgaaatgtaaactaaagcaaataactaattccatgaatttattgatattgagaaatccaacaatacacatggaaaggtatatatagatagcattgtcaaaattacatacagcagatgatctcagctgagtatccgccatttcattgtcatctccaaatccctcagcaatcaatctcatcaagttatgtgccacctttacattcacaagatctccggcatgctcaaagactttattcattgtctgtagagcaaatatcaggcatgcaaagaattacaatatgacaatgaagaaaacaattttttcccctttgttgtgccttcataaatagtaaatcaagaatggcgaaacaaattacctgtataaaccaaatgttactaggtgcaaattgttccgcaagttcaacacatctagatgctatataagttttgtaatgattatcattaatgcttatcatgtaatcaatcatacggtcaacaatcacttcaacattggaggacttggtcattttgtataatagtccaaacgttttccgctttagagtatcatccgggtcctgattgttcagatcgagattttattagagtgataataataagtatgaaaagtaaaaacaatcatcatgcatcaagcgttgctaacctctaagcaatcaattacagccagttgatgtggctcggctatatcgggactcatctttataagtcgaccgagagcgtcaatgcccatatatttgagattatgactatcgctctgtgaacaacaatagaaattttgaataaaagaaactgtaaaattggaaaataactattagatgcagtgcagtgcagtgccttacagaaaaaaacaactaagaaacccattatgacaaaccttcaaaaatctggaaatgacttcggtggcatcccctaatagcttggtattaggatatatggaagaaacacagcaaatggactcgtaaagtacagcatttcctatattagtagatgaatcacatttgcggaatatgtctccaacaacagtgtacatcttttcgctagcttgcttatccccaattccaagcaacgctagaatcttgagcaacttaatctgcatgcacagctctctaagtaagtttataatgaacaagtaagtaccaacttgatcttgagaggaattggttttgcacctgaatgaagggggcgggcaaggcatggtagtcataagctttgggcagcctgcgctccgccacctgcttgagaatgctgacgaagctaactaccaagtccttgtaagagttgggatcggtgatgataagatcatagagcggacagagtgtagcacccataactccaggatcattgtcacagagtcgcttacggaaattggtgagaagatgggaaatggaagaaggggatttgtggtggaagcgatggagggccataattgccttcttcctgacggcctctttggggtgagcgaggaggtcgacgacctggggcaaaacggcggggatggtctcgtcattgatgagcttgcagacggcattgagagcggcacaaacaacaaggtaattatcggaacggagatccttctggatggtgttgacgatgagaatgatgaggtcgtgatcgtcggagaggaagagagtgacagcgagatagccagtgcgcttgagtagtagattgtcatcatgagtcatcttgactgcgtggatgtaagcgaaggaggcatcgtgaccaagcatctcgacatagacgagacggatgaggtactccttcatcttgcgcttggggatgtcaggctcggtgagacggcgcttgagtgtttcgatctcgtgaagaacgatgcgatcctcttcggccttggatcgagcttctccgatcgacttgacgaggtcgagaaactccttggattggccgaagccaccctgcgatcccatggccaactcccgccctatggtcttcaattgctccattacttactgtactatgagtttctagggttttacagattggaattggaatccaaaatcattccaacaattcaattgaatctgaaatatgtagatctgaattcttctttcgattctggaattgtaaatttagaataagtaggtatgttccacgttttattttgttttgttcttttgtgaaaaaagagagcaacaaaaacgagttcacagttttttacttcgccttaccacactgttaatttgttaactacggcttttcttgatttctttttagttcggttggacaaatgattttcttgctgttatttttttttttttataacaaaatttttatgaaagaacatcaaccaaatagctcaaaaaacaaggtctaagtgaaaacaacactaagatatctagcagtcctattggcgaaagtatgagcatgagtgttatgtcttacacaagatgacagttgcactctgatcatcctcttcatcttgtttgattggcatcgtccaagaatcatgaaagaagcgagtatcaatataaactttcgaacaagacattatcaggtcgactttacaaaggttctcagtagtaaataaagtcctcccatctctttcccatccatcgatttcaataagcatggcatttgctctcctcttcatgtcaatcagtggagtatgtctcttgaaagggtcggctttttgaaaggttatatgttcacccatggtatagaaatattcctgctggtaaaggctgttgttacttttgattatattttttatatatgtactaaatcggtggaagtgatagaatccctcttcttttcgagttggacttcttttcaagtcacaaaaaaaagttgatttcatggggaattgggataggccaatttgtgaggcggtaaaaggtgaagaaggtggacaggattgaataaccatttgggttaatctggtagggacaaactgttgcccaaaagttaatcactcacttattttgatgataaacaaatatttaattattatttgttactaatcttttcttgatcattttgcaaccaaatcacaaagtatcaatgtttactcggtaaagtcaaacataatcaaagaagtggattcaacaagtatatcaactacttcgtacttgataagagcaaaagattcatgaagggatcaagaattcaagac

SEQ ID NO: 21413 - DNA, 4071 bp, Cannabis sativa
tatctctggaacatgcctaacatgtttccattctacaactcctccaccttttaattatagtttgagcctataccagttatgggacatgatttattgtcaccaactttgacagtgccctcattaatcttctgataatcactaaattgggactgttctgaacatatgtgaaaggagcatcaagaattgagtacccaactagttcttgagccatctgtagacactaccaacacccgtacacttccataactatcactatcacaatcaaaaaccaaatcaacatcacctgatgataatttctgattacaattcttgaggataggaaagtctctcttaaggtgagtggtcttgttgcacacaaaacatttcctcttgaattttgagtatggcttgccttgatttttactttgtcatgtgtgttccttgttccctttcttggaattcttttctcaaacaaacaatctttcaccattgatgtcatccttttgttctgacttatttctctttaattctttcgacattaaagtgttttaaatctcttcgagtgtcaaagattctttaccatacatcatggtatccacaaaatgctcataactttccgtgggaagagagttcagaactataatagcttgatcttcatcttcgatcttaattccaatgttctctagatcaagaaggatcttgttgaagtcatcgaggtgatcttcaatattttttccagtcagcatcttgaatgagtacaatttttgtttcaagaactatctatttgctaaagattttgtcatgtagaggctttccaactttgaccaaacaccagaagctatcttctccttcaacgcctcacacaggatcttgtctcccaagctcaaaattatggcactgtgagctttgttgagcatttccaccttctctttctctgtcaaagttgatattagattctcttctcccaaaagagttgcttgaatcccctgttgaactagcatttccctcatcttgaccctccatagaccgaaattgttctttctagtaaatttttgagatcttactttgcactgcctattttcttagaagttcattagattcttgaactcaaatcaagataatcttcttcgagctttgataccaattgttggatttgcaatcccaattactatgatcaaaactcacttattagccctcgagaacacttggcagtaattccaataacacacacaaaacaaagactcaactctctcacatgaataaatatagctctcttatttattcttaaagtgtttacaagatgtttgtttttcattgatatggattgaacctatttatagcgataggcctaaggatacaatttagatggaatggttaagttcattaataattaacttaaccgccactgtacctaactaaatgtacacgtgtaaaactaatccaatacatttggagtcaacctaggaacctacaagattgatttctattattatatgagttacactattgattagaattgctaaaatgtaccaatggtacctagcaccatccttagtgtcatatcactagctagtggtataattaagtatcagatctcatataactttactaatgccctggaaaggacattccacatataattgtgtaagtaaacttcattgtcaattatcatgtcagtataaaaccagtgaactgataaatcatggactaagtactttgaagcatataatcacaattactttctactgtgatgacatcactataattatgagtaactatatgttctggatttaatagaatttatatattattaaacatataatcataaaagtaattatgtgaaccatgcaacataaaataatttttaatcttttattaattagtatatcttattatattgaaatggattttatttagggcgtaaaattctaatagttcacttcgtgtatcacgatggttttggaactacatttacttcatgttttattgctcacgagaatacaagaaaagtgactaaggtaaaagtgttatatttctagagagagatgctttgactgttttctaaatgtgaaaaatgaactagtggagctctctttttataggaaagtattaaaataataataaaatatgatgttgatcttggtcgttaatgatgatttaatggtgaaaataactctggatgatgatcgtcaaattttggagctcaattcttgtatgctaaatcatttttgggtaatttgtggaaaaatggggcttatcttggggacaaaatttggacttaaaatccttagaattgtgatatgggtgtgagacatgatttgaaagagctttgaaagacacgttggatcacatcaatcatatcaatattaaggtagttatggctattttatgatagattgttcagcacctagcacccaggttgacatactgacgtcaacctggatgctgtgtgagtgaaaaaacaacctagacttgtattttttaatgaatgggtgatattttgtcatcacttagccaatttcttagttttggtgaaattgttcacgagttctcggagatgtcatttttttgcaaaatcaggtagacttaaaacttcccgatctgtgagtaatttgtcgattctactttaccaaaaatgtgaaatatcaaagtgtgaatttcaattgtcacaagtcgtagctcttgtttactacaaaaaaaaatagttagatgcttgagacaaaaccagaatcagataagcagaatccagtggatcaggctatatgtcaacctaggcattaggtgctcctcaggaaaatttgtgaggcttgttttgatacttctaaggaatttgagattgtaaacggggtctcctaccccgattttgaccaaaataagaataatggccaaagcaatttttttaggagtgaaaacatgtgaagcaggccatacgtcaaccttggcgtagggcccagcacccatgttaacctaggtgttgggggcctgttttggctcccaaaggatcttgtttgctccttgagatcacttgtatctttgttatttcaaaaaactgaaaagatacccaaaatacttttctgagaaaacacttggaactggcacaggttgacaaaatgtcaacctgggtgctgggcccatgtatcagatcaatctgggcgctgagtcctaattttgcccactagatgcttccattttattccgggaaacacttgtatctcaattatttatgaaaacagagaataagcctggaagaatttttaggagaaacattttgagatggctcaggttgacaatatgtcaacctgggcgctgggtcccaattctgactcttagatggctccatttgtttcccgaaagcacccatatctcaattattgatgaaaatgaagaatatgcccataagaattgtctgaatttctgttagaaatggcccaagttgacaacatgtcaacctgggcatcgagacctagcattaggtcaacctgcacatcggtcccaattttggcctccaggttgatctatttctctcccgaaagcaccttattcctcattttagatggagaaaaataaaattcttaggataattcttcaatattgtggttgggagtgccccagatcgacaatatgtcaacctgggcattgggtgcatcaccaagtggctcgggcaccgggtgctcctaatggaaagtgttctaattctaatttcggtgcctctatcatgtttgtgacatgtcttttccatgcataagttttcaaattttgagccattttcactaagattgacccaaaaattaaaaatctagttgggaatatcaacttgggtgttgggttaaaaccctaggcacccaggttgactttcagggtgatgttttgtttcttttcagtttccaagcctcaaccttggattcttcttatcttcttagttcagaataatgtaggatggtaagttagaaataacttggcaatcacccattccagagttcccagagtcaacttggcgtggggctagggatacctcacaagttgactgctatgactcgagactactcaaccccgtgaatgttttccttcttgtatgtccacgtcaccaaggtc

SEQ ID NO: 21414 - DNA, 3347 bp, Cannabis sativa
  modified_base (1062)..(1064): a, c, t, g, unknown or other
tccggttgaggatttaagtgttgaacacatgggatgcactaagcctgataaagagtatatcccaccaacgaaaagcccatgattctttaagaaaatcataattaagaaaagttgcaataatggataatttgtcctaaacggaatgtcctcataattgataaaataataataaaaataatgttaactataacaagtatcaactatgaggaaatggaaaacagagtcacatgacatactcacaaggtgaagctactgccgacgcacgcacacaacctatgtcaactaacctctaaccaaatagaccctaacatcaaatggccccatacccctaatctccacatggtggtcattgactttttttaaagtttttgtaggaagactgagcaattaagcaattaggagaaaatgaagtgaaaaacagcgtgggaaacgaagaaaaaacaagtgagaagatagagtttatatgatgttaattagttttcatgcaattacggtcccacatagtttcagattttatatatttcagtggtactagagtgcacacgatattatggcatgggatattttaggatatcactattgactaatgtacaacttgactttacacccattcagagtaaagcttctaacttggacctttttttttaagtgctcagttacaagctacaaacctagagaggtaaacatcattcactaattacccatttgagttagtttcaattttctaataatatttcagacattaaaacaatattttaataatataggaatgcacagtttttttatagagacggtctcatggaataatggggtgagaattttccatctaaatggagcacagggcaagaacagaaaccacactcactggccccgaggacctgggacctgtattttttcttatatttttagtaatatattataattcataatttatgtttgcttgtttaagtatattaatatctttttataaattttaagttatgttttggataataactaatttattaaataataattaatgtgtaatatgttttcatttaatttaatatttttatatatttnnntttttattataaattttattttttattaggagatttaccatcttctctccgcccccaacctcaataaagaataagcagagattgaattaaaatctttaatggaaatgaggatggccgctaattactcagtgggtccctaaatatagacccgtcaatcatgcatggtcataatagcagttgtaaaagataaataaataaagattgtttactaattctatgtatataacatctctattacaagtctataacaataacaaagaaagtaaatcatttgagatctgatgtaaaaaaagaggtatatatatttcactaagccagtaactaaaacccaaatagttccacatgctctttctcaagcaaaaataatgacaatatatttattttaatcttgtaacaaactacaataaccaaagttctgtgacttgtaaaataattttcctaatccttacttggaaaagttgggatactttgttcactcctgaagaaattttgtggatcgacagcagtcttcaccttcaccaacctatcaaaattctcaccaaagtacttgactccataaacctttccttgttcatagctgtctttaacaaagttattaacaccaatatctaagtccctgtaattcaagaaagcacttctgggatttttggacacaaatggagtcatgtaactgaaaagtctcctgacctcagtagtataattcttctgtaactctacactagggtcgttccaattcaccgagtactgaatcttaaacaagttcccagctctgtgtgggaaaggagtctcagaaggtgagaattcgttcattttcccaccatatggattgaaaacaaacccagttttgcctaactcgatcatcttcttccatatccattcaagcccatctttagaaatcggagtctgaacataatcagattttctcaggccaaaactagctttgttaagatttcgatcgaggagcacatttggtgaggttccaacatcaaaattagcccaccaaagaacagaatctatccaactcatttccatacaatccttcttctttaaacccaacagaggaaactccttacccaataacgacaccaattcgtttgcatttccaagatactcagttatgatcgaaattctaatcgttttagtacctttcttcactttggaactgatgggttgtaccaacattctcatgaaaaggttgtcgtctgtcgtgggcgccacttgttgccactgagaaacgacatcagtcacgttctggccttggtccaatattttctccactctgaaaaccgtaacggtttcaggaactggaactaatttcaaagtgtacgacaaaacgacaccgaaactcccagccccacctcctcgaatggcccagaaaaggtcttcccccattgattttctgtcaagaatatctccattaacgttgactatctgagcgtctaggacgtaatcaacggccaacccatacttccttatcatgttcccgtacccaccgccggtgatgtggccaccggcaccgaccgtggggcatattccggcagggaaaccgaggactttactcttctcccagactctgtagtagagttcgccgagtgtggcccctgcttgaaccaagaccgtctggtcggcaacgttgacggagatcgatcggagttgaaacatgtcgagaatgacgaacttttcgtcggagacgtaagatcttccggcgtaatcatggccaccacttcgggttttgagttggaggccaatctgtttggtacagagcaccgtggcttgcacgtgcgacacgtgcgtggccgtaacaatgagaaggggtttgttggtggaggaggtgttgtagagggcgtttcgaatgtagttttggagaactgagttgtaggacgagttggattgggagtaaactgagtcggaaactcggtcgctgagttgtgtatgattctctaaacaattgaggaaagtagtgtagagagaatctgaggctgttgataaggcaaagagactaagaaccaaaaggataggaatttgaagcattcttggtttccccattttagccctttttggtcagttttgggagtttgtgatgtttttttggttctatattggagtggtttatataaaggacaattgggcatctatgtttattaggttttatttttcttttgagtacataggtttcttaattaacttttctatgttcaaagtttttgactcaaaattttcaatgaaccttccttgtcgattgtaatccactaatcatttcctacttttcttacaatgctttaa

SEQ ID NO: 21415 - DNA, 2929 bp, Cannabis sativa
atctatattaataaagtatttttttcttttagtggtgtcaatattttttataagtagcattttatagttagttagcgatattttttaaaaaaattattttcttaaataatataataacaatataacactcacatatctcatattaatattattatatcgtgtatcatatatgttatcgtctataagagggaaaaccatgtgtctctctcgagccccaaaatccgtgtattctttctaacaacacatactgtacttgactattattctatattcaattctattgtaataataccatttcaaaaacaaaataataataaaaaaaattctatgctaatcgatggttgtgtatatatacgacaaatgtttgatagacatagatgagaccatatgcgtgaggtgaaaaatgtgttaattaatgttgcataaaaaatgttgcataaaaaataaatgaatgttatatttaacaatttttttttgttgttgcgaatttacataaaaattattatggtaataaattaaataacatatattaaaaaaagagtatagttaaaatatatgtcaagttatcattaatactaaatgataatattaccactccaattatcaaatatttttatcattattgtgagaagtatttaaacaactctaaaatataagtaaacaataaatgatcaaaagaaaaacagcgaataccttgcttacaacagcaagaattcaaaggagattgcccagaaaatagaacaaatgagattataaaatagttcttttaaaattattaaggtgttgttcggtaattattaaaaaatcaaatttttgattaattaatcaaaaactatgaagaaactataaaattttgttaagtaaaattaaaaaaaaaaataaaaagcaaaatgattccagaacatgcctttaaggtttagaattatgtttttagaagaataaaactgagaaggagctctgaataaaaagtgaattacatcataaaaatcattaacctagtttcttttctttctccttatactcatttaattttcattatgtcaataattgtgattatttttatggaatagtttttcttaggttaagggctattttaatgctatgaacatgattattattgattaataatatttcgattcctttcatttcgattgattgaattgttcatatgtttatgaatataaagtctgatttttgtcttgttcttgtttggatggccattgaatatgataaggtagtgattgattattattgtaaaattcacctaatagtctagggttctaaattgttggtattgatttcatgaaaactgattatgccaaagtagttcctaaattgtgatgaaacgtgtggcctaagttaaatagattacgcttgttgatttattgcaaagaagaatctatctctattaatcttaatgctttaatttgttgaatcaaattttaagtacttttccttggattgcttagttaaaagaattagttaatagcgcttttcctttgattgatttacatgttagagaatgagataataatttcttttgtgttaatatgtaatgaagagtagaaatatcgttaaatgttaaattatgatatgattatttagtggtggcaaattagttcttaactatcttttatcaaagttaatatcaatatttaatagttgccttgttcttttagtttatgttttttgtgcttaaatcggaaaaaaaaaaaattctcttttaaatttttatttataacttgtgaataatagtccttatgggatccacttgtatttactaatatactgaaataattgataaatttaaaagaaataattagtaaatttagtacgacttacgacacgcatcaatacattaatgataaacttgtttggaaacttgagaagtatggcttttactctgtcaaaagcagtattggttagctaatcgagatgctaagaaatttgattacttcgacttatgttcgtatttcttgctgatggcaaactctttggaacctcaatttatctccaaaaattaagagttttacttagaggttatcttccaattggattctcaatgtgatgaatttccaaaagcatggttttcacaatgataaacgatgtccaacatgctccattgatttaaaaccaatacatcatgctctgtttaggttgtagcaagcttgaatatgttaggaagttttgtggttttaagcttggtaacccgaatactattgtaaatgatctttttgggtttatttgaaattttcttcaatcttttcctagcaatgaaattgaactggcccttgttacttggtggcgcctatggttcgtcgaaacaaataagtccatgaaaaaaaacatcattccctagtagcaagtaacactgtgggctgcagattttttgtgctcatactaggttgattgtcgacaggattgatcgcctgatcttaagctttcagtgccgttgttggagggggttgtccaacgttggcttcatcatgttgaggggttaattaaagtgaacatggatacatctcttgatactgtgagtgagattcttgtgggttaggcatggttgcctgggattttcttggagtggttattgtgtctgctatttggaagttggagggaagctttcatttagagttggtggaagctttgctatttgtcatgccatttctaacgcaacttcttttgtattcacaatattaagctattttgtttgaatctgactgcaagagcttgattcttaagcttaataattctatgatgttagattcgtctttgatttagttttatatgatattaaagtttctcataaaaatctcaatgttgtgagttttattttatgcccaaaaaatgttgatgtagtagttgatacttttgctaaatttgttttgacaactattgttagtatagattggtggtgtggatatcttca

SEQ ID NO: 21416 - DNA, 3933 bp, Cannabis sativa
tctggattacattgaaatagagttttatttagggtataaaatccaacacatggaaggtccaatatcaaacccccaaatatgtaatcatggagggaaagctatagcggagaggattatcgatgtcggatcttaggtgcatagccaaaacagagataagtgctatcacgcatgaaattcatgaaggattttgtggagatcacacatccagacccaatctttctaagaagatcattcaccaaggctatttttggcctaccatgaagaaggattgtactgaatatgtccgcaaatgtgagcaatgccaacactattcaaaagttctaaggtccccactagtagagataaccctcaagaatagtccttggcccttcgtagtatggggaatagacttagtgggatcacttccaaccggtaagggaggagtcaaattttccattgtctctattgatttctttaataagtgggtgaaagctgaacccatggatatagtaacttccaagaaggccttggactttgtaattaagaatatagtgtgcagatacgaactttcacgcaaaatggtgtctgacaactaaaaaaaatttgataatgatcaattcactgatttttgtgacatccacaagataatcaagagctttttctactgtggcaggacctcaagaaaacggacatgtggaagccgtcaataaaattctaaagaccactttaaaatagaagcttcaagcttataaagcacactggccgaaagaacttccaagagttgtttaggcctacaaaactacttgaggaacttctacaggccatactccgtactccatgacttatggatatgaagccgtaatcctagttaaatccatagtgcctacacataggagggatacctacgacccaactcagaaccacgctctacttcaagaatctttggatttaattgaggagcttcaagaacagtcacaagtacaacttcagatgtattaaaaaaaaattgccaggaatttcaactccaaaatcaagagtagaaaattcataatttgtgatcttgttttaagaagagtgttccctgcctctcaagagccaagagtgggggtcttaggacaaaactggggaggcccgtatgaagttatagacaaaattggtgatggaacttatgatttgaaaagactagatggaagcagaattctaagagcatggaatgttgaccacctgcaccgatactatcagtaaacttggtgtggtcaggttcctttctatttttctttaccttcttattaatttccatgtacacctcagcgcaaaataatttgaataaaagaagaatttttcatttcatatttggtctttaaaagttctatcatgttacaagtgatcaaaactcccatctattaatcacttgggggtagcatatatgatattgtcatatataattttacaacttttggtaggaaacaactaagttgaattctcaaatatcagagtaggaagaattacctaaaatcgacacctcaaagaaccggaagtaacttattatatctgaagacaatttaacacttaaacaaatataacagtaggaagtattgcctcaaataggaacctcaaggaaccaaaagtaagcaactgccttattatactcgaaattaagtttcgtacattaaacatcaagtcaacttcaaatagaagttgaggcttcatggttaatacaaccatagtattcaagttacttaaattaattgattcagatcaattaaaaaattaagttcgaaaaatcctaaaaataagtgataaatgctaagaaaaccccgctgcaagggtataatatattgtctccgaacactcaaaaagggggacccttatccctaaaaaagaaaagaaaataaagctaatgttgtaggcaagagtaatcaaggatgagcagagttatttaacgattgcacatcttgagtttgaacatcgaatcaggccttcattatcgcagactcagtcgagataggcacttcaaaatccagaagagcagagtcatccacaatctcaccaaccagaatggtagttttgggattaaaatggtagtttttggattgactgctccaaattcctgatatgcacccttagctttgtctacctcctttagtgaaagaatcttaggcaaaagctcttccttgtctttggcattgaggaggttgattgccaatttattatgttgctaaagggtatatacggaatagacgaaggcttggtctagagccttgccatgttgagtttcctactcctgaagacgtcccttcaaatataagctttcagcctccaatttggtgattattttgtgggattcctcacaagctttcacagatgcaactagtttactctcagcctcctcaaccctcttcatatcctgcacctcagctacctccaccttctgttgcatgtcaagatggtgctttacctttttctctagagtagtctccttgatgtacttgtctttaataatcttagcctacctatcatactcttgagataaaattgtaatcttctgctccttctactggacgcctagcttgacctgctttataccggcttctaattctttcattcatgaaagagccttggaatacatgtttttatacctgtctccatgatctttttctatttttgttgacttcctttcacaggacaaagtcttttccaaagagtcaaataatttttacttaatggtagcttccatcttggcattagcttcagctaaagccctttctacttcttctcttctcagctcagcgttggcatgctctaccctcagcacctacaggtcataacctagttgaatgactagggaacatttcctctctccgatcaagccaatctacaaaagaagaaacataagtgaatcaaaataatggaaagacacagcaggtttattcatgtcaaaaaagcgttcgacttatgacattagcctaggtcctcatagcatcggccacatacatttgatccctacttgccattatggaaaacttgtcagtcttgacctacagcttgtagtaccactctattccaataggtcagcaaaaaatggtgacacatcggtcccaaagcgaggacggagcttctccatgaactcaaccctattcacaagaggagggttggcttcgttcaatctgtcatagtcaacaaactcggcattacctctagagatgatgctggtggacaactttttcatctcctcagattcactaccacgcctcttctagtagaactgatcatggcttctaggcgagcttcatccccttccgtcaacagcaaaggcctaacaggaagagtgaaggatgccaatggtagaggaggtagttcactcgtttccctggaaagctgagtgcaggtggcaggaataactttaggcagtgggggtggtagaggaggatttttattgtcctttgctgtattggttcttcgcctaggtggccttcttccattaggtgcattagctcctttctgggatttagtatctgaggcctacctccttgggctaccaactgcaataacttctcttaggtctccaccctcaccttttgttggcgccataattagattaaccatcttgcttcttcttgatcacctaatacaaaggctccactccaagaacacagcaagctcggttagatctttaatggtactgaactcaacttttgtccttagagcctttagaatagcttctagatttgaggccagaggctagatcttgagactcactcctggaagccttgtttttctttttctcgtctcaacccgcttgggagatttcccaaatcttgttagatcgagttttaacgttgctcaattatctatttagtagcccaatttgcatagtggctagtcgatctacacaaagcaaacaaatatccatcaaacaaattgtaacaaaagacatggtttttacaacacatc

SEQ ID NO: 21417 - DNA, 1464 bp, Cannabis sativa
aacgtgtttctttgaaaaataaaatatttggacgacaatctttgagaagcaaatctaaaaatcgtttcatgctcttactatttaatccacgtccattccaggcttgtatgatcatattaaaaaatagagaaaaaaatggagaacaagaaggaaaatgaattttagaacagaggagaagaaagcagccctgcaacaagcacaatacttagataaggtttcaacatcagattttatctattttttgaatatcagagagaatgggtaactgtcagttgtaggataacttaaccgattaattagttcagataagacagagtaattaaaatatttgaattttaaattttaaaaaaactgtcaagtttaacattttagagatttggatatataactgaaatggtagtagtttttgaggacaactgaaatgaaagtagttattcattggaaaagactttttattttttttatttattcataaaactttttgtgatcataaaatttttatttattttttatttttttgaaaaaacatgtgtttataatttaagaatcatataccttatactgacaaaaaacgaggtagatcaatatgatttaaaattataacatgtattaagtagaacacattataaattataagtattcttagaaggtttatttgaaaattataatgcttttactgcatttaaagaataataatcgtaagtaaatgtatagtggaacatgcattcaattcgggtataattagaaacagataacatcttctttattgatataaataaatataactgatagtaaaacaaaagacacaagaataaagaaaaagattgattgaacaaagttttttatacattggatgataactaaggaaggtaaagagcaatactaatttataggaagccgctaaggttgaataaagaataattgtagtacagcacacaataagttgctaacgcaataactacaactgaataacatatagacttaacataaagaaactagaaataagtaaattagaaatgatggtagaagaacagtaagtcacagaagacatgagtaatgtagacaacaatttatttcttgtattttttagccacttcaacaagtttagctttgcctttgtccacccctataactttagtcctttcctgaaagtgtttagtaggagaaagtgaaagcagaggcgttagtcaagtagtatttctataatttggcactttttgagttaaagcaatgtccaaggatctacctatctgaaaagactcggatactgctacaatcttcccttttcctttatcagagctcaaagttgatcggccacataaggattgagcattgacaacaaccccaaaaccaataacagggacatctgttgggaatattttactaggatctagatttattaacaagtatgttgaattaacatcctaaatatgaattctctaaatcaatgaaaataaacacata

SEQ ID NO: 21418 - DNA, 1665 bp, Cannabis sativa
agtttgtgttggtattaggtttatcagttttgattaaaatctattgtatttagatgtttcataaaattaatgataattgttttaattttgaagttatccagtattaaatcatatataagaatatgtactactttactcattaccaattgattttgagatggaatcccataatttttaaagtataactaactattaggtaatgtgttgaggtccttttacacatcatccataaaaaaaaatgatttcaaaacacaaaggcaaatttcaggttatcttgaactgaagtcgttgatacataataagctaaagatctagtgaaaaaaaaacctaagtgcaaaaactatttctagcaaggtggtttgaaccccatgtactctccggaggtatagcttctccaaacatcaagagctccgaagctggtcatcaaaaccgtgctcagagtcattacaatactgactgagaacacaatgagagatgctcttccatattgctgaatagccttctgaaccactaccaatcccagaagcgatgcaacaaaacagacgcaggagaagattagagcaacatctgtgtgttccatgcccaacatcagatactgaaaggctgacatggaagatgagaagaaaaccatgaatgaacaggttgctgctgttacctgcccaaacgtacagagagtatggaatggaattgagtgattaaatatactcatttaatatcttgtgtttttctccaaaaatatattttgtaatactcatttggtacttaatattttgaaattgtactctaaaatcaaattatgtatgatgatttcaaaatacagtaccaaataaaaattattaaaaatatcaagtaataaatttgtatttaaaaaaataaagagtaccaaatgaatacacacctgaaaataatattcaaagatatggattttgaatttatacctcgggtactattccaacttgtataagaagtggacttattagcattccacctccaattccaaagacaccacctaacatccctgctaatagtgccatcaatgggaaaaggaattttttggactgttcaactcgagttaggctgtctttgatgtccttcacaattagttttagatttaccaaaacaattaggaagcatataattctagtttttaatatatggaaattaaggctcaaatgggcaactaatattctttcttgtgatttcttaaatgtaccttctgattcaagttttgacgttgggagttctttttcttccatataatccaggcagtgtaaaccatggctaaaggaacttgcaacgaagacagtgtccagtaaccaattccacaaggttctatggttgtaattccctgcatacaggcccattttaaaattattccttttcacttgcttccactcttgccatctgatttggaccacaatctatatagctattgaaaattgatatccactataatgactatcctatgattttaattttgattaaatttccactagttaattttaattatttttctttgaagaaagacaaaaaaaaaaatatctagaatctttatggatcaaattccacgtggctagcaccaagtttaacaaatctctattctgtatttctgatggaccaagataagatgaccttagactctaaaattacattcactcaattggt

SEQ ID NO: 21419 - DNA, 1442 bp, Cannabis sativa
atggaactgctatatgaaaggtttaataatcaagtacctctgattattttgggaggcccgtatgttatgaaagttgagcaatgactaatagtccttaacaatatattgaatttcattggtgttactggcaatgatagggtgtcatgttccacctttcaaatctaaggggatgccctggtttggtgggagatgttgtccctcacctgagattaccagaattacctgggaagagttccaggattttttcaatgctaagtactacaataaggtagtttgtagtacaaaaaggaaagaattcacccagttgactcaagaggagaatatgtaaattatagagtacacgacccaatttgatagattggcccggttagcctcaagaatagtgccaaccaattttcgtaaggaggaaaagtatctgattgggttgaatcccaaaattaagcatgttttgatgattatcacggatgacactacttatgctactatggtagagaaagcactaggagcttagggcgcagtagaatgtattcaggagtcttgagggacacaaatagttggtggggccactgctcctcctacctctggtttcggtaggagaagtagtgactcaacctctaatcaaaggagaaaagttccatttgcacctagtggctccagtcaaagtaagaggttttgagggaactaaggccgtggtaatagatagggtggttttgtgtgccgttacacttacccaaaatgccaagaagcatcatctgagtgattgtaagggccgatcatttttccaatgcggtgtaactggtccttacaagagagacatcccacaatttatgaaagaagagcagaaagcagagccacaactcactccagctagggtgtttagccttacccaagccgatgctgaagctaatcctgtagtagtgacaagtcaacttctagtcaacgagtcttatttactctatattatttgattctagagctacacattcttatgtggcggccagagtaattgatagattggataggccatgtgacagttatgaaataaggtttggaaccctactacctggcggaaaattagttatctccaaaaggtggattaggtctatgccaattatgattgaggatagggagttgagtgatgatctagtagaattaggtttaggagactttgatattgtacttagatggatttcttgtccaagtatgctactagtattaattgcaaacggaagatgatgacttttcaacttgagggtaaagaactatttgtattgttggtatcttttcaaggttctcaggtttcagtaatctcagtgttgaaggctagatacttttttaaggagggatgtatagggtttctaacagtggtgttagataccacccgacccgagtcaattcagcctgaagacattaaagtggtacaagaatttttggacgtgttt

SEQ ID NO: 21420 - DNA, 1039 bp, Cannabis sativa
attatgtcacataaatttaaacaaagaaaagaataaaaaacaaaactttatacactcatcatcatcatgatctcaatacataactgcttcttgatcttgttgccttattattacctgccaatgttcatcaaagaacaaaaatttagtctaaaaatttgaactttatgagaattgtttagtttctgagctcaaaagtgatcaaaatcttttaccctttttgtgattttgccaagctgatcaagtgatcatcttctaatacccggggtgacagtctcaaaagcctctacaagaagcttcactttccttttccgagcaggagttagtttcgtaacagcttgttgaatcgcgtaatcgagcatccattcctctgcattcttcctctcatctgtgtcttgatgctttaggttgactttttctgattcttgaccagcctccaagggtagaaaccggggtcctctaggggtgtatttcttcacattttctaatgctttgatgaatcttttgagcagaatcattttcttcaggttgctccagcttcttgacattttcggttctgttgaggccttttcttcttcttcttttggggtgaaatcatcgcctgctcggttttcaaagtctggaactttgaattcctctgcttctttcctgtcttcttctctagaattctcattagtagagacacaattggttgagcctgagttatcctgattctctggaagaagaatgtcatcgatcgccttttcaattagcttaatagcttcaattcgccgaagagttgccttctgatcatctgcagtgtcatctttcatgttcatatccacatttctttccattgttttggcattgtccaatcttttctcatcaacttcatcgcttagctcggttccatcgtttgctgatgacatatgcttataaaccaaagaccaaagtttcgtgtatgactgctgttctgactgagcatcttgtgctgcatcattttggcaatcagactccgattcctcggttactccattctcttctttactggctgcaatggcat

SEQ ID NO: 21421 - DNA, 10519 bp, Cannabis sativa
agaaaatatcatattcgtaaagcagaaacatagacgtactcccattaatgtggaaaatataccggattagtcaatccaaattggacttaattgtcaagtcatccataactgtttagtcaaaataaccattcattttgatcgaatcgcttaatttcgtttgtttgttgcggtatatgttttgtttcaagattctctatatccactagaatttcatttctattccatttacttcgattttcttttgattttatattgataaaaaatcaaaagaaaataaatagaataaatcgaagtatattatacaaattcgttgcttttcagattatctctaaagaattaaaggatttacaaatttattttttttgctaatttttagcttatttagataagatagaatagattcaagattatctcgagataaaataattgtatatattacaaatattctattttatagggctatacggactcgaaccgtagaccttctcggtaaaacagaccaaactttttattatcaaaatgatttgaactgtttcaaagacccaacatgctttttttcgcattgggctttttcgttaaccgatataaatatcggttagtctgccatatttttttttgatagaaaaataaaaagatggctccacgtgctctgattcattatgtgcattcgaatccaggagcactaccaaagtgtttcaaagaaggattatcctgacgtaggtctgcttttggcctagatcaacttaagttaaatggagtttctatcgctctgcttgactcaaatatgaaactttatacaccttaaagttcataagatagaacgaaaagataattttgttgaggtccttatactcattaggcttagcattgaataaatagaatattcaccttatcagtatcgcaaatcaatgatagattctattttggcatccgtttaggcgcccaaatcggaccaaaccatttgtcaggctattgttctcttcttttgttccccaaaagcatagagtaagacatccattgatcaataagatcaaatcttttgattacctcctctgaaaaacattggcgcgcgtgtaaacgaggtgctctaccaactgagctacagcccttatgcttgtgatacatattttatcatgtagataatttcttgtcaagatagctctttgatctctttgattggtattgcttataagtaatattcaatttataatccatccatgggataggtccccttttgtttttcttttgtgaggataaaagacctacttaactcagtggttagagtattgctttcatacggcgggagtcattggttcaaatccaatagtaggtagaacttattagatagcaacgtcactagtatataatgagtttttatactcattcgcttttattgattttgtatatttttcatcctactctattgaattttctaatttcaaattagttcattgcattagaatttgattctacttaaattcgatttgattctcattcgattttaatttgaatcgtcataagcaaaataaggtgtataaacagaagttctgtttatacaccttattttgcttattcggacacactaactagttacgacatcatattgatagcctctactcgtgtcctagctcgtctgagagctagatttgcctcaattgtttgtctcttgccttcagctttactcaagttaacttccgctatttcaagagtttgctgagcttcttgtggatcaatgtcactacccttctccgcatcatttactaaaacagtgatctcattattccctattctagcaaaaccacccatcagagccatcgttaaccattggtcttgaaggcgtattctcaaaataccgatatctacagctgtggcaataggcgcgtgatttggtaatatgccaatttgtccactattagtcgataaaattatttctttcacttctgaatcccaaacaattcgatttggggtcagtacacaaagatttaaggtcatttcttcaatttgttctccatttctaagttcgtagccttcgcagtagcttcatcaatgttaccgaccaaataaaaagcctgttcaggaagaccatctaattctccagaaagaatcaatttaaaccctttaattgtttctgctagaccaacatatttccccggggaacctgtaaatacttctgctacgaaaaaaggttgtgacaagaaacgctcaatttttcgtgctcttgctacggttaagcggtcttcttcggataattcgtccaacccaagaatagctataatgtcctgaagttctttgtaacgttgtaaagtttgtttaactctttgcgcagtttcataatgttcttcaccaacaatccgaggttggagcatagttgacgttgaatctaaaggatctactgctggatagatgcctttggcggccaatcctcttgatagtacggtagtcgcatctaaatgtgcaaatgtcgtggccggagctggatcagtcaaatcgtccgcgggtacataaactgcttgaatagaagttatggacccctctttggtagaagtaattctttcttgtaaagaacccatttcagtactaagagtgggttgataacctacagcggaaggcattctgcctaataaggcggatacttcggatcctgcttggacaaaacgaaagatattgtcaataaatagaagtacgtcttgttcattaacatctcggaaatactccgccatagttagagcagttaaaccaactctcatacgagcccctggtggttcattcatctgaccatagactagagccacttttgattcggcaatattttgttcattaattacgccagattctttcatttccatgtaaagatcatttccttcacgggtacgttcacctactccgccaaatacggatacgcccccatgagctttggcaatgttgttgatcaattccataatgagtactgttttacctactccagcacccccgaagagtcctatttttcctccacggcgataaggggctaaaagatctactactttaattcctgtttcaaaaatcgataattttgtatctaattgtataaaggcaggtgcagatctatgaataggagatgttgtgcgagtatctaccggacctaaattatcaatgggctccccaagtacgttgaaaattcgtcctagtgtcgctccgccgactggaacacttaaaggagctcctgtgtcaatcacatccattcctctcattagaccatctgtagcactcatagctacagctctaactcgattatttcctaataattgctgtacttcacaagtcacattaatttgttgatcaacagtatctcgacccttaactatcaaagcattgtaaatattaggcattttccccggtggaaaagctacatccagtaccggaccaatgatttgagaaatacgccccaggtttttgttttcaagcgcgggaaccccaggactagaagtagtaggatttattctcataaaaaagaaaaatatgtcaaaattttttgtgaaattgaaatcaaaaataaaggttcgagagcaaagcaagttaagttgatcggttaattcaattaagagatgggcgttagcacttgatttcgttgttaacaaatattcaaccgatgtttagttattttttttttattcaatttcaatgagtgaattttcaagttcaaccaaaatccattaaactccagtttcaaattcaaaataaaatatcaagcggatgaataaaaattttgagaaagccgtggaattcgaacccgaactccatttacgcttcatttttctatctcattggctcttatttcctatttcaacatatcgatgtaggcttagcctatatattattttagaatattttattttttatatctataccccttctttcttttcatggacaaatttcgcctgtttttacatctaatctaggatttacatatacaacatatattactgtcaagggcgaatttcttatatattttgattcaaaaaaaaaggatacgagattagaaacttgaaaaaacaagattgggttgcgctatatatatgaaagagtatacaataatgatgtatttgacgaatcaaataccacggtctaataacgaaccgttcgttatgatcagttgataatattagttgataattttgtgaaagattcctgcgataaggtttcattaactcctaattcatgtcgagtagaccttgttattgcgagaattcttaattcatgagttgtagggagggacttatgtcaccacaaacagagactaaagcaagtgttggattcaaagctggtgttaaagattataaattgacttattacactccggaatatcaaaccaaagatactgatatcttggcagcatttcgagtaactcctcaacctggagttccccctgaagaagcaggggctgcggtagctgctgaatcttctactggtacatggacaactgtatggactgatgggcttaccagccttgatcgctacaaaggtcgatgctaccacatcgagcccgttgctggagaagaaaatcaatttattgcttatgtagcttatcccttagacctttttgaagaaggttctgttactaacatgtttacttccattgtgggtaatgtatttgggttcaaggccctgcgcgctctacgtctggaagatttgagaatccctacttcttatactaaaactttccaaggtccgcctcatgggatccaagttgagagagataaattgaacaagtatggtcgcccactattgggatgtactattaaacctaaattggggttatccgctaagaattacggtagagcagtttatgaatgtcttcgcggtggacttgattttaccaaagatgatgagaacgtaaattcccaaccatttatgcgttggagagaccgtttcttattttgtgcagaagcaatttataaatcacagtctgaaacaggggaaatcaaaggacattacttgaatgctactgcaggtacatgtgaagaaatgatgaaaagggctgtatttgccagagaattgggagttcctatcgtaatgcatgattacttaacaggaggattcactgcaaatactagtctggctcattattgtcgagataatggtctacttcttcacatccaccgtgcaatgcatgcggttattgatagacaaaagaatcatggtatacacttccgtgtactagctaaagcgttacgtatgtctggtggagatcatatccattcaggtactgtagtaggtaaacttgaaggggaaagagaaatcactttaggctttgttgatttactacgtgatgattttattgaaaaagatcgaagccgtggtatttatttcactcaagattgggtctctctaccaggtgttctgcctgtggcttcagggggtattcacgtttggcatatgcctgctttgaccgagatctttggagatgattccgtactacaatttggtggaggaactttaggacatccttggggaaatgcacccggtgctgtcgctaatcgagtagctctagaagcatgtgtacaagctcgtaatgagggacgtgatcttgctcgtgagggtaatgaaattattcgtgaggcttgtaaatggagtcctgaactagctgctgcttgtgaagtttggaaggaaatcaaatttgaatttgaagcaatggatacgttgtaatccagcaattactttctgttccttgttcttattcttaaattgaattttgaattgaaattaaactcggcccaatcttttactaaaaagattgagccgaatacaaggatactattggatacatttttgatagatccatacttaatatacaagatcttaaatacaaaaaaagagaagacgaaaccacttaaatctttctattgtttgttggattcacaattaattctgaatccttaagatttgggtattcttttttattttatttatattatttctatgtatatcctgcggtttcggatcatggatcgagtcgaatatcacaacttcttctacccatcttatatattgtccttttcgttttttgttataatagaaactgtttagtaggcgagattttacgaaaaagttcttcagatttattggagagaaccattatttctttttttcaatgcgaatttgacacagcatggggaacctactatttcacattaattatttataattgaaaagtgggtttcatcctattttagcatatatagcaaaacgatactacgggttctcaaaaaagaaaaaaaaaaattttcagtaccccacttcatcaaatgactattcatctattgtattttcatgtaaataggggcaagaaagttctatgaacaagcgacgatttgattcaatgttgtttagcagggtattagaatacaggtgtgggctaagtaaatcaataaatagtcttggtgatcctattgaaaataccagtgtaaatgaagatcaaattcgaaatgatatggataaagacatccctagtgggaatgatagtgacaattctaattacagtaatgttgatcatttaatcggcgtcaggtacatgcggaatttcatacctgatgacacttttttagttagggatagtaatagggatagttactctatatattttgatattgaaaatcaaatttttgagattgacaacgacccttcttttctaagtgaaccagaaaattctttttatagttatcagaattctagttatctgaataatgtatcgaagactgatgatcctcgctatgatcattacgtatatgatacaaaatatagttggaataatcacattactagttgcattgacaattatcttcgttatcaaatatgtattgatagttacattttaactagtagtgacaattacaatgacagttacatttatagttatatttgtggcgaaagaggaaatagtaatgaaagcgggagttcctctataagaactagtacggataagagtgatttaactagaagagaaagttctaatgatttagatgtaactcaaaaatatagacatttgtgggttcaatgtgaaaattgttatggattaaattataagaaatctttgaaatcaaaaatgaatatttgtgaacattgtggatgtcatttgaaaatgaatagttcagatagaatagaacttttaattgatccaggtacttgggatcctatggatgaagacatggtctctctggatcctattgaatttcattcggaggaggaaccttataaagagcgtgttgattcttatcaaagaaagacaggattaactgaggctgttcaaacaggtacaggtcaactaaatggtattcccgtagcaattggggttatggattttcagtttatgggaggtagtatgggatctgtagtgggcgagaaaataacacgtttgatcgagtatgctaccaatcaaaatttaccgctcattctagtgtgtgcttccggaggagcgcgcatgcaagaaggaagtttgagcttaatgcaaatggctaaaatatcttctgctttatatgattatcaatcaaataaaaagttattttatgtagcaatccttacgtctcctactacgggtggggtgacagctagttttggtatgttgggagatatcattattgcggaacccaatgcctacattgcatttgcgggtaaaagagtaattgaacaaacattgaataagacagtaccggagggttcacaagtgtctgaatatttattccataagggcttattcgatctaattgtaccacgtaatcttttaaaaggcgttctgggtgagttatttcagctccatgctttctctcctttgaatcaaaattcaatcaagtagaaatttataagccttaatttaataaactctacatttttttttgtttgatggtgaaaaatagtgatttcgcttcatagtataggaatcaaagtcaaaacacgaagaatggatttctcttttgtaacataagatttaattcgagaaagaatcatgcgtatatatctttttttattgatattcctgatcttgattcctgattaggaatcaagaactctccatcaaacaaaataaacagagtgaattctttctccctttgccgtgaaattaggcaagaaagtcctgcgtctttctatatccccccagaaccctggttttactaaaaatcccttgtgttggatcatattataacgaattattcgttaatttagaagaagctttttctttaattttattaaatgaaaatatcattctaaagaaaaaaaaaaatgaaattttgaatagcctaataaatagactaataataagaattattaaaatcaacaacgacggaaataataaatcaaagtggattatcatacatatattatatgtataaacatataacaagtattatatgtataaacatataacaagatgaataagctcatttatttacacttttatttacatttattatatacttaatattatctagtttatatattatttaatattctctttctatatactcacttaagtattaagtataattataatagtataattatatatgaaggataagatatctttataacaggttaaaatcttaatataataacaaatataccaataaataacaggtacaaatattaaatcgaggtacccattctatgacaactatcagcaacttacccgctatttttgttcctttagtgggcttagtatttccggcaattgcaatggtttctttatctcttcatgttcaaaaaaacaagattttttagatattatgaggttaaatctcctctatttttttttcaagacttcggcagatggattatagcaaaaatatctatttagtagaatatgggataacatgtagcttactccgagcagaagctcgtattcacgcataaacataatatatgattaaatgcattatagctatttgaaaatagatcagtatttgttattgggatgaatctgaaagaaacgtaaagtcaatatatctacatgtccgtggatatctataagaaatcatatgaaaaagatgttattatttttgtttagctctaagcaattgatgaattactcctaaagctttacatcatatatagtactagttgatgagggttatttcggaaacaaaaaaaatgaaagtcaaatttattgggggataactccaattacaataaaatgcaactagatctagtatgagttggcgatcagaccggatatggatagaacttatagcggggtctcgaaaactgagtaatttctgctgggccgttatcctttttttaggttcattaggatttttattggttggaacctctagttatcttggtaagaattttatacccttatttccccctcagcaaatcattttttttccacaaggactcgtgatgtctttctatggactcgcgggtcttttttttagttcctatttgtggtgcacaatttcgtggaatgtgggtagtggttatgatcgatttgatctaaaagaaggaatagtgtgtatttttcgttggggatttcctggaaaaaatcgtcgaatcttcctccgattccttatgaaagacattcaatcaatcagaatagaagttaaagagggtatttatgctcgtcgggttctttatatggaaatcaaaggacaggggtccattcccttgactcgtaccgatgagaatttgactctacgagaaattgaacagaaagccgctgaattggcctttttcttgcgtgtaccaattgaagtattttgaaaaaagtgaagacttttgtagcaaaagggaaaaaacgatagcgccagacgaactatgcttagaacaaaaaaaagtaaacgtacatggaataatcctaaaacgaaatagtttttgtccatctatccttttttgttaatcaacgttttttatcttttttgtactctttataataataacttttctgtcttgttttgacactcattttttatcatcacagtattcttcagaaatttctctcaattattcctatacagtggccaccggcgatgtttttttttcgacattttttgatattttgagaaaataaaaccgggaattctttcgtctcgaaattcaaatctatttattatttaatagatattatttgcaaaaatggctctttcgtgcctttatcgaaaggcttcaatttgattatatatttggaaacaatattctatataagagtctattttatttcttcattcaatttaatttgaagtcaactctttcttattctagttctgtttttctatagtatgtttatgtattctttctaaatttaaggaccaacctatggactgaatcagaaataaaaaaccgggactagagttacgggctcgatgacttgtaatggaatagaactgatacttgataggaatattagtatcgtatagagtcgacgaatgaagtgagttcatttaaaaattcacagacgagcaagagcaaatggcaaaaaaaaaagcatttatttcccttctatatcttgcatctatagtatttttgcttgttggatcttagattaggt

SEQ ID NO: 21422 - DNA, 11549 bp, Cannabis sativa
gattcattttcataaaggaaaatgtaataaagcattaatactgaattgatccctaattaaacaaaattgttttattaagaacaaataagaacaaaaaaatcacgagccctgagtcaataaaaactgagaagattgactcaagatcaaatttcatttaagagctccgttgtagaattcagacctaaccattaatcgcgaaacggtgggaacgacagaacccgtgagtgcataagattctattgaaaacgaatcctaatgattcattgggtaggatggcggaacgaaccaggaaccaattcatttattctgaaaagtcatggcataaactaatcttataaaattgaattaaaagagtaaatattcgcccgcgaaattttttatttttaagaaaacaaaattttctataaatagaaatcaaatacatgtttacttctatatcaaataaagatatccaaattgataatagcttatcaaaatcaaagactctcaggcttcaatatatttaatcaatatattattgattaaatatatgtatattattttataatcatttccttcgcgaggagctggatgagaagaaactctcatgtccggttctgtagtagagatggaattaataaaaaaccctcaactataaccccaaaagaacccgattccgtaaacaccatagaggaagaatgaaaggaatatcttatcgaggtaatcgtatttgcttcggtagatatgctcttcaagcacttgaacccgcttggatcacatctagacaaatagaagcagggcgacgagcaatgacacgaaacgcccgccgcggcggaaaaatatgggtacgtatatttccagacaaaccagttacagtaagacctacagaaacacgtatgggttcgggaaaaggatctcccgaatattgggtagctgtcgttaaaccgggtagaatcctttatgaaatgagtggggtagccgaaaatatagccagaaaggctatttcaatagcggcttccaaaatgcctatacgaactcaattcattatttcaggatagagatgtagaaccaaaagaaaaaggtttttggatgaaaaaaaacaattgcaggtttctttttttgttttgaataaacaacattttttttttttacttcgccctttgcattgaaaaaacagatcaaaaatgatatgattcaacctcaaacccaattgaatgtagcggataacagcggagccagaaaattgatgtgtattcgaatcataggagctagtaatcgacgatatgctcatattggtgacgttattgttgctgtaatcaaagaagcaataccaaatacaccgctggaaagatccgaagtaatcagagctgtaattgtacgtacttgtaaagaactcaaacgcgacaacggtatgataatacgatatgatgacaatgctgcggttgttattgatcaagaaggaaatccaaaaggaactcgaatttttggcgcaattgcccgggaattaagacaattaaatttcactaaaatagtttcgttagcacctgaagtattataagatgagaccctaaagacagtttttattttatagtatttgaatgaaattaatttagtagatttagtagattgtttgtgtctcatgtatatgcctttaattttctaattaagaaaaaaaaaaaaaagagcatgttgattatatccaaatttggggacaaccaaaatcttcatttattatgagtaaagacactattgctaatatactaacctctatacgaaatgctgacatgaataaaaaaagaacagttcgaataccatatactaatatcactgaaaatattgttaaaatccttttacgagaaggttttattgaaaacatgaggaaacatcaggagaacaacaaatactttttggttttaaccctacgacatagaaggaataggaaagggccatctagaactgttttaaatttaaaacgtatcagtcgacctggtctacgaatctattctaactatcaaggaatccctagaattttaggcgggatggggattgtaattgtttctacttcgcggggtataatgacgggcagagaggctcgactagaaggaatcggcggagaaattttgtgctatatatggtaatctttcttttctgatatccaaattatatacagaactttcctatttcatatttgtgaaaaaaaaaaagaaatagagaaagggtggttttcaaatattacgcttcccacattagttaatccctcaagtgaaagaacaaaaaaggttcatgaaggtttaatttctgaaccacttcccatggtatactttaggttcatttaaataatgaaaatcagagcctccgttcgtaaaatttgtgaaaaatgtcgactgatccgtaggcgaggacgaattatagtaatttgttccaacccaagacataaacaaagacaaggataatttttagaaaaaagaggagaggggattctagaaatcgaaaggccctactgttcaaataatagaaataaataataaattaaaggctctgttttgacatgaaacggatatatctctatatctctgacttagcttagatttatgagatgatataattatggcaaaagctataccaagaagtggttcacgtaagaatagacatacgggttcacgtaaaaatgcacgtagaataccaaagggagttattcatgttcaagcaagtttcaacaatactattgtaactgttaccgatgtacgggggcgggtaatttcttggtcctccgccggtacttgtggattcaagggtacaagaagagggacaccatttgccgctcaaaccgcagcaggaaatgctattcggacagtagtagatcaaggtatgcaacaagcagaagtcatgataaaaggcccgggtctcggaagagatgcggcattaagggctattcgtagaagtggtatactattaagtttcatacgagatgtaacccctatgccacataatggctgtaggccccctaaaaaaaggcgtgtgtaaaaataaacattgaagatatttcaaaagaaataaataattcaatgatttgatcaaataatatcactatgggtcaagagaaagtaatagtatctactcggccactacagtggaaatgtgttgaatcaagagcagacagtaagcgtctttattatggacgctttattctggctccacttatgagaggccaagccgatacaataggcattgtaatgcgaagagctttgcttggagaaatagaaggaacatgtatcacacgcgcaaaatccgataaaataccccatgaatattctaacctagtaggtattcaagaatccgtacatgaaattttaatgaatttgaaagaaattgtattgagaagtaatctgtatggaacgcgcgaggcatcaatttgtgttaagggtcctggatatgtaactgctcaagatatcatcttaccatcttcggtggaaattgttgataatacacagcatatagctaacctaacagaaccaattaatttgtgtattgaattacaaattgagaggaatcgtggatatcgtataaaaacgccaaataactttcaaaacggaagttatcctatagatgctatattcatgcctgttcgaaatgcgaatcatagtattcattcttatgttaatggaaatgaaaaacaagaaatactttttctcgaaatatggacaaatggaagtttaactcctaaagaagcacttcatgaggcctccagaaatttgattgatttattgattccctttttacatgcagaagaagaaaacttccatttagaaaacaatcaacacaaaggcactttacccctttttgattttcatggtagagtggctaaaccaaggaaaacgaaaaaagaaatagcattgaaatatatttttattgaccaatcagaattgccccccagggtctataattgtctcaaaaggtccaatatccatacattattagaccttttgaataacagtcaagaagaccttctgaaaattaaagattttcgcatagaagatataaaacatatattggacattctagaaataaaaaagcatttcgcataaattttaatgagttttgaatctttaacatcagccatatactcggaatatatcaaaaatagaattgactaaccgtatctagggaaaattcactttgaagcgactattccctagatacacacgtcgtaatttatttattttatttcaaaaaaaaataataataataataaataaaaatggaatcgatttaaaaaagacctaaagttagggatttatcaataggtaatgttgctccaatacccaaccaaagggctactgccgtaccaatcaaaaagacggttgtcgctactggacgacgaaatgggttttggaatttattaacattctccaaaaagggtactgttaataatcccgcaggtactgaaaccattaaaagaacacccaataatttatttggtactgtacgaagtatttgaaatacgggaaaaaaataccattcaggcaatatctccaaaggagttgcaaatggatccgcaggttcgccaatcattgatggttctagaaccgctaaacctacgttacatgcaatagtacctaaaattactaccggaaaaatatataaaagatcattgggccatgcaggttctccataataattatgacccatccctttagccaatttagctcttaatacaggatcgttcaagtcaggtttttttgttattaggataggtgaattattctcgatccatcccccgaaagaaccggacatgataatttttcatcatccggctcgagcacgaatcaaatgaaccaaatatacccatataaaaaaatcgatatgctagccatatccacacatatatgaatgattctatataagtaaaaatttaccagtttagtttccttttcggagtttcaacaatcagacattgcccaaaatccagttcttacagataaatgctcaatacccaagtaggcttgcaaggttgattataatcaagtgctttatgggtcgtctcagacctttcaattgggctttatccccccaaatagcgagactttttgtatacaaagaatttacttgttactaattgaatttagcctctgttcttctttagatcccttgtttcactccgatagtataataaatcaagtcaatgcataggaaatgaatccatttacatactattaagtaagtgaaagatataaaacataatctaatcaaaattatgccacatcacttattctttcgactggatcttacggagcctgttcatacatgacatgatcgagtctgatcatagaaaaaaacaattctcttccaacgaaccaccttatcctctatatcgagctttcgcggtggttggaacaaagacacatttttattttgaattgaaatgtggcagataaggacatatattctgcacaaaccaatcaatagttcaagtcacacactcccataatccattttatctttagagaattcacttcaactatgagtgtcaaataaataattactttatttatatatttggagttgaagagaaatatccaaatacatgtcttattcttttcaataatccatatttatagcaatgaaatactgttgggcctaccccatgtgataaccaattgattacaaatagtataatatagcccctttataaaggaccggaaataccttgcttacgtatcattaggaagtgcattaacataaatacggcagtaagaagaggtaatacaaaagtgtgtaaactataaaaacgagttaaagtggattgtcccacactagcacttccgcgcaataactctaccaagggcgatcctattacaggaatagcgtccggtacacctgttacaatttttactgcccaataacctatttggtcccaaggtaaggaataaccagttacaccaaaagatgcggtcaatacacccaaaaccacacctgtaacccaagtcaattcacgaggtcttttaaagccacctgtgagatacacacgaaatacgtggaggatcatcattagtaccatcatacttgccgaccatcgatgaactgatcggattaaccaaccaaagttaacttcagtcattatatattgaacagaagtaaaagcctccgcaacggtcgggcgataataaaaagtcatagcaaaccccgtagctacttgtactaaaaaacaagtaagcgtaattcctcctagacaataaaatatgttgacatgagggggaacatatttactagttatatcatccgcaattgcctgaatctcaagacgttcttcgaaccaatcatatattttattgagataggtaagccaaaaaactccccctctaagaaccgtatatgaaaatttcatctcgtacggctcaaacagaaagaccaaaatacaagttctatcggatatgccttcgaaacttcctaattgtattatttactcttttctaaagaaaagataaagaaagaatacaaaaactgtttattatggttataatgccaaaatctcaagtcggctcatttatctctatgttgatcaggcctcttgaatcttctatttccctattttatttatttatttgtgtgtaatgagactttattagtgttttctttattattgataggaattctcttgttaagaccctatgaatcaattaaaacctcagattcatactaaaaccacgatgagtcaataaaaccttttcaaactaagtccaaaaattccttgagtaagaatcgttggatcaccacttattcaatgaatagacataatgactaaaaatcaaaagaaacctttgtactttgatcaaaataagcaaaaaagggagtccggtcacgaggtctgaatattaagttaagaatgaatcatagttgtaatactttagtaagatatttcatatagtccgtgcttcagatactatcatagaatgacaatatccgacgaagtaaaaccatctctagcaagatgacagacccgctctctgtactattcataggatcaattctaacaagtcacacactcatattccggaaatacagaaacaaagaaatttcacgatcgaactaccaaaatagaatgggataaaaatcagagaactaaaagcttcactttgtagtgaaaagtgagttaatagtttttgtgaatctaattcattgaaattccgtctagtaaaatagaagaattataaatctccaaaataatagataggaataccgcaaataaagccattgcgatacccatcaaaggagtagttccccacccaggagctactttaccatattctgaattcaatggtttcaataaactccctgcacctgttcgtcttgaaccagatctagaactaccctcaacagtttgtgtagccataaagcctattttctattcattgagatctgttgactttgtataccattccgttgtaaataaatgatcttagcatagatctattgtggtcttttaataataatggaaacagcaaccctagttgccatatttatatctggtttacttgtaagttttactgggtacgccttatatactgcttttgggcaaccctctcaacaactaagagatccattcgaggaacacggggactagttgaagtaatgagcctcccaatatcgggaggctcattactttcaatcgagataatgaaaaatcatttcattttttagttggaactttaggcggttctcgaaaaaagatggcgaaaaaaataattcctagagttgagactaaaaggaatgtataaaccaatgcttccatagattcgatcgtggtttacaattatagcttccatacctagttatttgagttgagatcgtcttccggataagaacaaaacaagagtaaaagaaaagacctggtattctataatcaaaatcaaatcccaaaactaaagacaaaaaataccaaaacaatattctatcagactgcttgtctttttgtagttggatctccaagtttttggaatgctccaaattctacttgagcatccaaatctgggtcaataccagcaaaaacatccctgaacaaagttctagcaccatgccaaatgtgcccgaagaagaagagcagagcaaacgaagcatgtccaaaagtaaaccaacccctcggactgctacgaaaaacaccatcggatttcaaagtagcacgatctaattcaaaaatttcacctaattgcgcacgtctagcgtattttttcacagtagcaggatcactataactgattccattgagttcaccgccatagaactcaacagttacacctacttgttcaacactatattttgattctgcccttcgaaaaggaacatcggctctaacaattccgtctccatctaccaaaacaaccggaaatgtttcaaaaaacgtaggcatacgacgtacaaaaagttcacgaccttctttatctttaaagatagggtgtcctaaccaaccaacagctatcccatccccgttgtccattgagcccgctctgaataatcccccttttgccggattattgccgatgtaatcataaaaggctaatttttcgggaattttagaccaagcttcagctaaactttgattttcggctagcccagcactaactcgtcgatagatttcttgttgaaagtatccttgatcccattgataacgagtgggcccaaataattcaatcggggtagttgccgaaccataccacatagttccagcaactacaaaagctgcaaaaaagaccgcagcgatactactggaaaggacggtttcaatatttcccatacgtaatcctttgtatagacgttggggcggacggacactaagatggaatagacccgccaatatgcccagggttcccgctgcaatatgatgagaagctattcctcccggaacaaaaggatcaaaaccttccacgccccatgctggatttacagcttgtacccttcccgttagtccataaggatcggatacccatattccaggaccatacaatcctgttacatgaaatgcgccaaaaccaaagcaagccacccctgagagaaataaatgaattccaaagatcttgggcaaatccaaggagggttttcctgtacgttcatcagaaaatatttctagatcccaatacacccaatgccagatagctgctaaaaagcacaagccagaaaacacaatatgtgcaccagctacaccttcgtaactccaaatacccgggttcgttatagttccccctgtgatactccaaccaccccacgaattggttattcctaaacgagtcatgaaaggtataacgaacataccttgtctccacattggatcaagaacagggtcagagggatcaaaaactgctaattcgtatagagccatcgaaccggcccaaccagcaaccagagctgtatgcattatatggacagaaatcaaacggccgggatcattcaatacgaccgtatgaacacgataccaaggcaaacccataaaaataccccttatatcaatgaaaaatagacactatgtaactttattgcactttaaaaaaactatactagggacctttcttttttagtggattatctcggggaaaggattcatatttgttctattcttttagtaagaatgttttttagtttagtaataatggaacaattttgctcgtaggaacaagaagcagatttattctacacccgataagtaccaagacgcaatggtcggacgttgatcgcattttatctgagtaactgcctctttatttgttcatcattcaaaggacccatttgtaagaatttgccttttttataatatgaactaaacttattcaatctatgctatgtataaaaaatgctaaaagatacaatattattaagacaataaacctatttacgctttcacatcaaagtgagatatagtacttaaattttttttcatttaatgcctattggtgttccaaaagtaccttttcgaagtcctggagacgaagatgcatcgtgggttgacgtatagtgcgacttgtcagatatattgggtcatatggtatttccccgttctcttccccgatcgagatatcctccctttcgcccaagaaagattgattgaattatcaaaaatttggagcgtgaaatgcaatgaagtgcacttaaatatattttttaggggggtatacaaattaatattagcaattcaaataatttatggttggcttggttcgaccaataaaatgaagtatccaggctccgtttagaaacaaaacaattggtaatatatctaggatttctacttagatgatcatattttatatcatattttctattatattcgatttctaatttctaatatgaatagacgtgatttcaaatagaatatttggtaggagatatgaaataaattgataaattgaaaaaaaaaaaaagaagtcgtagcaaaaagacatagtatttgtccatttgtcctatataggcaaatccaaatcgggcagatctttactcggagtagagcataaacctaaaagaattcaagaagaccattcaggaacaagaaaattacatcgtgatttggattccgatgaaacaatacatcaatgagaaggtagttcaataagtttgtttataagtttagtgagtttttttgtttatttttctatttatagaaaagaaatagaaaaataaacagaaacagaccaaaactcatcttttttacaaaatgaaagaaaaagagctcttttattacaaattcgacagggcctgcctgctatgaatgctatgaaaaaaaaaaaaaactataatctacacattgattcttttttttttcgcaatttgggttgaaccgtatgcatcaaaagatgcatgtacggttccaaagggatacaattttatcccaatcaaccgactttatcgagaaagattactttttttaggccaagaggttgatagcgagatctcaaatcaacttattggtcttatggtatatctcagtatagaggatgataccaaggatctgtatttgtttataaactctcccggcgggtgggtaattcctggattggctatttatgatactatgcaatttgttcaaccagacgtacaaacaatatgcatgggattagccgcttcaatgggatcttttattctggtcggaggagaaattaccaaacgtctagcattccctcacgcttggcgccaatgagtttttattttttatttgatttgagagaaaaaaagactatgccttcgcgatataagaaatatgattaagtaataatagcatggcatttcgaattcgatatgagaatttttttgttttcaaaattgttacattatgtatcgaaagagtagtatgagatataagggtatttcctattttagctgatatatcaggagacccatttcagcgtcacaaacttttttcacaccgaaaaacttttaacaatatatatttatattatgaatgaatacgaaaatagaatttcgttttttacttagatatatatttttgatatatatatttatatatatatattttttttttcaaataaaaaaactttgggattgctaactaataactaacagacgaaata

SEQ ID NO: 21423 - DNA, 1077 bp, Cannabis sativa
aaaaaaaagtcctactcaaatcataactgcattataattatattattaagtacaaaaggatatgagaaagaaaagaaaaaaaaaaaagaagtgccagattgagaatgccagcgttgccccaggggcactgattgtagtcacatttttcagggggccaccagtcaagagttgcacatataaaattgtcgtctgttttgcctatagaggattctcctctaatcgttactcttacaaattcagatgatgaaattggaagaaataatacaacaaaattaaacagcattactttcattactatcttcattattatagagatgtttttggaagaataacaattagatagtttattgttttattactttgtttggcttgaaatatgtatattatattacattctttgtgcttttaattaggaacatgtactgaatgttatgctacatttcaggattgtattctcttttttattataattattgtttcacattctttgtgtttcaactttgaagttgattcttgttacttttttttttttttttttttgttcactaaaataaattcaatagatatttcttcttttatccatattagtaatagttaggtaaaattttttagcttttttatatttggaacccaaaatatattatttgtggttgttatgtttggaattaaatttgaaaagtttacatcaaatactattttttttttcaaactttatatttatagtctaacaaggaaatttttatatttatactttgctcacttattttttttttcttttttacaattttttacttattaaaacttcaaaaaataaaaaaaaattatatctctttttttaacaccatttttctctcttacaaaaaaattaatagcactcttcctacatttttatcttttatatgattaataaaagtaatgtatattttttagatgttttgtagtttattcagacttagtttataaatgatttgtatatttcataagattgatgtcttgttatttttctggttatctatagttatctttttcttattttatagttatttttatgttgttggttaggtatttaatagttat

SEQ ID NO: 21424 - DNA, 1689 bp, Cannabis sativa
tttaacatagtattatataaaaatatgatatataatccaattcaatataatacaatataatataatacgacctaataccacgtttcaagctaaaccctaaaaataaataaacatccatatatgttattataacacattttttttaaaatatatataattaaattatagataatttcatatatttaagtatgaagagaatattctttgaaggggctagaaaagactgggaaatttccataagtagtgttggaccaaaacaatttttttttttttgagttatgaattatgatatccaaaaggatattagaagaaattaataaagtaggtgctatttttaaccttttatatatatattctttggaaaaaaaatatacatatatatttttgccaagattgcaatactttcattattcaaaaaagattgtaaatactttcaatttcgtagatatattttatatttatatattcttttctaataaaatggactttgacatatatatggtacatttattaatgttctgatgagataactatattactagatatttaaactagttaataaaaaaaatatctatttgcagttgaataggcacagtttaaagaaatataaagtaaaattaggcacctactttcacatgacttgactttaaattataaaatataaataatactaatgctactaataccataatcgagatgtcagctttgcaaaactcacgggtgacaatagatacatttagagaaggaaaaaaaaaagacaatagagagttctagttttcataacctttattattattattattatttattttttatttgaaatttagattgtataatcattttttattttttcaattttattatgtttttaatgtaccacagaataatttataattttagtgtattttctaatactgtgtactaattttttttaaaaaaaaattattttgttttttttttttttttttttgaataaatcaggagatttattaatgaataaactcatgcaaaataatagaacgaatttcaaatgaacaatcctccaactgaagcacacaatctgtagagaaacaagagtctcttgccaaacaatgagccaacttgtttgcagatcgtttaaaaaatttattttgttaattttattgttatcgtcttttaagaggaattattgttcaataaaaatgtataaaacttattgaggtgatagataatgtcacgtttgtgacatttttttttaataattgaaactgatgattaaagctgatgtttctctctgttatatgttttgcattatatatgtgttatattagttgtttttccttattttttcattctaattttttattcttatattttgtgtttaaaaattcatacatgtttttagtatttgtttttgtttttttttcttaccatataaaccttaaaccctaaaatcctaaattctaaactttaaaccaaatacctaatgttaaagtaaaaatataattttatataattagggagtagccacaacatccttaattgtataaaattatatattaatcaccttaatgaacataacttgtaattaattatatatatgtaataactttatcccataggaattttattatatttgtattaggataatatgttaaattaaattctcttaattcatcctacagggagttatggggatttaatttaata

SEQ ID NO: 21425 - DNA, 3078 bp, Cannabis sativa
taaaaaatagtatataattatggggtaatttcccaagaaaatatatagaaattaatatatagtgtaatgtaaatgtgtgaggtaaaatacaaaaagtaagaatttagggaggtattttaaataaggtagagaagctattgggactgttttgaatgagctaaaaatttgagctattatagctcactattgtacatgtattttggacacttttttttcaaaaaaaataaaaactctaattagttatatttttacttttgtaatcattttacattatttattgagagtgttgtaatttggttctagtttcatgaataaactatcctaaattttgaatgaaattcttttctaacttagcaccaaatatttattgttttaatttgatgtaggctaatgaaatattggctagagggacctaaaacaggacatgtggaaccaattgctaatttaccaggatttccagacaatgtgagaataaatgagaatggtcaattttgggttgctatagattgttgtcgtactccaatacaagaagttttaagtcacaatccatggataagaagtgtctattttcgcttaccaatcagaatgagtttcttagctcgactaatggggatgaagatgtacactgtaatttcactcttcaacgaaatgggagaggttgttgaagttcttgaggatcgaaaaggagtggtgatgaaacttgtgagtgaagttagagaagtgaaaggaaaattgtggattggaacagtggctcacaatcacattgccactctcccttacccttaattagatcgatcttattttgatgaattaatggagtttaattaggataatgagtatttttctttgttgtttatattttgttgtctaaaaaggttatctaaaaaatttaaggatggattgacttatgacttatgtaacaatatggatgatttgaagaatgacttagaattcatatgtttctcgtagtttcttcttcgtcatttgtgtttaataagtagttgttccttttatttttatctttattttttaaaaaatactaatgtgatttttttagtacctactatttagtggttcataaattgtggaaaggatatttaattattagaaattttgacatatatataaaggggttttactgtaattttacatactataaaatcttttacttttatttacaataaaatttatgattaaaaataaaaaatattataattaattacaaatcatcattcataattgtatatattatggttaaaagattatcactaaagacatatttttttgtatattatacatttaatcaattacatcgaatttgttaatgacaccatcaacatcaaattttaaaatataggagaactccttagaagatattgagtaacacatgttatgatcttttttttttttttttgaaatgaaatagcaacttcgttaaattagcattttgaatacaaaagaatctgaagattagatgggatctaatacccaagaatgctacgactagatagataccgagagtacctagcaggatagcaacatagtaagcatttcggtttgcagattgtctaacaaaacgtaaatgaatgtttagtagagagaaaaatagaactttacaatcattaataatcaaaccaaagacagaagacaatagcttaaacaacaagcatgctatcaatatcgatctctacacctttccactgcttttattcaacttagagcttctttgatacccatggcttcaactacttcagctgggtaaagacctccatggtactcgacctttatgtgtataggtctaccgagactgtcacgagccacaaccccaaagccatatgagttttccttctcaaacaaggcagcattgacattgatcttgataatatccatgttcagtttagtccaaagctcagcttgatcatccatgtttccaagaaacaaagatgataagatttatcttgagcatttctccaatgatcaagagttgtagttgccgatacaagaactccgttaacagaagaacaattctatttccaaacttttttttatttctagctttccacacaaagcccaacacactataattgcaatatatgcatatagtttcaatagccattgttgagaaaagcttctccatccaagaaactaaacgtgagtggagagttagtgctaaaagcaccaaatcttaaccaacaagcaacagcaaaagggcattcgagaagagcatgtgaagtggttttagcctagctaagaatgacaggtagaacaaagatgggagatactcacatgttttttgataaaattgagacatgtagagaggcagtcagtcactgctcgccaaatgaaatttttaacctttggtggaattttaagttgccacaaattttttcaaaaaccaaaattatatactcctagtcgtgctattttttgaacttgcaacagctaatatgcactttttactgagaagttgttgtagttctcaccaaacaaagaccagcagtcattttcaacattcgaactcaaaggaattccaagtattagatcagtatcacagatcctagctacggaaatcagtggcaaataggcgataaaacatgctggttttgtagcccatgatttgaagaagtcacaaaaagattagccctgtgcgtgagccaaggatggttcaagatacttgtggacgtacctgatcgaatagtacgatgagccctgagttttactaattcttgagcactcaatactaaaccagatgaagcttggattacggcctagatcagcggtgaggtaatcagagtgagggaagtaccgtgctttgtagactcaacttgcaagagatttgagattacataaaagacgctaaccttacttaacaagcatcgcaagattaaacttattcaaatgctaaaaccccatgcctcctgaatatttatgagtggccatacgatccttagacatccatgtaacaccattttccttacttgaactcgtttttcaccaaaagcgggccattaacttgtctatttagggactaaaaagatacttatggcataagttggaagtgattaaacaatgattttg

SEQ ID NO: 21426 - DNA, 7903 bp, Cannabis sativa
tgtggctagtggaagatggatttaatttgaacctctcgctgggtatataggtatgatttttttaagataattgaatgcacgaatacattctatgatcttacctcttaagtttagaaatgcaacagagctaagacaaaatacaactcaacaataaaataagtttacatatctaccctcaaatatatacatattttcaaagtcaaattaaaaagttaaattttaatttattttcctacacaaaatagtgtaacaacaggttaaaatattggctacaacaagttttagaacttgaatgaatagtacttttatttttgtcctacttgaggtattaaaaaccccaatgccaagtgaggttctacataaaaccccatttattattattatttttttaatttgtaattcttggttgttttgtatattcatttttataatattttcttctattttattagttggtagttgttgttttagttacttcaaacttttagttgcattaaacttgtcagtatgattagtttatgtagtattaaatttaaatgaaggtttatataaagtttttatgtatttttcttcatgtttttaagttaatattaaaaactaggtgtataattagatatccaattaaaaaattggattggattgtgttgcctagaatttctctcaaaataaattgcagttcaggagcaagctagatggtaatgaaacccacactatgggacgtgccatattaagccacttccagattctgttaatttgcgagaattgctaaagattggtcaccttcgggaggctccacctagatgataaatggttttatcatttcctcttcatgagtaaactcaatccgaagaaaggatgaagggacaggcagagcatggcgcactgcacgaggttaagtcattgtaggcacatttaataaggcatgggaaataacatcctatacattactctaaaaaaacgtgctcaagagtttaaatctataatttcctagtttcaccatgccccaaatatcaattgatgactacataatgagctattaaatcataagcaagagacaagtttagtctcaccaaacacatatagcaagcctaaagcacatcataaaagtaagcaatcataccttatgattaaatttgagaaattgtgcaaaacatgacttatataaacacgacaatggtgaccttttaccaccattataagcctataataaacactcccatgatgtataaaagatgagactcttggaaattctctgtaagaaaaatattcattaataacagtgactcgtggactaaagctcattaatgtctcaaccacgcaaaaaagttatctttttttaacttccattaattactacaaacaactctaattaatagttgtcgaaaacctcaatcaacaaattagattttgaggtataatttgattggatgagatgataattttctaaatctaattactaactagattagatcgaattaagagaaaaaaatattagattgcatgcccaaccctaataccaaatgtgtagacacccttaagaaaacccaatagggaaaaatattaaaaaagaatatttttggggataattgtgtaataatcctaaaaataacagataagaatgcaaatataaaaatattttcaaagaagtcctttttatagaatactttctctttcagtgaaaggagaaagctttctctctcttctttctctctctgcaaaaaccctcgtttcgtttcgtggttggcgtagtttgcaatcgacctagttatggcgaacagtaatcttccccgaaggatcatcaaggttaatctctctttcgtcatcgcgatccctctttcaatttcactcgatcgatgttttttttattcaattttggggggtttttgtttctttctcatttgattctgattttttttcactgtaattgttttttggtttgatgatcgtaacaggaaacgcagcgtcttttgagtgagcctggtgagttcgatgatttactgtgttttgtttttgattgatttgttattgaaaaagagaaactttttatgattaaatttttgatttgggtttaaggggaaattgggttttgggtttgttttaatttggtggttttgaagttgtgattgatttttcttttttggggattcagctccgggaattagtgcttccccatcagaagataatatgcgttattttaatgtgatgatccttggcccaacgcaatctccttacgaaggtaactctttattcttttgtcttttggtatttggtctatatctgtatgtgttagatggttggttgtggctagaattgtgacagatcccattttggttagtttattcagttcaattttcggtgtactgtaaggttgcgtttggttggagttaatgaaatggaatggaaatgaatcaatttttattccattcctttgaatttctactattttggtgggaatgacaattccatgtttgttcatttataattttcttgatttatgaacaatgtttaaagttgcattttcattactctcacttttttttatttgtttattctgaactattgttgggtttgattatttgtgttaaagagagcacaaagtctatcatctatttcggtatgcttgattattggtttaaattgggtagggaagtaatagacttagtagctatcaaactagtgcaattttttctatacattgtgatgtgatgcttgggggaagcgattgtcccagctgggttgcatttggtgattttccttgatgatgttttagagtcttctagaaatttgggtttggctaagactacatgatgttgatggtccgaccagttaggtatgagtgctcttgaatttcggaggtatctcgattatatatattttttggggttcggaagaagcctcctggtatattgataatgcctgtgcctggtatattgttggaaagagaaattgtatgtatggtatcttagtaatgtgggaactttttacttgaactagttgctcattataattgtttagtctttagctttaatttgtggacatgcttgcttgtgaaaaaatttctggattgatctttgtatattatattatatatatattttgaagcaatgcatgcgtatatattaatctttgaaatatttggaagtttcattagcaggttgggtataattattactgagatgcaatcaaaatgagtacctaaactgttaaataataaaaagctgcttaagcctttgggtgtaattattactgaatacaatcaaaatcagcacctaaactattaaataataaaaaggtgtgttaagccttaattaagtatcctaaaaacaacaatgcttttaaaaagtaaatgcagaatcagaaaagcactattgaacgtggtcttagtcagaatagcacaactttagtattaagctgacattgacatgatcaacatgggaagttataagacagtgctgaagaaaactattagtaccaatactctatttgttatgcttgagaagcctcattgaatatggtgttgttacttagctgtttattgcttatgctgtcatgtgatagttgccttatatattaataatgttaaaaaacactatttgttcattagagtggtgggttgagttgagtgtatttcagctttagcacattcaattagataaggtgggatgactgtgttttccactactccatcatgccatacctttatctagggcatggacaagcaaacccaaatttggtgtttataatcagttgtttagcttacttattttgcgtagtttattcagattaacgtgccttttcgtttatcatcagtagtatccattttgactcaagaaaatgtatttttggttgcaatgacaggaggagttttcaagttggaactatttttgcccgaagaatatccaatggctgctcccaaggtactttcactttcgttcttttttttttatggcgtgtcttcagtaaagtggtacaacaacacagtggttcagattcagtaaagggtcacacctagaaaatgctcaattattgaactactcagctaaaatacaattcccgctgtttcttattgttttgataatgtttgtttgaatgagagtttcattgggtgatagctatatattgctattgtttttcactcggacaactatttagtttgactgaaaaacgacgatcaatcatttgatatattaacagtgtttcatctttgatttaccttattgtttacctgatgttcacctagggttgcaagatccaaataagtgggagagcttttaaatggagacaatagaacttaatgaatttacttggctctttctatttgcttcctttgggtcttctcggtttgccattttctatattgtcctcatgttggtgatgttgttttcaactgtactaatgttgcatataaatttagacttgttagtaatttttcaggatgtttaccttgcacaacttgatggtcatttaattttgtataactttgttaacttttcttctattttgttactgttagttacactaccaaatgaaaaagggaatatttttgataacttttttcctttacaacctcatttgtcttgttttgtctccgtatgagtaattacttttctttcttacaggttcggtttctcaccaagatatatcatccaaacattgacaaggtagcaaattatacctttttctatttgttacttttttcctcttatcaagcctttgtaatgtttttattcctttcctcgatgatgcagctcggcagaatttgtctcgatatcttgaaagacaaatggagtcctgctcttcagatacgaactgtacttctgaggtaccgatatgccacattcttccttccgccattttattaattaaatttctgagaagcctttgcagaacgaaacagacatcaatttattgctgacatcaattttatatatattgctagcattcaagcacttctcagtgccccaaaccccgatgaccctctttccgagaacattgccaagcattggaaaagtaacgaagttgaggccgtcgaaacaggtagatagtttcttcaccctattaacgatcacaacagaacttaacttactgcttttataaattctaatttttttctcgtgttgcatcgaaccttttttgtagctaaggaatggacccgtttgtatgcgagtggtgcataaaggcaaaggctggaaaactttttccatgcctggaaaataacattttattggaatgtgtatgttaatttgaaagaaaaattgggagaattaatgatgcttttgaaaatgggagcttaaaaaaatgttgggtctaaatcttcccagtcattattggatgtcaattgttttcctctctgggaaatcttttgcctctgtaacctgtataattatcaaattttactttcttctctgaaaaaaaaatgaattgccctttattattttgagcttctattttagttagtttacatgttttttttcttctctttcttctagtcatgagtgttttgtattttcttttttaaaaaattaatttccaagtattatttgtttttatttattttgctttaatatgctagttcattactatcttatcataatgaaaaaaaattttgtcccattaaatgattacatttttgtagatagattgttgttatctattcatttggtttgtaagtactttttttttctttgttgttgaaatatttgatttgttatacattgaagatgtgggaaactttgagttgagagtaagtgtaagagaaaatattaattaaaaattttatgtataggactataggctatgtatagtataaaaaaattagagtttttcgttcttaaatttatatctatagacgtcagctattcgttgacataggtgtggtttgtgttttattattacgattgatttttcactattgcaattagtcttgtctttgtgacatgattttgagtgttttcgacttgtatttgtgacgtggtggttttgagtgttcaattattgtttgtttgatatggttttgtttcgttgttggttatttgtttctcttgccatcaaatagctattagtggttgaaaataataaacctttgcgattgaaggagttattagtagtgcagttatgtaccttgcataatagctgaagctatgaggttaatagaatttgctacaatagtttctactgttgtgtcttctaagcggtagatgaaacatatataggtgttttttaggttagttgtgatgttacagtattttttatctgattatatttttttagcttttttgtcaaacgttttggaaattgggcggttgcttatttgacttgttttataattataatcttagttgtgtctccaacaaagaagatgttctgatcagattataaactattattttagatagttattaaaattgcatgatttattaaaaaaatatataggtatttatatatatatatatttatttaggtattgttaattaattttttgattaattaatcaaaaaccacgaagaaattacaagattttgttaagtaaaatttaaaaaaacaaaaaacaaaatggtttccaaacaggcctttaataaatagaaattttatgaaatatttttgaatttttctacaaaataacttttattgtcagttatagacacgagtattgttattaggtactagtattgcttaacactatttatagatgacatcttaaataattagtgatattttataatagttattaaattaaattatgtgaaattcgatacttaattatatttatagtgatatgacacatttaagtagtacacatcttagcatcttttcttattgcctcaaaccacatctccttctaagtacattttcaaaaagccaatattcctcatggtttcaaagactatatttcattggtattggcacatttgactccattgtgttagtaattgtagaatatgataatgagtttccttagtttatcttaatgaaggaactttaaattttgaggccaatattgtatgctctaaacgatattattcgaatccgtatcgtgttggattgtatagtacaaaaattgaagttgttaaaatttaaactctaaacctttaagttatttgagcatgcaaattacaaatgagttggaacataattttagtaatatgaatattatcttttattttacctaccaactatttttttttttttttaaaatgggggcctgagctgtggggtgcttaaagcagtcgcctccactcatctcatcttagactcgattctgactatatttgatatgaatttatataaataggttgtgtataattatactatcttcaccataaactcgatttcgacctcgaactcaccctaacccaaacttggacctaactcagcccggcctcgcacctgacccaacttaacgccggactcagaccttggactccaaccccaatcctagcctcaaaccttggactcgaccccaaacccagctttgaccttagccctagactagcacccagaccttgagctcgaaccctggctccgaacgcgaaaactatccctgaacccttgatccaagcttcagccacaaacctgacctcaagccctggacctggcttcagaccccgacctcaaactatatctaaatattataatacaagctaatacaaattatttcttatctattaaataatataattcatattatattatcattccttatgattgtaaaaattaatacaatacaaaattctatccaaatataattttcttcatacgaaacagacccttcatgatcattcttccataagtatttaaactaataatcatattaaaaataagggtaaatggcggtaaaacccccaatactttcattttagtttcattaaatccccacaacccaaatttctgcgggtaaaccccc

SEQ ID NO: 21427 - DNA, 2406 bp, Cannabis sativa
  modified_base (2336)..(2347): a, c, t, g, unknown or other
tctcaaaatcacttctcgaaaactaccacttcaaaataataagtgttgtggtatttatagattagtgatacggatccctaattaggtggctaaggatgataagttgttaagttagttatgacttaattaacaaacttataaactcctcgtaaccatatctccacgccagcttaagttaaagctcttttgaatgagaaccacgctttcgaacaatggatagaagcgggcgctgaagggacttcatggataggaatagcgacagctggagtcgactattcagaactcccttccaggagagaacaactagtcatccggaactcctttctggaggaagactagctttccctggagactccttcaggatggacaagttagacttttgggaacgcccttctgaatgatatctaacttttcgtaaataaataacatttggagacctatttatttggaggaactatacaacaaattccacctagtttatttaaattaaaatatgatatggtgatgatgaaagaatgcagctattatgcttggtattccaaatatctaagtatactaacttctgatattgagcaagtccaagcagtgcttgaactcgttcattgttaagatcccaacattagcaagattatcatttgttatgaccttttctaattcaaccagccattcttttatattttctttaattcagtatagtcttatgtcaatgtgtttgctcttttcatgataaattaagttcttgcaaagatggataaatgactggttgtttgagtacatagtcactccttcttttagttgtttcaatttatatagaattctccgaattcataaagcttccttgaacgcttccgtagtaaccataaattctgcttggtggaaaaagcagccatagactgtaattgggcctttcagcatatacagttgtaatttgtcatgaacacgcaagaagtggctgatttttttggtatctttattcgaagcatagtcagcattcacgaatcctttcaactccagttctccttttactttttcgaaggtcagaccataattccaagtgtccttcaagtaccttaataactatttgacgaccttccaatgttcaatgcccgaattggacatgaactggcttaggatgcttagagcatgagctatgtccggtctggtgctcaccattacatacataaggcatcataaaaccactgcatggggtacatctttcattttctctttctcctcctcactattcaaacactgttcatttgataagacaaactgtctgcccaacgatacaaatgtactctttgcataatcttccatgtttaatttttgaataactttcttaatgtacccagactgctttaattaagatcattgtatcttcttttttgttccttgaaacttcaataccaagtatcttttgaactggttcaagctccatcttaaaattctctctcgagcttggctttgatacttttgatcacagatttatctttgctcatgaatttatctttgctcatgatgagctatctttgctcatgatgagcatctttgctcatgatgagcatatcgtccacatagagtaataaaaatacaattgtaattaaattgctccagattcttatagtataaacattgatcatatgcagattgtttgaacccgatttgttttatataagtatcaaactctccattccattatcttggggacagtttcaaaccatataaggacctgttgagcttgaaaactagttcaactcattttcctaccacttgaaacttaggaggttgcttaatgtagatctcttcatctaagaattcatttagaaagatagttttaacatcatgttgttcaactttgaactccatttgagttgcgaaagacaacatcaatcttatcgtcttgtactttatcacaagtgagaaaattttagcatagttaattacttccacatgtgaacatgaattgccacctctaccagtggtccatagcactattatatatataaggttgttagtgcatttaactattgagtctcatattttttaatgtgataaatattatggaatatttttaaccattcgaaaagtcacatttatgttgagcaccactatacttaataacaatgctcgaattaataaaagatgatatttaataatcacaaaaaagaattgaataaccaaactaataattagcgatggataatcacaaactcttacaaatgtagaagattttagcaacatcctcattttcaacattgaacttaaaatttatataaaaaggagaaaaaatgcaaataagaaccatgtatagctcaaattattattattattattannnnnnnnnnnnttattattattattcaataaatataggagagtatagaagaatttcttttttttagagtt

SEQ ID NO: 21428 - DNA, 1985 bp, Cannabis sativa
tatatctcagcaatagctacagtaccattctcaaaaaggtcaactttctttacagctccttcatctaagtactccaagaatcttgagtatgacattctatttgaagttgatgaaacagggctctctggctcagctgcctttgcaggggagctaaaaacagagaaccctgttcctgtaatgccaaaagtagtaaactttatcaaatttcttctactgagtttgaattctgagggggtttgaggacgtgggtcttgtctgtttgtgaattttgggacatgggtatcctttgatgaagtgtattgggatttgtataagggagggagtgagagggagagagataaggcagtggcagtagtagacattattgtcttaaaaactcaatcttgcaatgttgtttgaatttgtaatagtaatgtgtttaatgtttgaaaaattggtaacttggtattggtaaagacttgtttaaatatgtacaaactaagagacttccagtacttttttttttgtcattttcttttttggtcttgaagattccagaaaggtgttagtagttgttgttattagttgttgttattattatggtttataaatcaagcttaaatagttgttgaatgaaggttcttgaaattatgttggattaacacaaacatcgtttggacaaattttatgttagccacacacttggaagaagaaaaatggtttattatggattagggtgtgactttgaactctattaatcacatcaaaataatgatgccaagtaataagtggctttacttacattctaaaatttcaaatcaatttttaaaagaaaaaatcaaaaaaaacaaaacaaaacaaaaacttttgaataaaaaataattgtttaaagaaataaaaattaatatacaatgtatacattattgttttttttttttttttgttttttgaatattaatttttgatactaaaagaaagatgattgttattaggcacataaaaataattaatattaaattatgtgaaactaaatatttaattgtactaatattcatacaactattttttttttttttttttgaagatataactactcattaagtgtaagtatcactaatattttttagaatttctataaaagaaatcaaaaagataatgttttaataaaactttgaagccctcctccaaaaggccttcgtagtgaagctctccgaataggtgccatcttgtaactacaaaaataacactgtaaaaatatggtggggtacggtgcaatttggacaatttacactatcattatcatcaaatacaattaaaaatttaaaaataatcaatctagtaaaattttaatgataaaaaaaaaatctaattaaaattttaagattatatcatatacactaatcaaattacactgaattaactttataaaaagattacatatactacatatatttgttatatattaagaaaaatatattataaaaattgggtaattttattatagaatgtatgatgttgttgaactgtaaatataaaaattcaaaccataaattgcactctacgtgatttggcaaaaatataaactacaattacactgtgaataattttaactatattttttgtacagtatgagcagttagtgcagtataagcggttttacgaatacccctactaaggtcatctcgaacctaacaataaaatattatatatataatgtgagttttttcacaaaatactttaatttaactgtaaaacttatcctatttttgtgatagtctacataataataggtattgtagactagagtattttttttaaaactttttaataattaaataatactttttagattagaattaaaaaaaaaattagtgataaaataattaaataaaataatattgttgaaataaatccccacatgccctttacaatgttcagatcaacatcaagcaaagattacaaagcagtaaagatcctaggtggccttcaacctctaacaacctaca

SEQ ID NO: 21429 - DNA, 4452 bp, Cannabis sativa
tgttgttgcatgaaaggagggatttattgatgttaatttgtgtaatatgtatatgtttgtgtggtagcctatcatctacagttttgtgcaatcagtcttctgattgattcgctgaaagtaaaaaggttaaaaaaacaaacttcaagtctcgtgcctctcccaaagtataataacacttcatttcatgaactctatcccccgttcgtatatgatggtaaaaaactttagaactctgctgtatatttacctggccttacactgtattctatcttgtgtctgctgtggaattactttcatatgttcgacttcgactgatagtgtgatagtttccactatttgtgattgtagtctaaatgcctccctcaatgtttgtgagtttgtgagtccatatttcgcatccttgggtgaaagttgatgtacaaagaactcaaaactgctgtgtggagacttttcctaggtttgtttttggagtagataagtgaatttcaagagtacaagcttgaatttactatctgttttagtgtaaaaagtatgagctacattttggctctatatttctgtaccgcatttttttcttggtgaatattactagctgaataggcactgtggagtttgattttcaacatcttcatgtatcaaatgaaataatattagaaaataaccatataaatgaattgtaactccaaatataatagccctgtcctaaatctagatttgtgtctttccctagtttgacatatatcttcgaatcgttcaagtctaatcagttgtctcagtgttattttgtactagtatacaatactttacaagttgaacatatctgcaggctgcaaaggaatcaagatatgacaaggaagctgtgatgaaatttttccgaatggtccgtattcttctcttttcacctgtttgattgtttctttcttgatatatatttataataggaataagaaaattctcatataggattggtgtcacttttgcccttattttggtatatggaaaagtattgatgtaatttttttaatacgactgtagcaagggatctccaccagcttttgaaaaattaagaataatgtatggtgtcaaaatcagggttcaaaatgccaatttttttacacattcataaaatgaacgttttgaagttgaactttgattttaacattgtaaattatttcttgaaaattggtggaatgcttcttaaaactacaatgtacactgcatataaaaaaatttgggctataatttctttgcatacaaacaacatagatgctggtagggctgaagtgacatcctatagtagcccaagatgtatataagtaaatctatgtaaattgttatagctatattactatagtactgcactggaaataattaaagtcttgcttttccatgtttcagttgatcaggagaagatatttttcagatgaattaccagcttcaaactcatggtctgtttctccaaatcaaagacctgcgcagcggttggatgaaaccttaagcgatgatgaccaagcatacaagaaaactaggtacattaaagaattcatttctttcgaaatttgtttcgatctgttatattgtttgttgttgtcggtattcatgagtccaaacaacacatgtatgaatgatacttaatttagtgactaaagttttgaaacttttctgtcattctcaacctcccaattgtgctaatgcttatctttctaatcccctctcattcattctttgtcatggtctctgattccagtttcagcggcgatccctacaaatacaatatgctccctcctcttccagctcaacgcaatttgactccacctccaactctttaccctcagcagccggtttcagtctctgaaaactataacctgcctagatttgctctgaatggctcttctgaaattggtagtgccgccagatcaagacggtcggatatcaatgtctgaagtttgctccttttcggctttttattctagtcactgaagaatgcaatttattttttttgggcctgaatatataaaatattgtaatattgttgatagaagctgaagcaatttacactttttctttgggctgttcagatagaaactggtacacttgattcttttatatctacaagtccctccctcttccatcacattgtaagttgtaagtggttcttcatgtactctgtttgggttagaatgtataatgattgatttgttcaacccgtttgataacacgggaaattctttcaaccaaacacctcttattttgtcattttgttttgggagaataatttcaatacatttatcatacatcatgatcaaggacattacctccttatcggaagagacagtgctatcagtatcatatcaactatctatcaagtccctagttcacctcatttttatttaactctacaatcatatcaaaattcaattaaaaacttgtattaatggcaatgaaataatgttaaaataaaaattattctttgaactttagaacataaaacataatatttagttaataatgaaaatgattatatggatcttcatgaaaagtgcaaataatctctatttttttttagagagaaaccatatgaagaaaaattaacaataataagtataccaaaccatttacaatatagaagaatgaaacccaacaatagcctcaactaagggtctaacaacaaataatttatttatttattttttttttcatcttgaagagaaaagaagggataataaggcaccattttttataaaaaaaaaaaattacatttttacgtttaaataatatttttttacatatttacaatttttcataaaaataacaaaaaaactacataaaggtaacatgaaaattacatctaaataacatcaaaacaacaacaaaaataatataaaaataacaaaaaattaacaataaaataacaagagtacaacaaaaaacagactgtattttctgtaaataaaataaaaaaaaatcgtaaaaatattcaaaattccataaaaccgtatttttgtaaaaaaaaacactttattaatcaacaagcagaataaacaagctacccattgattggtcaagcaacctaaaacaacaattacgacgttcaaattctatcaatcacatcaagctcacttctagccaacttcctataataatattttgaattcgactttgaatatctctcgtaattgtcatattttcatatttgtgtaaaatattataaaagaaactattatatatacaattatttctatttgtgcatatcctatacattgtggttgaggaaaatacaaagataatatcagttaagagcctcttccgttcattctgtgtatttcttttgtcttggtctattgatatggtctcttcgcttatgagttttttagtttctgtgagagtttttgtgtggccacgatagttatggtgtcgagtagttgggatatgagtgtagttgaggaggaaatacttcgcgtgcagaaggaagatgagggggtggcaatcggtggtggtgaagaagatgagggtattgatatgagatggtgtctagtgggacgttttctatctgatagagattttgactttgacatcatgcaaaacatgctgacttctctatggaaacctaaaatggagatgtttgtaagagagttaccacctgatcgatacttgctccagttctatcacaagattaacattcaaagggttattgaaagtagctcatggacttttgatagaatgcaattgatccttggaagactaaaggaagaagaagagccttactctctagttttgaataaactagatatctgggttcaagtttttaatgtgcagctagggagtatgtcagtcaaggtccttcgtgagatagctaaggtgatcggagagtttgtggaatcatatctaaaattttttattagggtccgtttggaaagccacctgagaactggaattggatgtaattggaggtaattacacagtttggcgtgtttgtgtggccacgtaattacatagtaactgtgtaattagaggtaattgggaggtctcaattactctctccaattctcatacccccctatgagacttgggtgtaattacataccaaaaataaattcaaattattttaattaattgatatgatatttaattatttttaatgtattgactttccctttttctatcaatcatcaaacacggtaatatacatttccatatacaatctttcatcaacctattttctatatattccatctctctcaatcaaaaaaagataaagacaccaatcatttatcaacctattttctcaaatcaacctacctataccatctgccaaaaaaaaatatattccatctcctcaatactaacaatagctcctcaatacaccatcaaaaaataaggttggattgtattagcatgttgtgtacttcacaactttattcgcaagtagaattgagatgatgaatttttcga

SEQ ID NO: 21430 - DNA, 1745 bp, Cannabis sativa
agtcccattgttccaggtgctttatgtggcctgcccagttccctacctataacaacagttgtcagtggtggaggagatggcaccattatttcagagatattctctatattggccttttgtacttcatccttcaaaaatgaggtacaaacaaatgaaacaagtaacacgaagtgtaaatttaccaaacctgctgctctagttcaacatgcttgcctcatcgttgcgacaattgctcagtgtataaaggcaactggaagaaactcggccttgttcatgcttacaacttcccaaaagaaacaagttgctagacttgctgtccttgcacactatttctcttttgatgataaaacaaaaatttcgtttctaccttattgtgcttcagctatgttggctcttgcatccattctatcccttgaaactgggtctacagttgaaacctctatctctgaaataggagtgcctttaattcctcgaactgctgtactttgtgaatggctccaagtttcatcaggcaatcaagataaatctgatactcatactacaaatgctgccctctcatactgccatggtcttagggatggatgtgtcggtctgttagactgccggcttaggttggggggacctatagctgttaaagaattgtgtgcaagtggcatacctctgcttctgattgatttgttagctaaatcccctttcaaagcatctcctcaaggtgccgagagcacaaaagatcaagttgggctatctccacttggagtagtatggactgtttcatcaatatgtcattgtcttattggtggagctgtgacttttcgacagattatgaaaatcgaacacatcaagctcatttctggcttactaagcgatatacatctcaagcttataaagcgttcagtcggtcctggtggaggcaaagaaggcataagaattataattaatgctgttattgatctattagcatttcctcttgttgctatccagaatgctcccggcttgccggcagccactgcctctgtgaatagtggtttgcttcttaatatggcttcaccaggtgggagggtatgcatggaagacaaagacatggtaaaagtaatagaggaagacttgggaaagtatagcgaaatcctttcgcaggtttgatcttttatccctatgcttttgtttaactactttgctatgatctacaacttcatccctgcatttatttcgatgatatattcttcagtttcgtaacaaagactctccacaaagaacagaagatcaaacaagaatgacaagttaaataagaatggagatatcaaaatgaaagtaataaccagaacacaaacttaaatgtaaaagagttgctacaagagtacaacgacattatgtggatcgatcaagatgacattgtgtcccttgtctaagggtagatatctttattgatttgagatgagagaactgcaatctgttgttacaaaagagtaacagttacacattaatggagtctagctccagtacaaacaaactcacatgagagaagtcttctccaaggaagaacaatctttttaacacccctcctgaactctctctttctctctcaatttacaaatctgaattcctcaaatcttggagctaaaagttatcttcaatactatagaactagcataagttttccaactgtcataacagaatgttggttcattctgttatgccttttcacgagatgtccgagtagttatcataggatcttaagtattagctaa

SEQ ID NO: 21431 - DNA, 2748 bp, Cannabis sativa
gtctttacctttgttaaaaattcaggtgtgtaaattcgaccccgaggaccatctggtggattttctggtgtatacttgccagtaagagcacctgcatatgtagaaaatattaagagaaaccattcataacttttgtgtttgtttgaaccagactaaaccattcttcacatcagaaatttatgatttcttaatgaatcggaactatgagctttcaaaatatttgatggtaggttccaagacaaatcgaaccccatttcttgtgagagcaaactatgagacctaaaccacttgccctacctctcatgaatatcaaaatcacctcacattcttctcccatgacattgtaatacaatccttctattagtatcaggttcaggtactaactgcttggtagattcgtcctaaacgagggctcttacgaggagaaaaataacagacacgtcgtagagtagtcaaaaacacgagtaaattccaaaagacgatcacatcacatattaacataacaagatgaaccacaagagaacacaaagccagtgaagaaatgaagcatatgttgcaaatgagtttgaataggacttcaccttgggcgatcggtgaataggcaatcaaactaactccaagttcatcacaggtagccttcacaccattttgctctggtaatctgtaaatgaggctgtaattcacttggtttgaagccagtgggatgcctctctttttaagcttctcatacgcattacgcagtcttttttctggaataagaaattgtataattccttctttagaatattggctcatttatagcaacatggttagcaaaacattgttttattttcttctctaaaactactgcaactaagtgttacatagaacaacatatagaaaatgtgacaggtttcctgcaatatcccaacagagaaatcttaccgctgtagtttgaaacaccaaccgccttcaccaacccttgctcaacagcatctcccagaccatcaatataccctgaaaaataagaaacttagtttgatttcttagaatcatccttaatgtagagtttcaatgaataaagaagagattgttggtatataaaaccttcatttccccatactccaggcctgaaaacaatcaaaacaattgctcagcttataataagagaaacggggacgaaattcacacacacagaaagctcacattcttggcaataagctaataatacataccaatgaagttgataaagctcaactgaagaaagttgaaggcgattcagggaatccttaagagcattgaccacactttgacgacctaacctccatggcagagctgcaaatttggttgcaaccgccacctccgtttctggatccttttgctttctttccttgataaatctatatcaaagatggtggaattgtatcagaacaattgaaaaatgaacaaaatacagcaaatgaaccattatcaacttggcagattgtaccttcctagtagagtttcagaactaatggcacccaaagcaagctgcaacaattaatatagctttaatggcacttattgcataggcataaaggaaataaaaaagacccttcactcacccttgagccataaacttcagcagtatcgaaaaaggttatgccgcggtcaatgctggtgtcgaaagcagccttggctgccttcattttcctatctgcaaccaaaatgctagtaagctatttagtatgcagacacacaaaagacagccctgctcctacagtgatatatatatagtaacttcataaaattagtgtgccaattcaagtgagaggtggttaatggttattaatatgctaaaatcaaaatgaatataaatgtggttcaagtaagttgttcattagctataatgacattaaatcattttccataaagaaaaaagaaaataatgactctatcaaaatgcttaaagcttcaacaattatatagcaactctacaaaccattgcaaattattagctaaagaatttaactattagctacaggaagaaattagtaaagttgttggcaaaattgtttcaattcgaaaagggtttggaaataaataattattaattaccatcccagtcaaagttattccaatagctagtgtcaccccatgaccaagctccaatcccaagctttgtaaccttcaaatccgaatttcccaacttgactttattattttcctctgttttcaatgtagcaaaatcctcagaagcaatagctctgattctctgtactctcccatggctgaatactgagaagcacgcgttgctcacgtgcatagccatggctgagttctcaactgggtttctacaaatctttccgtcaaatgaactctgaacgcaaagatcaaagctttattgccatttttgaaaaacaaaaacagaaaaagaattgatctttaattagttagacaagaacatggtatttaagtgtacacgtcaaatgtatttctaggatattggagtaaggtggtatggttgtgacacgtgtcgtcaggggtttttgggggagtgaaaaacataaggcttgaattcaagtaaaatctcttctcgagtttgggcctgagaacagaccttcaacctgttgaaagcaaaaccaaacaagaaatgaattcgaaaaatacatttttttcttcatatttacacttttattcttctcaattttagtcctttttgttattagcaggacacccaaatatttttataaaatgtatcgggcgcttctacaatgtattcttttaaaa

SEQ ID NO: 21432 - DNA, 3473 bp, Cannabis sativa
aagctttggagactgggcaaattctgaagttctagttgcttcaaattctggaaaacaattagggagtctttttcttcttcctcttcttcattactattatgattaataataatctcctttatttcattacaataacttatttccattcgttgcaatcgtacaagagtggttgctgttgaggaagacaataaatacctcagcccatgacatcctgatactatcagagcttccaagttgtggaaaaacataaaggagggtgcaaagctctgtaatctactacatccccaaacatctactcttcttaaatttggaaataagagaataatagtattattatgtgatgatggttccaccccaaacacatgatcaaccatatcatcagcaccatcaatgtatagttagaagaagaagaagaagaaggtgcagatgtagatgtaagatgagtagtagtagtgttgttggtcacttcactatcaccactactacttaaattcacaaagcagcccgacaatgtcagtttatgaattgtgtgatatttgtcaaggaataacttcaaatttggtacaccaattacttcatcaggagatgtgcaggtcaagtgaagtgtatcaaggttgggaaacaatactattgaattactactcatctcaaatatctccttaattacttcactccaatcacttctcaatacctttatcatgggaaaaattacctacaaaagaagattagaagtagcaaattaaacatctagttaattaataatttaaatgtgcaaaaataaatttattatttttatgaaactgaaagtacaataccaattaagcatcgtgcatgtatatataaatgatagtaccttattattgtgcttgaagagactttgtttatttggagcggacatcatcctatctttcttttcgccaataatattattattagtagtagtaataatacatgatgatgatgtccttttatcacccataaataattccttcagtttaggacaaccttctataatcagttgagacaacaatggacattcaatgcaataatctcctaattcacaaaatcttataaggtttggaagatcattaagctcaagagagtcaagtttttgaaatggtattattgcattaatattgctgccacctgatgatgatatgtattcctcatcatgatcacttactattaccgcttccatcttctcacattcatttacacttaatctctcaagttgtacaagatttcgagccatggcagatgataacagagacttcaaattgttacaatacgtaacaatcaactcttttaagttgggaaatgaagtctgaaacataaaagaatgctaattattattaattactcacttatttcacttttagatcaataaccaataaaatcatcatgaaatcaaccaaatatgtcttacttttgagatgaatcattcttattcactacttcccactattacaaatatttcaatatatatatatataaaaatgtttagattttgagttttgattatacacactagtggattatatattaataatattctatatatgatgattgggcttctagatttaattaaacacgaaaaaagaacaataatactgccatatatacacaatagttaaaacatcacgtgtatgtgtattatttgagttcagtactatatacactacaacaaatttaagttttaggggcgacaaattttgaagcgacataaaattgaataaaactttggtttcttttgtaaggaatgatatattttcaagttgaataaaacctttccctttatttaaaaaaaaaatattttgtaagttatgttttttatagcaaattatgttggttgttagtttatcttttgggtctttagttgtatctttcttgcctttgatagttgttcatttaagattttgttagatgcgtttgataaatttgtattcatttaacttttgccatgccagtttttagttcgagttattagttggtacagctcattgccagttgtgataagatggtttattattggttattaagtcaggataattgaagtggtggttataaaaagtcaatcaagcattttctaactaacttcttcatctttgatagaatcatcttgagattcttgctttgctagggcaaattctttttctgtataatctttgtgtgtgcaggctgtcaatcattggatcttcaaggattgagaaaggaatgttgatctgcaatatctgaagggagttcaaactaatttgctggagggagttcaacttatcgaaagtaaggggatcttgtcttctcagatctaagaggacttagattttgttcttgattgttaatcgagcatattagtatatcaatatttttttaaatcttatgttttactcactttcaagcatattgggcgaccaattggtaagaggaccatcatgtctttaccaatgcaagaaaagcttaaggagagtggtacattctgaacaattgaaatgtagtggagaagtatatcttgtaagatactttttgcattcttaatttagttttcttcactcgcgaccttctcttacaaaaatttatttatgtgcagtgagcataggaacgagctacaacttagtggtaatcaaaatcttgacacagttcaagagaacaagttttcgagttggttcaagtctcgagtaagtattgctttttactaattttttcattcaattacaagttcttgtactagctagtattgattacatctttcactcaatgatagatcaatcaacttcaagcggatagccttggggaagtatcagatgagttgcacaccatcacaaattcctctaatctagcatgctattgttattttagatgtattgttcacaatgtttaattcctagttgtggatcgggatgacaattgtacaccacccaaaacagtggtattttggtgagtgactagagaaggaaggtggttggtaaaaaaatttatggcgtactcaaacaagtgtacaagttcacttacttgaatgattgtagtgattatttttaggtgcaagtggtggacacaaatggtaacatgacagaaagtgatagttttttcactagtgtctgtgtcacccgtaaatggtaccaaaatgaaccatttatacttgcatctcaagaaaatttgatatattacattcccggcctaaagaatgaagttgattggaagcttgtttagtgtttacagtttacaccccccataatgtttgggatttcctagatgatgatgatgatgagaccacaactatacaagaaaaaactcttcaagaatccaattagtcgttcaacaacttctttcagaactggtggacgacgatgtgtcgaatatgatgtccgtggtgatgatgatgtgtcgacccaattgaagtgaccagcagggacagtgagcagcctcaccggcaagattttgataatttcattatctatagtgatgatgaagaccatcgt

SEQ ID NO: 21433 - DNA, 7037 bp, Cannabis sativa
atttttattttataaaatatggccacgtaggataatttttttgtgacctgtcattgccacgtggacaaaattaggacttaacgaggctagacaaacgataccttaaaaatgtaaatggaacattactttggagggttttcccaccaaaatatgaggttagatgattttttgcaagtaaattgatagttgggggttttaccgcaaatttctctttttaatttctgcactatttatttctggttctgttttgattctcaaaatctgtgttttgcagtgacaagattgcaatctgttgctgcagactgttacaattgcgtttgtactgaaatttagtaattattggcatttgcaaatacggtttttcataaacaattgggcaaaaatgtgtttcttaatcaactttttacagccttgaagtaaatcctaccaaaatcaaagttcagttggccaaatactaagccatatttttagtagttgtgttcacttaataaagaccatttttagtcacatatgacatggggtcttggttagtacagcctcatgcaatgaacttaagaatgtacatgtaggataatcctgaaatgaagttctactcatggttttttattcttaattcagaaagaacttaagggttaacattttattttcttctctttttttctttcctctatgaggcaacattaacatatggtcaaattttagctgaggaaaataaaaaacatacttctttggataagaagaattatttagcagtctctatccactcaagtatgtgtagattttaagataaaggtattactgtttgtttcactttttacttataagccaatggttctcagcttgataaagcttgtaataatttcttattattgcaaacatttagtataggatcatgtgctcaacactaagactagtgaggtatactactttgtagaagaaatacaataagattcaacaagcatatttgatatttagtttatcaattatgttgacttttgatgaatgagtacaaacccctttttttgtgctcaataattccttgattttatattcgaaaataggatctttataagtggaaataatcatccttaacttactagtattttactcctacctactagactagtatctaatttttaaacatgattttatgatcccaattggtccatctttgcaaaataacaaaccttttcttttactcttttcttatgcaatgtgcagcatcaaaatttcgatgttgacaattatatgaacttgattattgtaccttttgaattttatcttcagcaatgttgacctttttggttggcaacattattgtccttatgatatgtggtttttggctttggcctaattagtgattcaggttggttggttccactattcaattaaattacaattagtggtagcttaatcatggcctacataagatatgtaaataaaataccaaacctaatctttcagtggtacttctatacttaattctagattctatgagtaatcatgttcctttgatttcaatcatgtaaaagtaagtggaaatatgattttgttgctgattaaggaatcctgaccctttttttctaaagggagtctttgacaagtttgttttatatgccatattcattttcagagagtaccatctaaagcaaaaaacacttgctgcaacaattagaaaatatttgtatattcatgtgaagaatgtgagaagtttattgaatctatttaagtatctatctggattctggacaaggaccaactaggaattaacatggttttagtactagacaagatttagctattgaaattaattgagctagtaatttttgttgaaacttcattgctgcaacattgtttgctgatataagcatttctttaagccttttatgtatatagatggagaccattgagtttatcttacatagtattatttcacttatttcattattttgtaaaactagtaaaatttacaaccacaaaaggttgtaacaactgtttatgtgaacagtcttccaagacctttaatgaattcaatttcaagtacatgatcatcttatccagtctgtttttctttctataatgtgttgttgttggtgatttttcaaccaaaaaagtatattctttaattagaggttggattattttgatagaattctacataagaaacaaacacaggaaaggaggaagagctggagtggttggcaggattagttgccatattaaacaataattagtggagaggaaaaacttgtgctgtttaggttctcatatatatatattattagttgatttgaagatgttttagttgaaaatattcttgctcccatttatgattttaaaagtaattactcctctcttttcttttaccttttgctcaagagtatatcctagccaaccaatgatgggacaatcatgtggctaagatcccacttttaagcccagacaaatttatgtcatagtacattttgctatagtaaaagtaacatggctgatgcaagagattagcatatcatttcaagcttttgcctttttttcattttttatccatgatatcataaatctgaaatgcccttattttttttggtctctttagatatttcatatcagaaatttcttaacagaaatcatatcttactaagtttggcttaagaagtgtatgcatcaatatatatatatagataaaggtctttggttttaatagtagtagtgactcatgcagcttcattgttctacaagtagtaaaagggtacaatctgaaatgttctcctaatccattgaaccttgtgtcaccctttacaacagccacttgaactcttcctttttctttcttgttttcttcataaatttgacctttaattgataagaaaaaagaggagtatagtaaagtgaaatgaccttaatttttgggtatatgattagtggtgtatgccatctaaaaagggtagtgagtggaattggctctagttttcatgaaagtcattttcatgtacctgctatacactgctagacaacaactcatatgttaaaactgttttttgagtgctgtgaacgtgacatttcatcatcatttgattacctctctactaacacttttgtacttatcttccaaataacttcatttctctcgtgtctagaaatgatttcaaggcaccaaattgaactccaagacaatacaaaaagaaaaaggatttggttaaagtaatggtcagttttgtatttcaattttcaatctatatccaaagaattgtttcgtttgtatgataatatatatccaaagtcattaattaatagttaataataggtaataataggtggaccaccctgcttgctgtgtggaacattaataagctcattaaaaacgcagtcgtttcaatgaaagtgacacttaaattcacatgtgtgctgtatacttggccacatcgcctagcaaaatgagaagtggtgggtgggcgtgggtggtaccaagtctactattctatagctattgtgaaatgaaattgagaaataggtctccacgtagtttctgattttttttttttaccttatcatgtctcatgaaacaactacttcccttttatttgcattaaatcatgattgatgatccaattcatgtccaacaacaccattgtgatttttggaccaagaggaatcttcttcgtacacccctatataataggctatagtaaataactgcactgtcatttccatctacatataattcttcccataaatgtagtagtaaatagtattactagtactaccacttgtactgttatttgaaataataataatgcaaccaaacattgagattataattggttcttctctctaagtttcactattattttcatttcattagtgaaacctaataagacatatagtagtagtagtatgttattattactattccacatgtgatgggatatacgtctttatatactggaattggattgtttaaactattcaggagaatacaaaatatgtactgaaatattatatataatgatgcaccaataatttattacttatatatataagtaatatttagttcggtgaaattggtttaactacatttcaaaaggaaataaaaaacaaagttgtaatgtttggtatgggataaaatttgcacgggaataaaaaactctgaaaagttaataaggtggaaatattcagattacttaggataataatcttaaattctacttctgaaattagtggactttaaaatattcctattaattatataatatggtaggtctcacatacaattaattttaaatcattttttttaaaaaaaataatgtatgagacttaattgttagaccaaataatatataattcaatgaatataattataactaaatattcacatacacaatcatgaagcggacgtaatattttttaaggcaaaaataaaaataaacgtaaaattaaaaaaaaaatactcttagtgagaattgaacttgacttctattatgcctataaatattatcttttattataaatatatgtgataatcataactaatttaatatttatatacatttttttctcaattttcttttttttggggcaaaaagaaaaaagtggtccgccgctgtacatgcttctatgcagtacacccctatatatatgtatgaatatgagttagatatttaatgtaaccttatctatacatatgtaaaagattaaagtatgaaatatttagttaaaaagaatgaaagacacagaattttattttgcagtttttagttattttatttgattggagctgctattaattaattatgctagttggtgggggattctagcagttaaataagttcatggcatgtgccccaataatggcatccttaattatttttatacaactaccaaccaaaggaaaaataataatatatctctcaaatttgaaatattatgatataaataatgtatattatatataactaattatgtatgattaattatttttaatatattaataattattgatgaaactgtttatttctctcctaattattatcgtctttaatatactttatctcctccatgtgacttcacaccttagttctagtggcaattcaaaacaaaatacaatcttcataagagtatttattaataatggcaaaaccccatatgcactaagcttgaatatattaatttaataaaacaagctgaacaaaaactaaactaaacctttgatttaaataaagtaactggttattattatgtcagtttgtgtattatctgaggttgtagtacatgtgaggccaagcaaatttggctaatcccatcattggtttctgtctttttgtacagagatttttcttctttatatatatgagattgaatatttcacatataacatatatatagcccctttggcatcaagtactaccacttcttagatggtggtgattttattacttattttgcaatgctttgatttatttatttatttttatcaattgataaaagaatcaaatcaatataaagtgattaaaaagcgcatcactactacttatggtgcttcatgatttatctgtttaatcaattatttccctacataatttgcttataaattaattaactgcactgccatctctctaaataccgttttgggttttttttttggaaaagatctttatgggtttctcaacaattaattatttaaggcagtgaataatgtgaaatttgtcataattattatgatcccgagatgggtttttattttaatttgataaaataaatagatatttatatataatgcagaaccacccaagaaaataacaatataatagagaagggaagcttggaaattaattgcaacagcaatattcctttattatctttgaactttgaaggtcaatatgtataattaagcaaataagattataaattttttgaactttgttcaacaatattattattgaaaatcagctaatcatgtgggtcgtccaaactttcatgtgcaaaatgatatatttaacatataaatatgagatagaatatgggtgcccattaatattaaaggtctaagacatattccctcttctttaataaagaattcttatttgtttttccaaaataaaaataaaaattgtcgttcaaattaaacaaatcaaaggaagaaatctgtgtttaatttcatgtagccatatatataaataaatacagtatatatgatgagtgggagggaagtgtccaaatctcatgcccaatattaatatatatattacacccaaaaccaagtgtattaaaaaaattatctcccttaatgaaaaaatgggggagattttttaatggtcatattcataacatttattaaagccattcctaaatacataatcatgcatatataaatattaattaaaagccaaattcattcattgattgtatggtcaaagatatatatacatgggcaacccttagtagatgggaaattattaaagaacacattcatgtgtgtgtaattttatattaaatttaatacaacaaaagcctctcttattggacaaacttttgttgactctacccttctctaccaatgggatgttataccaaacggctgggtttatggttatatatatatggatatgtgtggaagatgcacccgtaaatcatttaagagtttataattatcacaaaaatataaatatatttctctttttgttagtggattatccttcaaacaacaatgacttacaaaagattaggcaagtttgccatatcagcacttccaatatagactttaatgctgaaagtcacattggctaaataatattgagcatcaccattagcatgtataggagtaaaacaacaaccaaaaatcgaaataaaaaattaaaaaaataaatgtttggttgtgtagttttatttataacttctgattctaaattcggattttattaaattattagaaataattttgtatggattataatatttatcggatattgttttcttgtatttttgaaatagtgtaacaaagaagtatttcaaatacttgctatttgactcaaactgatgagaat

SEQ ID NO: 21434 - DNA, 1529 bp, Cannabis sativa
aaaactgtccctaaaaatttaaataataaaactataacatcctcaaataatacctaaaaatatcattcctttcttaatagttgttacctaaaaaagcaaatctaaataacctctctaattaaaattttacatgaataagcttaattgagtcctaccaaaagagcttggaatatttttctcttatctaatcagcccttttcttttcttaaagaacccaataattacaattcaagattcccacaccaacgaatataataatatacgtacatatcccacaaatatatatttataaaatttccatgagaaaatatcaattaaatggatcaaacattctttacacaagcaaaaaaaaaaatggccatactaaatatatacttttctttcggtctttggagaaacaaatgtcttcatatatatccttatctttattctttttacaagtgtcacatatataggatatatcttttagatatggccggcctatataataacgacataaatgaattaattcctcccaaaagtaataaatagaataaatagaacatacccattactaataagaaattaatcacaagttaataatgattataagtgtcttatcaattaagagatatttaagtatgtgattatttggatttggattctatgttatgatagctttttctttgtttctatataaaggcgtgttttcccataaacttgtatacatcaaaaaacacaaagaatactaataaaaagtacttctttattacaacaagctctctttgctttgttttcttttttccttgttcctattaattagtacgtttgtaattaagtttcatataaagctagccctagctatatcaatatatcatcatcaatggcggcaggaaagactcattattatatgcaatcaacaaatattattgttgatcatcatcagcaaccttgtgtggcttacaaagggccttatgtgaaaacagtgatagttcctcaaatggctgtgcaagcacatattactcatcaccatgttcctcaagtgatgaaaacacatgaaggtggacatgcagtgttttcagattatggtaggactaacaaatttcctcttagagctatgtaatacacatgtacaaacactacttttatatattagtttgaacttgcgttatatatataaggattacgtacgtactttgtttatatatatatatatagcctatatatatatatatatatatactcctttactttttaatttaggagtggaaactgttaattttccaagacttaattgtactttagggacgatgtacttgttacatatatgtatatatatttagctatcctcctctccatatacgggagtgatgtactatctctacctgtgatatataaaaaaaattaatgttaattatatatatatatactatacgtgtatgcattattaatatatgtatatagttttttccttcttcttcttctcattattgttattataaattagctatttcttttaagttatataaaaacaaaaatatataaacaag

SEQ ID NO: 21435 - DNA, 3627 bp, Cannabis sativa
  modified_base (1003)..(1006): a, c, t, g, unknown or other
  modified_base (2969)..(2982): a, c, t, g, unknown or other
gttgctttcctcctttacatgcttgttacattgtgtttaattgctgcttaacttgtttgtatcgttgccatctcatttggttttggtagtttttagggttaagctttatttaggtcgatactacgattcaggcaatacgtaggtttttttagaatttccaactcaccaccgtcatgtttgataaaattctctccagggattaggactactttctgcttgcagcaatgtcccactctagttcaggaatttatcgtccaaaagatttagaacttgagtttcctatagaatcagccaccccgtataagcccaaccctccaaaacccacctccaaattagagttgaacaatgctagggttagggaacatgtagtgagaacccaccaggaagataatgctagtcgctataggcgtttcttgaaagaaatctctgaaggcaaacgctggttcttgcgagatgcggcttggctagaacctcccagtgcgtcctttattcctttcgcaaagcctttgtttttaccaaaagtcgtgattgcttttgaaccaggtgacttggactttgagataatgcctcccaagccacgtacatcaaagactccccaggaccccagagtcacctttgaagttgaattgatagaatcgaaggagcgatctatgtcaggctacacaggtgatatactgaagacatgtggaatcgaacttgggcgatcgtgacaagttaaattagtgcgagaaggtgagtttagttgtttccccctagcttgcttttcaagcggaccccaagggccaatgctgagaatagtacatgtggctcgactggcatgggctcgtggagccttgagcatatcagtgcaggggccatactccctcttcgagactacttcaaggattacataaaccaccttggggttgccccattccagctgattcctgtctcttacaagattctcgctactttgaaagtcttgtataaacaattgaactgggaatgccccacaccagtagannnngagtatctctattcggttaaggtcgttccagggaggaagaataccccatggggattctattatcttggtactcattctagagagcctaaaatcattttggacttgccaaacaaagtgtatttcaaagtcaacttcctttggacatctggtctttccccaatcggcacaaccacctttcacaaaattcataagtgattgtttttctcatgctcagttacgttaatccttatttgttagatttcttaccgatattttgtttgtttttttacagctttctcgacgagacccatccctacccctgagatggtcagtcgacacaggtgcctaatgactcttccctatggccttaggtcatgtcacttccttttgaacgaggccaatctgagatcggtgggccttcttgctgacaaggagtatacttgtgattataagtttcctaagtattcttcttggcagcaggttaccgttccagaggaggataaggcctgggatcgcgtggcttaagcacagtgtcttcaaaaactgcccctccagaagccggtgaaggagcattccgaggtaatcaatgtggttggtctcccacagtactcagggctgaacataacacattagtcaccttctgagactccggctttaatttttatatttaggattcccttctcgtagaccgagttgctcataagtttgatagttggtaccttagattccacctccatattaactgtcatgagtcatattatggtatagctgagcaatatggcactatggcagatagggtaagtcatatagacgcgagctgggatttagaaccaatcaagccctttgatatagtcaagattacgggctgtagggattttagtggatattatggtccttctaccctctctcctagtgatagctcgccttctagtgatttcgataattcccttaggtggaaaattatactccccctttcctttttcttatctaccttgtaacactttattttgttttgcagacatgggaggttttgaagatatcatggattggaaagggaagaagaggggaactaacccaggaatccccataaatgccgaggtgggacctcccataaggcaaaggaaaaccactgcccaccaaaagaattcattgtccgagcttattgacctcgaggtcactgatacccagactcaagaacaagttcctcctccaatcgctcctaacaccaacgctcctcctcctgagaaagctcattcttctgcctcctcgagccaggccattgagaccttgtcggccgcagcagaagaggctggatctgaattcgcccaggcgtacgggattgcttgctggcacaaactcaaggctctctttccccctaatttggatctaatcaacattgggagtccaaaagagatgcttttgaggaacttggacaacaacttcatggtaagttggccgtattattattattattttttctctttttttctcatattcatttgtttgtaattctccacgcttctttcctctcttttgcttccaatcgacgactctcagagcggctcaaatatctggagggtgaggtccaaaaattactatcccaatgcggggttgtgattaagcaacgggacaacgcctaacaagaaatcagttgcctcaaacaagaagctgagaagttaaaagaagaagtcgagaaggccatcaaggcccaagctgatgaatttaagaagaagcaagttgagaaggaggtcaaaaccatagaaaaatgcaacaaggttggccttcgtactgtatatcgatcctggatggcgaatcccaacatggacacgagcttcttggaggagaaggaagaggaaactctggctttctgcgagaagtccaggaaagaggaggaagaggttgaggcagaggaagaagaagaaaacctatccaagtctcccactgtaacaccctaactagtataggcatgttagcgtgatttttnnnnnnnnnnnnnnctcgttgctaatcaaagaggttattgaaaatcgtgaataattaaaatttgcttatcttattaaaacctaaagtaaaacatttataaaattccaggatcccatttacaaaatacagttacaaaattttactattcatatacaaaagatttgtcccctagtgactaaacagaaaaagccctgatgtctcaaagatcgtacgctccaagcctaaccgccccaacatgtacaatcttcacctgctcgctctcacggctcctcaactttatctttgcccttacctacacatagcaatagcactgtgagtcaacagactcagtacgaaaagcataacataaaaacatactaatatcccgggttataatcaagcgcccatacacctaaccataaccctaactgattcaggaacgtccttgacaaagtatgacaaaccgcaaatccagcctatactcagtactctaatcatactaatgtggtagcagttaactcatacaatctgatagcctagcataaatctgttggcatctcggtgaatctctatgtaaacctccccgatgccctgatatgctaatctgaggcctatagatttgcctattctgacggcaactaacatgtacgctaaacatgtataaatatatgcataacatt

SEQ ID NO: 21436 - DNA, 3339 bp, Cannabis sativa
atatgtatatagacacaaaaacctatatatatatatatatctgttagttgcaccaattaattgttgttgtttatgtaaatatttatttttatagataatattgtttctagtgatcaattacacatccctacacgtaaatttcagactaattaataacaataatattcatagttatcaagaactaattattagatttaatattatatattaattaattaatataaatgatttgaatagctagtgtagtagtgtaccaataaaactatctattatgaatcaacggaagatcatgggtttaactttagtatgtatatatacatatatcaattagtataaactagttaaataaagaaattcagatggtaatgcctgaattaatttgactctttttaattcttaaatgaaaaacttgtatatttatatatatttatttatggtaacatagaacctagcttgcggtgttttaatcaaatattaactttttatatttttgtattgatgtatgtaaaatattgcattatgttaatgatgccctgttttttcattcaattttaattttgagctgaagatattttttcatattaattttttttttctgaattatgacttatatattattgtgtcttctctcatattttcagtttcttaaaaataatctccaaaagtatttttttctgttaaactttgtgacaggtgggaatgctgatatagtagtttagtctataaagttatatgtaaagattgtacaaaaatttgtgtaaaatggaaaagttaggatatgatcaaaatttgttttatcaaattcataagtaagacatatattatgtgcatttgttagattttttaactcgatcaattatagttcaccttatcaaaacatatatctatatatatataattagtagaaataatttcctaatcaaatcaatgaaaaaaaaagcaaaaaacacacaaattaatttacctggacagcgagaactcgccccgggctcttcttgggaacaaacttgccctcgatgctgtgatcagggttataaaagttgagctctttaagctcaacctccgcaaatgcttcaatgaaatcaactccaaggttgttgcattgaagctcgggctccccgctcaagttcttcaccacctcgcctgcaaaggcatagtagggcaaaagagcttgagccaaggccttcttcaaaaccccaaacaccaataatgatattggaatctcgtctacatgctcctctgccaccgcggttataggtttcttgtagcagaagaaaagcccaaaatcaagcggtggcaagaggaggtcgaggttggacatcggtagccaatgctcttgtagtggtagaagtggtgcaaccacctcttcttttgtcaccgttactttgaatggctttgttgttaactcttcttttgaattcatttttgattgtttgtgtgacttggtttatttgcttatataatagagagagagaatagtttgcctaggaattttagttagtagtggttggagatatggatttgtcatgagcaaaatcaaacccaacgaaaaggtaattaagtagattgtatttgtacgtgggcacaagtaggcacatattatatatataaatatatcacgatcaaaaattttaattttaatcacaataatatttgtgactgaaagtaaaaaaaattgactaattataaattatcattcttatgttatgattaaaaagttcatgactaaagcgattagttacaaaaatcacaatttgtatttaaacactatatataattataagtaactttttgttaactaaaaatcatatttgaacacaaaaaatttatattgtaattaaaaaattgtcgtaacaattttttgtattgtatgtataatatttatatatttatttatttatttttataaacaacaaagttatgacgatattattatttgtttgtttttgacaaataattttataggtttatagtaaatatatatttgtagaatatgtatgtgttatggtgtcatatcagtgtataattttcttatttgtttacattatcaacactttcaaaacaagttcaatggtgttagatatgaatattatatgtgtgtataagaattacatattgaattgttcaaaaaaagcaaaaacaaacatttgaatagatcagagtattttaataatagactgaaattggatatttctacttttatgttagtgatcaatgcaaattatacacataattaagtcaagaaaaattaaatataaactataatatttttagcaaataacatataaactataaattttaatttgcaaatagtttgttttattccttttttttttccttttcattttttgacataaatggaattcgcaagtatttcaaaagtaaatatttatttggtattctaaattttatcaaaatatatatatttatagtttaatttttttaaaagtaaattggaatcctttattaatttgttaaatcagataacaaatatgactataactcaatttggaacataatgctctaacaaaacaatgtacaaccatattagctaataaaaaataacaacacataatttaaagaatgaaaaagttgacgacaatcttcaatgattgcccgaaacaacgacaccacatgaaccaagcttcagatcactttgaaccaccaccaaagcaattagatatggtgtttgatccagctgagagcttaaattctttgatgtccatgacttcaacaatttctggagttgtcgatccttcaatgcactaaaaaatagtttttcccaatagttttaaatagttgggaaaagtattccagttgatttctataaccgtcgtctattcgactgtcgtaaaatgaaaaaaattggtgatgattcgaaaccgttgttattttatcattcccgacggtttaaattcgtcccctatgataaagtatacgacagtttataactgtgccttatagtattaggcacggttataaactttcgcctattaccttttataggcaacatttttaaactgtcacctatagtatataatatcccattttttttattattttaaaattttaataattttaaattttatgtatttgtttatatcataattaatgtaggaaatggacaatacacccgaaatgccctcctaccccaacaactcccaaagtcacaaaaaccaagctcaaacttgacctttccttctcttgtgcagatcaaaagaatacacatcaaaacactgcctttttggcagtatataaacctcttatattgctaaaaaaaaaaaaaaccctagtagctcacttttattttctcccataaccctagcagtcgaaacccat

SEQ ID NO: 21437 - DNA, 3647 bp, Cannabis sativa
agctcgaaggaaatcatcatttcacttctatgcatttatagaagctatatattccgtgtctatgattagagctcccatttaattctactaccatgttctcaagatgtaagtattaggaagatccaattggtcaactttaatgaacaagtcaaagaacacaaataatacaattgaaccagagcttaaccatctcaggattgagatcattgatctaagatcaactaaatgatatttacttagaaagatattatggtaagtttatgatatctattctatgtgaatatcagtccagtccaatgtataataatacatccattacaagcttactttaccaatgtcttagaaaagacataccactatctaagtgtaagtaaactacattgttgattatcatatcagaaaaatcctgtgtattataaatcatggggctaatgtttaatcacataatcttgataacttttcactgtgtaaacaacatagtaatcatgaataacaatgtgataacgatttaaaagaatttaaaaatcaaataaatgaccatgaaacaaacatatgaaccaagcattaaataagtaataaaataattctattcctttattaataaataaaattcaagataacattgaaatagaattttagttagggcataaaatctaacatatgcatgagttcaaatcataaatgttattcaggaggaagctaaaatctcatatccaactggtgttatatgctatgtttatgatgtatttaacacactgcttccttggcctaaagaattgattttgactgaacaagtatgcaataatttacttgtatttacattaatgttatattttgtatgaattgtattataattttacttgaaattatgcaggattctctaattaagaaacttcatagttcaaactattcgaaggaaaaagagaaatggaaaggaaaagaaaaagaaaaaacaactaaaagtaaaggaaacaagaaggcactggaacatcttgattctgctgaaacttatgagtcatttattgagaaggtcctcaaaaagactcatatttctcttcagcccatgttcttggaatttatgagagtaaaagttcaaaatgtgtacgtgagggttcttgtcaacctattcttattcttccaacttcatatttacataaatttcgaagatgtcatacaagtggccacccaagataaacttatgagttcagctatgttatttggactaaggtatctctttaactttgactaatatgtcatttatattatgttagtggagtttgaatatcttagatattcattcgtagtgaagtaggttctaggtttgattgactgtggagatataagaaaaaactttatatgtgttgtttgttgtgttgctatttacttaaaaaatttagggaatgttatgaaaatagaggaagccctctccatttttttaggacacattatttgaactttttttcttttttaaatagatgcatttagaaaaatttaaatgaaagagaaaaagagttatacaagttttatgatattgagcttcttatttataataacaaccacgacaaggtgatagccatcaatcaattgtcaacatggttaaacactatgactcaaatacgataacattattttataccatggaacatagggtaagaatcacacttttatttcactttcactataatattttatttttatattaattatcattgttaattttttcagcaaacattagatgttggttataacaatgacattaggaagaattgtattcctaaatccgcttaaatttaatatctcgtcaaacattgctgagatgataaaaatgtaagtttagaactttaagctattcgttctaatataatgatcaattactaaattttaatagcttcacttatgattttttaatgtctttaatagcgcatacacaaatattagttcaaatactatcgtatttggcgcaaaagaaccgcaaatatatacttttatttgtccaaaataactatataattacgaatgtggttacaatgtactaacttacatttgtgatatgcttcaatattcaaatcctatccaagtcgtaaaataaaaagtatatactcatctttactataaatacaaagatataaaagtactttccttttaattaattttaattttttaatttgacagttcggtggcctatcccattatctcttaccgcttcgacaacaatggttaagtcaattgtttcccttaatatataattattgatcagtagtattttattatatttttttagacactatgtataatattttagagatttatacacaacatatgaagtgttatttattaattgaagttactaattattattattattgtttttaaaaattatattaattattcattttttagttaactttttttttatatacctattccatataattataaaaataaaaaattagatttattatttattgttaaaaaaataaatgaaatgtaataaatttaaaaaaaataaattgaaaacctacattttatttgcaaaatgtgggataaaaatgtcacattttatcccatttttttttctaaaaaaaagttagataaaagggtatcatcctaatttttttttattataaaaagtgggataaaaagtacccatttatccctttttattttaatttttttttgaaaaaatcggtataaaatgtattttttatctcgattttttaaatactttttatctcactggtatacatcatagttttcatcattttagcaaaaatagagataaaagacatttgcttattgtagtgttatcttaataatatagaattagaaaaccctcaaaaaaatttacaaaacaaaaataaagcaatgtacattactaaaatttgtaggaatttgatttataccttaatatacgttgagattcaacgttttctctactaaaaccagtgatcggaagtataaccaccacaaccactacctctaccttcagtttacacttacaattgaggaaaatgtgatttttttggtatagttttgagtatggaacattaaaaaaaaaaaaaagaattgaaatagtgaaaaaatagtgaaatgggggtaattaacgtggtggttagtggagagggtttggagtttctctggtttgggggttttttggttggctgatcgaatgaggaagacgaagagttggggaggattataaaccccttattgcgtcatttatttgggaataaccgacgatataaggacacatgtgttattattatcacgtccttatggcgtcggttatttctaaaaaactgacatcataagaggtttacaacctttcagtagattaacaaccttatatcgtcccttattttaatttctaacaaaaataacaaattttaaagttcattgttgtagtggtgaactaaatgattgagtctaactaattcaaataggtactaagtgtaataaaaatccttacaaattactcatgagttatcaataacaaaataggtaagtttttattttttatttatgatatattaataaattaagggctttttttttatatataaatgtacaacaaaaacaacataattacaaaaaatgtgcaaaaaaaaaaaaattatttaaagaattatacattttgaaaatttatt

SEQ ID NO: 21438 - DNA, 3686 bp, Cannabis sativa
catattcataaaattgtactccaataatagtgtataatatagtttaaattatacatataattaaaagtgttgtgacaaattcaaaacaaaatatagtatgagttaaattttacactacaataaatatcactttttatttactctttagtcactcattaatataattaataacttcttatacttttatttatatattcaatataatttttatatactttcaatcaaatttaatatttttgtttatattttttttacaactttatattaaaataaagtttattttaactaagtgtattagatccattataaaatttaagctaaatattgtattaatttatttttaaactaaatttaataaaatttataccataagatggtcttagttactcggagctaatatggtaatgcaaaaccaaaatactttttaataagataatactttttaataagatataaaaaaaaatatgtttaatgctacagtgtaattgaggtaattttaatatttttattttttatatcaatatttattgtagtaatatataatatatttgttgaaatttttaataaatactagataatatgaaaaaaaaaaaaaccaaagaataggaatacatgtacaaaaaatgttgtagtgattaatgttattagtgtttttaaatcacagaaatgttgtagtgatttataatccaatacaaactgtattgaaattctctcaaaaaaaaaaaaacacaaaaagtattgaaataacaacttatttattgattcatataattaattaaattacaagacaaatgcatgtgggacaacatctctcgaaacatttcttcaactacgtacttttgctccattagacacttttgaaagttgattctacatatctaaaaaggaatttccataaaataaatatttcaaccaatactatgtgaaaaaaaaaataataagtaccaaacctaaggacatattggagcattgccttatttttcttcagatattttaaacactaggtggaaaaaaaaatgtttaataatcatccaattaaaaaatgataacacaattttgtctttatttttattacctaatctgaacccttttcttccactactacttcagtataaagactagtaagtaaatattgtactagcaattttgtcctgaggtcaactcaaactctaatagataggatttgatctagtgtattgtacatgcaaatgtttgcttacttaataatttgagcattgttattggctacattcccatcactttttataggtgatatcttctaattaattaacaatattttttaaaagttatttttttaaattataggagactcgatacttaattacaccaataattaacagtatgatatatcgagtagggtgctagacactgatagtatcttttagtatttctctaatataatttagtattgtcaaggaaagattagcctgtgagagacaataattgtacaataacttatcatttttcaaattataactactcatcatatatgaatagttattaagaagactatgtattatatatcttctttcacatttataatatagtcatatatatcttgctggaaagtctgacagaaattattgtagcaacttcaattaacaccaactactctgctctcagtaataatattgtggcctttcatttaatattgctctcatacctacctacctgacattattaattttctttatataagcttcaatctatgtcttctatgtcatcacaaatagttctttagtctctaaactttgcttattgcttgtttcatttaactatggcacttcctcactcactctcagtcctctttcttgttcttcttttggccaggattgacatgtctacatgccaagtcttcaaggccaaagtttcttgccttgactgccctactgaaactgatctctcaggtttgtactatacatatatatatacacacatatatttgtaggtatacatgatcctgccttaacacacaagaagttgatatatctatatatgtcaaatcatgctctcagttccttaaaaattttcccgaactattgagattgttggatttaaacattttgtctaaattcaagatttagtacatgtcaaggtttaggtgacaaaaatcttaattaattaacctattttttttatattgattatatgttatgtgtcattaattttttcaggtattaaagttctagtaaagtgtgacaaggtgaaaaagttgggtatggctacaactgaaaataatggtttttttgaaacagagatccccacagacaaaaaaacacccccaaaacctttgaattgcctagccaagcttcttggtggaccaaatcaactctatgcttcatccaaaaccatggtatctcagcttgtccaaaccaatgatcaatacaccatttcaaccccactttcattttacaactcatgcccatcaaccataactcaagcaaaatgtgaggccaataagaagtgggattcttccaagactgttgatctgccattaccaccacaatggggtttggctccttcaagttactatatccctttcttccctattataggaatcccatgattgtagtatacaaacatatatgtagtagtatttaaagtctctctcaagtgagtagtgtgtcaagaatataagctggtaaaactggtttcttttttcttcactattttctcctttttctgttttatatatatatagttattttttttgttttttgtcatgtttgttaaaatagcagcttgagaagtatgaaagggtatggtgatgtttagtctaaagtgctcttatatagtagagagattatgttgttatcatatgttacaaaagattatgaaataaataatataatgaagtaatgtgtagtgtttgcttttgtatatagagattatacttctctctctctctctctctctctctctctattttctttctaataattttatatagagaaatgctaagggacaccagtggtgcttaacaccctcctatgtgtcaatattgttattagtccaactaagtatcaggtcccatatagtttaatataataacttttaagaagtatcgctagctaatcgcaacgtgacatgtcgagaaagtgctaggcactgctagtgcctaatagtaatgctaatatattgttaggtgactccatgaatgattatgaacattaaagacactttagtataatacctgttgatgcaaaaaaaaaataaaataataaataataataaaagaaaaaagataagagttaatgaactttgttttttaaggtaaattaaaatgggtaaacagtcctttaaaagaccattttataatttttttttttctagctattataggacagacctaacttttttaaaaatttcaaaataatttatgatcttaaaaataaaatttaaatattttgttaatgttttcttctctattcatttcttccatttttattttaaaccaaaaataggaagttcattcattcatcaacttttttcaccgaacttttcttttgtttccctttctcttaccaaccaaacatatggtaaaatacaaatcacctacgtcaatatatttctttaacacaaaacaaacttatttaaatagcacaaaagtaactccaaaaaagaaaactaaaaacaaaacaaaattataaatataaatataaaag

SEQ ID NO: 21439 - DNA, 2948 bp, Cannabis sativa
gagatctagacgaaggagattctgacgatgacccttcggtggagtgcgttggaggaagtatcaaggaaaaccccgctaatggtgaaacctctggtcctgtacaggacaaggggaaggcaaaagtgggtgaccctaagaactctcgagcctttgaacctcctcaaaaaaaatacaaatcaggcccacaggccttctcaaatgtagaagacagccaatgcctttgggcttggacatcctttagccgagattggccttatgacgccgaagggagctggtaagaaagtaccaaaacccaagagatagaacgaccacccttgcaatttggtacgctagaacgttggggcagaggagcagtactccgatgatagttggtcaaccctggacgtcagaaggtgtttagatgcaaaacacaaaaaaagcaaagagtgcgaaggcgaggccacgtggtaacgacctcagaaataacttgaatgacaaggtctatagaagggatctctcggacaacgacaggaaaagtttagaagaacagatagccgccttgacaaaattggtccaaaagaaaattgggaccctcactgattgggaagatgaagacctagagccttgcgtcaggaggatcatggaagctccactcttagagaacttcaaaaagccttaaactaagatgtacgatgggcgctcaaatcccaagactcacttagccaaatataacaagataatacaagtggccagggtgagtgatgatgtcaagtttttatgcttttctttgaccctcaccaagtctacggaggattggtggaaaaggctagctctaagatcaattcattcttggaaggatttacaatccatattctggaagcaattcatagctgcccgcaagtacaatttggagatagggtccatcaccaatatcaaacaacaagcgagagaaaccttgaaaaagttttattcagcgaatgatggaaacagcagccaaaactaaagtaatagatgatatgaaggtcgtagccttgtaattcagactcgcagctagctccctattatggggagaaatgcaaagaaggaggctaaaaccctctttgaattcatggccaagtaacagggcttcattagtttagaagatgcttaccactaagcatttggggttccttcggcactagcccctgtaagttcccagatctacctcgttggctcccgttctaggaatgcaatacacccctacaatctaaagactttctacgtatgtgcccacacctacgcaaatccatttatgtgggtacggaacaacacaaactggatgcagtgtggctcccaaacaattgaaagtgaaagtaccagagtaagacatgagtaactcctagaacaagagaagggggaaaggtttgggatgaggagaagcttcagagaaaatcaagaaagagtattaaccaaaatacatcgagtattccagtgttgtggatagtcgagagaatgtgtacagagaaacatgcaacatggttcattataggaagcctcctagaataccccaaggggagaaatttcaaagagacctaaagaagcgtcgtgaataccacagagacgtgggacatacaacgaatgaatgtgacttcttaaaggatgagattgaaatgttaataagagaaaaacatttgggagaatgggtcaagatacccatcatatatcccaaataggaggtcgttcacggacatatagttgtttctcggacagtagggtactgtaaatcctcattgtggagtaagtcacccttaagctcccagaacatatcctccaacacttcccgctctgccagctccagctgtagtacctttgatggctccgagaccaggaagcccatactcctcaagtcttgctccaccacctgtggacgaccacatagcaacaattttaggaggaccacacatagcgggaaccaccaggaattctcaaaaaagatatgtgagagagttgggtgaaggaaaggaaaccatgcatgttagtacagtcactaggccaacatcctcgaacaatgaatctgtcgatcactttcatggaggaggatggcaggcatgtgcatttccccataatgacccttttgtcgttgaggcccagataataaccaaaagagtttctaggattctggtggataacggtagctccgtgaacatcctgttcaaattcactttccaagtgattggcctcactaaagctaacctttcaccttgtcctatctagttgcaaggctttaatggtgatgccttgatgccaatggggaaaatccaactacctatcacccttaaaggagaaaataatgtgagttccttcaagcattgtacatttgtagtagttgattgccccacaacatacaacgcaatactaggatgccctatcttagtggaatttagaggagcaacttcaatacaacatttatgtatgaagttcccctatgataatggatgagttaggacagttagaggtgaccagtagagtgcaagaagttgttacaatgtctccgttcggacagtcttcaaagtctgggaagaagcagttattgctcctgaaagggaaactcaaatccaggaagattttgaagatgagctagacccccgtgtggggacagaaagagtgactgagcaatggaggatgtggaagaagtcaacatctatgaaaaaggccctactagaaccattaaggtagtaagaaacctgcctctgacggtgaaagaaagcattataaatactgaaaagaggaatcatgatgtgttggcatggagtcattatgatatgataaggattgatcgtaacaccatctaccatgccttgaacattaatgaagatgcaacaccaatttgccaaaagtgaagatcgttagatccggtaagagtaaaggtagtgaaggtagaagtggataagttaaccacaaatgatttcctccaggaagctctatatcct

SEQ ID NO: 21440 - DNA, 2319 bp, Cannabis sativa
gggggtttacccgcagaaatttggattttgggggtttaatgaaaccaaaacgaaagtattgggggttttaccgccatttaccctattaaaatagtaatcctagcaaaatatatagaggagccataggccattttctatttcttatactttatatctcaagtatattatagttgtaataatcattatgtttgttttcaatttatggtgtggaaaaataaagttgaaaataatttggtacatttgcctatttgactctggaacatctgtttgttggtttttttgtctgggaatagcattgtattcggtttgtgctactctgaagccgaagagactagtgggttgcacagaagtacttactccgtaaattgtgggagttgtgaacgtggttgttggaggatagatagccgaagcagtcatctgggaagtttgagtatttgtggtattagcaataggtgttggaagtactccataagcctgaacgtgagcatcttcctggtttatgaatcttttggctctttataagaactcagataaaaaatctactctttttctgtgaagttctcctcatagcaaggatccaatggttattcctaatgtatatcatcagtaactttggtctttgatgtcgcatccatcatgcgctaggtgtactttttgaggctttcctctggttgtttaattttcgtcaaagaactaacttccatgtcgaaatcctttgctgctatgaattttttcttgaacattatttgcaagtccttccaattacgaattgatctgagagataatcttttccacctctacagattttgatagggttattgaaaaatagaggcactttgcgtcatcactagcttttgctgcatgcatcatccggctgtacttggatagatggtccctggggtacgttcttccttcatacaattctatctgaggcattttgaagtgtttcgaaaactgtgcatctatgattattttcacaaggttctgtatcctcctcctctgagtcggacacagttccattttgcttttgggagatcttttccgtgagctttgctaactcttcaattttatgcttcagacattgagtcgtagcattagaagactctctttcgtgaatacaatcattgatatggtttatgaggtcacctctgcgaggtctgttttttacttccgatgatcgaccaactggtagatttcattgacgggcatgagatcaggatgcataccctgtgtacaaccagatcaaaaatacacatgccagctaagagcacacaagctttttcatatagttaaatttgtcattcgtacataaattaaaattcttatcatatagttaaatttaaatttcataaattctaaaacaagtcactagaagacaaaattgaatcatggagacaaaagtctcaattggttactccaagatatgacaaaataagtgaaatgaaaaaccttattacatccgagacaagaggggtataataacaaaagtctttcccgaaggttttcgaaaaacacttttagggagcaaatgttatacctgattttttgagaaatcaaaaaagtcaatcctacgaatttgaccaagacttacaaaggaaaattaagttaagacatcttagttgagggatccatagcacctctaggagactcacaaaaatattaaccaaccatttggtgttgggacccacacacctaagtgtggtgcccaaactatggtttatgggctcgtgtgagcgttttcaccctagagacctcagaaaccaaaaaaggacttgacttatttaggcttaaagtgacaaaagcttgaacttaaagtcaagaatgcacaagaaagccatcccatgatgcatggccaacatgtgccatcttttggcacaaaaagatggcacaagtctctactctcaaaacactaaaggagtcttgtcaaaatgtgttcgcataataccaaggagtaaaacacaagtgaaagaatctgtttctcaccaaggaatcaccctagccaacttatgccatctttgtgcataaataagtggcataggttggccacaccaaatgggaaggatttttttggtcaaagtacttttttatcaacatatcaaagcaaagtgagaaaggccaccaagtggtataaaaactacttggccgaccactgccatctttgtggcccaaagagtggcaatggttgacgataacaaatggtggggaatctctttagccaaagtgtttttcaaaaatcaaggtataaaatacaagtgaaaaaagtcattaaagggtgtgtaacccccattgtaacgccctaatgctaaggcacgctacagt

SEQ ID NO: 21441 - DNA, 2500 bp, Cannabis sativa
agttaatatgaaaatggatgtaaatggctaattgttaatagaacgcgtgtttgcgagatttgccgtcaaattttgggttttgcgagttatgccgcaatttaccataaaataacaatacaattaataataaagttattatttttatattgttttttaataaatgcatcaagttttgtactaaataagagcatctccaatagagtgctaaaaaagtgatgcaatgctttattttggtagaaaatccttatccaatagtatgctaaactttaccaaatttgccacatgctaaaaatttgactaaatttaacacaagatacaacatcgtacaaaacttggcatacaattaatacatactttttatttatattattgtcatttagcattagtgaattactttaatatactttttttagttacatatttctattattttttaaaatatatatttaatttattagttatcgttaataataattattttttttatgtgaatttacatctcagtttgttcttatgtatattgaaacacaattataaaaaaaatactaaatataacatttactaattttttgtgttaaatttaacatattttttaccccacaaatttgatattgtctaatttacagcaaaaaaaaaattgttgctaaggaccactacttcctttatgaaatcatcaatgttaactaccacctctaaatgaccccaacaaccaaaagattgaatcaaagtcaaataataaacgcacaaggacacataacaagagtcaacacccacacagaaaacaaggaaaaaaatgaaaggaaagtactataactaaaggaaaattatcaatgataaatgataaatgtctaccacacttgtacaatgtggtgcctagcaccttctcatgtcgtattacgattggctagcaatactttctaaaaattattatattaaactatatgggagccgatactaaattggactaatagcgatattgacatataggagggtgttaggcaccactggtgccctttagcatttatctatacaatttaatattgttattggtgcaatttaatattaagtctcacttacttaattttaattaaaattattaaaaattactaactaattatatggagcgttattttatgatgataaaacaaccgaataaaatagaaggaaaaaagtgaaagtaaagctcaaaagaaaatccatgagtcatgaccaataaaaaataaaaaatacaccaagatacaaagaaattaaagaaagaaaagtatagtgaagattaaataaaggccaaaacatacaaaagagtgaaataaacactgcaaaacaacatggaagaaaaggccctatcttttaaagagtaataatatgtatgcatataatttacacataaatttgacaagtaatttcaatcaatcatttttattttatgatggatcccacttattaaaagttaacttgcccatcattatatatatatatatacaagtgtataaaatttatcaacctcacttgcagagagagagagaaatatattaaggttataataaatagatattaatcgaaaatatggttgcattgtttcaaccaatttaaactcatcatacatatatatatatatatatataagttatataacctcataacttggtgtgtgtatatatatagatatatatttacatctagagagagaaagaaagcgatggatgaaggtgaaggtgaaggtgaagatgggccttatttgttatgggaaaatataagagtggtgacatcaagaaaaagaaaacaagttttggtaaacaatctttgtggctatgccaaacccaatcgaattatggctctcatgggtccttctggttctggcaaatcaaccctacttgatgccattgctggtaatacatacatacatacacatatatatatatattatttattatttatctttattttttagaataatttgtggtataaatatttaagtttaattcttaattacaataagtttaatttttgacggtaataatatttaatttaaatttttgaaacttctgtaagtacctaactgtcaagtcaatgaccacataacagtctttgattggttcaagtcgttaaatttttattttttatttaaaaaattatttaaatatattaataagaaaataacacgtcaatatatattcacttagcacttaacagtcaaatttttacaaaaattctaaaaataacttaagaaaattaaatttaaatatttatatatttatgacacaattttttttatgtatctagctatatatctactattttttttatatttcattatacattatatattaaagtctcattagttagtgcttattcatgttttagctattgagtttttgatctataataggtctttaattatttatacatatcgtggcatgatgaaattcataggatactatattatgctcaccattttgaattctatttctgcattgtaaattatttataatttattaaaaat

SEQ ID NO: 21442 - DNA, 5475 bp, Cannabis sativa
gtaaaataatttccaacaagtgcccttataggggaggagatagaagccaagtccatcgaccgtttagtgaggacgtattttttagggaagagtggtgtgaatttggatacacttttgctatgattgcatagatgcaagatagcagatgacatgtacaagcttggactatgcacttttgttgagagtgtattggtttcgaaagaaggcaatgaccaagtttggccagacacattgacatttgctgatgaccttgagtttttcttcaagtatttgtggggtgagtgtgctttttgtaagttgatgtatgagtaaggacatgcaccattacatggagaacgttaagaaggaaaaggcaagaaagttgcttagaaggcaaagtatacctacatggctatgtacctaccatagagtattgggtatatgaagccatagagaaagtgggaaataagcatgatacttgtagtgtgaccaagttccctaggatgataaattggaaaaccaaagagggccaacaaaaatagggcgtgaaggcgagtgacatcccacacttgttcaacacaagcgtaagttcttatatgtgtttcatgttgatattttaatccatttttagttgacataaatcaatgttagtttgcaacatatttgtgacatttaaatttttttatatttttgtttgtatttggttataaagaagtgcttgtgcccccgacctagtgaggaggattatttcaagtccgtcaatgagagtgaagcccctcttttttttagatggatattaatgagatggtggacgacgatggcacaaaattcaatgtttgaaatgcaagccaacaccattgctgaagtcgtgcgtaaggcaaatatagttccaccaccacttccttcggaagtagacgagccatctgcttcgactactctaaccactacagctaatacattagacattacgacgctagcaaagaggttgaatagacttgaggcctaacaagctgccattatactcttgttgatggatttaataaatagccaaacaaatatgaggcactcttttctgaatagtcgaaaagagatggagtttttgatggtttagttggccaatgtgacaactttgttgaatgagaaggacagggcaccacaaccatcccaactagcagatgatcgaccacatgagagtgagtatgaagatgagttcctaaaagattaggaataagatgatgctgaggcatcgtctactctaacggatgtcattatcatgaccattggtgatacacagtcacaagacgatgtcctactcctgattggacccctagaagaggtaccatttgtgagaatgaggaagaaacctttctatttactggactacactgaggaaaaaaggaagaagtgacttcttctagagaatgtagattcgacaagaccagcaaatcgtagattgctacgtacgttcaagaggtgggtgcttgggcacatcctaaataactgtcccaagaatctccacactgacattggtgacgtcaatttctttacgaagttattaatggttggaaaatagttggatgatgatgtaagtatttttctttataatgcatttcaattttttattgttgtattttatcgatatgtagtgacatctagtgactttttgccattaggttagcaaattcacacgatatataagccaaatatcataagaattcagttgtagcaatttttattgttatttttggtgacatcttgcgacatttttgtggatttattatgattatgtttagcgacacgtagtgatttcatttgtgatattttacgatatgttggctatatttttcttttggtataattagttgtttttttgaattttcatgcaacatataaatatcatttttcacatgacgaggaggagacgacaccttttcccaaatccgtacccttagtcaggtgtggttttggactcatcatgcccacaatttatgtatggtattttgggggcacacatgggtgataggagaacctttacatggtcagatgttattacagattaatactatagtatcaaagactatttcctaccatgttggaaggatcaaggcttcatatacttcaccctgaacttttaatctcaaaagcattgggtgtatgttgaggtagacattgaggtgtgacagatttggatttatgataatgacacctcttgtaccaaagacgaggtttttgacaaacttatgataccctaaaaagagctattttcacatctctcacagtcaactagttatttctcgcttaacaattacattctcaatcacacactaggggatagtagccaactgagaataatacatgttaaacgcatgccaaggaaggttgttccctaaagtgaaggaaggtaactaataatgttcctacaactatctacatttcccctactaatgcattgtttttacttgtttgctaaaattgttatttttaattttgcagtggtgattgtgggatgtaggctattgagtacatcaaatacctcatgatgaaccaatcattggagaagattaaggatggtaaatgatggtgtacagagaatggtggggtgtggacctgttttaccgaaacctagtttagtgatcatagtagaacgatagggatatttcttttgtaaattttgtatttttgtaattaatagacattgttatcactatatatcgataaaggcatcactatatatcaaaaagtcatcgccatatatcatgtcttgtgtcgctagaacaactaaaatatttttaaatttaaaatcaatgttaatatgttgctacacatcgtaaaatgagttgtcttatgtcactaatttttaattttaaaaggttactggatttatgtttatcttatcatatcgataatgtaattgataaatgtggctagcttttgtgatatactttcttttgtatttatggcttatataatcatattgatagcgacttatgttacaatatcgataatataaactgataacaattgaatgtgaaagaagaaaataaacattagtgctttggacggattaactcgactaaactgaaaaatttattgagcggtttaaaatattttttttttcttaattgggcgggttacatttagatttttgtaacctgatctttacattgaattaaataaaatgtaacgtaaaccgactaaaccgaccgacgcacgaccctacttttggggccacaatccagagcagagatgtcttagtgtagttagcccctctccttttaagtcttcttgtacaaggtaggcagccattttcatggctagttggcaattgacatggtagcgtggattagagctatcaaagatatctttttccaaaaaagtaaacaaaatattagagctaatatagtcttttatattctgctatatgtgttatacaacgataactttgcagcatatcatactttgattaatatactaagaatattgaaatacttgaatgagatttgtgccaaatgttaacacaaatctaaaataagagaagacaagttcatgtaaatatatataattatacatgtatataatctattttaattattgagtttattagtgatcaagtacgttctagcttagtctagctcaccggagatagcaagggcttatcagaaaagaaagctttaaggttggctaagactatctggatcatggaatcaatggaaccttgggttgacacagcacaatgtggagacagaacaacattgtccaaattatacagctctttggggacatcaggctcgttttcaaacacatcaagaccagctccaccaagctctccttcacttagaagatgaaccaattcttgttcatcaactagatccccgcgccccacattgatgatcacccccttctttccaagggccttcataacatctttgctaattatatggtgagtttcagttgtcagagtgcaacacaccacaagaatatcactttcggatgcgagatcaaaaacatttgagaagtaagggaaaggcttagattgcttctcctttcttgaagtgtaggaaattctacagccgaaggcagagagccttttcgccacctcgaagccaattttccctagtcccactatcccaactctcttccctcctatctgaaattacaactatgaagatcataaacattacacaaagaagtggcttaaaacacaaatagagcaaaacagagttgcatcctgccaaacacctcatcagcactctctatatatgccttagcaaacacaacaaaacaacccacataggtttacgaggttcggtcaagaagtgatctatatcttggaaatgtagtgaatcttattcaaccaacaacgtaagttctttcttttttcaagtacagagaaaaaagtatcatcttggaatctaattacaagctctatgaatcaaaaatggaattttttttacaccaaatttaataatcaaaagccgaaacaaacagaaaaacctaaccttagacccaagtgggtactctcctccggtaggccagagcccggaacggacatagctatcggcagccgaaactcgtctcagaacaccgaataacagagcaactgtgaaatcagcaacgtcatcagtgtacgcgcttccggcgttagtgacggcgatgccacgtaggcgacaggttgacaagtcaacatggtcggtgccggttgaggaggcaacgatgagttcgagagaaggcaggtggcgaagagtgtcttcggtgacttgggcgagctccagaatgacgagagcacgtacggagtgagcatggcgggagtagaaagtgtggagcggcagaggagactcgtgagggtcgattaagagaaaatggttcttcaagagattagtcaacggagggaaactaacggaaggggtgcggtgaatgaggataggagggaggtgttggtcattggtgttggctgccatggttgctttcactctattgttttttctttgggagcagagtctcagatgggctgagttgagattttttattattattaatattttcgaataaattattttttttaaggatgtctaaagaacttgtttgtttgtaatgattgggacatctttagatgattttatagactacaatataagtattaaaaatattatgtacattaaaaacagagaagaagattactttagaatttgagaatatcacaattaagaacatataaaatgtttgggtaagtaccataaatgaaatatgaatatttaaagggaaaccacaaaagttagtataccatgtaaattttcctatctaaatacttatgaacttcatttaaggtccgtttggtattcaagattagattggattagacagattaatttgtctaatctagtatttgggcatgttagaagtatcgataactaatctagctaacctcatttgtctgagattatttatcttaagggtgggataaataatctaatgcaagtgagtttttttttttttttt

SEQ ID NO: 21443 - DNA, 2759 bp, Cannabis sativa
ggctgttaagtatatgcagtctgttttttctgttaaagatgcagttagtaagaaagaatgtcgtgagatctgtgctctatatggtgtcactgtcactcaggttcttattttttgttctaataaatgatttttttttacctttgtacagtcattaattttctctctacaccttatcattaattttccttgtaggttcgtgaattttttgccagtcagcgttcaagagtcagaagattagttcggttgtcgagggagaaagccactaaatctaattcatgtgcagaactgaatgatggagttcatgcaatctctgatcctttactaccttttcaaccaattcccttaaacaccattgctcccaccggtatagaagaaacaccatcttgctcaacagaagatgatgttctacccggcatagatggcttagataagcaatttgttgagaatattttcagttggatgcggaaagaagaaacatattctgggcaagtgaagctgatggagtggattttgcagatgaaaaattctgcagtattatgttggtatgatacctatcttctcaccacagtataatgtatcagtatgttgccatattttcttctcccatcaccatctgattgcatgtatgtaggtttttaagtaaaggtggcatgatgataatagcatcatggttaagtcaagcagctgaggaagaacaaacaagcattttgctagtgattttaaatgtatgcctgaaattttcttgttaactggcagtacatgttataaaaatttgttaccagcgcattgattaaaataaattacaggttctttgtcatttgcctcttcataaagctcttcctgcacatatgtcagctatactgcaaagtgtaaacagattgcgattttacaggacatcaggtgtgctttgctgtagaaacttattttgttctatctcttcccactttgcttttgcttgtttttgtagggaatttaaaccttaacgtataggtaacattgcacatctttaattgaacgtagatatatttatatgtattgtttttgttgctcttaaattgcttttagaaaaataacagccctttgctctttagctatattcgtgctttgaaaatttgaatctcatttatctgatttgaagaccagacatatcaaacagggcaagagttttgttatcaaaatggagcaagttattggcaagaagtgaagccttgaagaaaccgaatggcttaaaatcttctgttgatgcacagcagcagatgatgcttaagcagaggtaagtttatatctctccatcatgtgtgccacatttataaattgcctgtctcgttaattaataaagtctatatttatgcagtttaagcgatgttatgggagatgattcatggcagtccagtattgatactcctgtgagttcttgtatttaaaaaatagctcgaactagttacgaatggtgaacttattcttactatactttttttgcatactgtgtaggaaaaccttcttgatagttcagaaaatgtcaggtgtgccttcgatttctttgttctgaattatatgcagtctcattgtctttgttttttacagttgaggttttaattcttaactttattgttcaggaaatttgaacaatctgtgaaactattgccagcgtcttcagatgatccaaataagaagcacattcttggtttatcttcatcccgtatccttcagatttgtatttttttttctccatttaaaacaaaaattatattcaattttaatataaaactattcaatgtttgtgccatttttgtttagattgagattctacttggattcatacacttaaacaaacacattttattgaaaggaaatttaaaatatgagtttatctctaagtagaatgttggggatgattatttccttatctagtaacagaatttagagaacgcagaaaggttcagttggtagaacaacctggcaatagagctgctggaagaagtccacagactactagagcagcaccattgaatcaggagagaccaatgtctgctgatgatatccagaaagcaaaaatgcgagcacaatatttgcaaagcaaatatgtgaaagcgaattcatctcatgaaaacaaagaagcgaagactgaagggcttaacaaaccttcaacttctcaggtcagcaatgtgcctacagcttctaaagttgtagttcgacctgatatagatgaacacaaaaaacctacaataactcccctaaaagttcccaacacactggaagcttccttggagtcaaagccgataatagatttgaaagagtccgtgtgggagaagtgtaagagagtccagatcttgtggaagacacctccaggtacatgtcttttcgtacattttcattggtactttgatttcgtgtctatattactgcagtgcaattaatagctctcgtcaaaagaaatattgttgatgttctctgaaatattttagctgcggtgaatagcattatttcatttttgttttcaatggagaaagatctgattgctctgtgaaattgcagatggatcacacacatgcattttgcttaagatttggatactaattcagtgtatatatgatcttttgatttgatgatgtacctatgtcgagagaaaattcaatgtggctgctgctataaatgagtttataaaaattataagtacaaaaatatataggaccccactggataaggaattttgttagggatatgcataatttcttaaagttgtcttgacggttgccaaa

SEQ ID NO: 21444 - DNA, 2104 bp, Cannabis sativa
gatccctggccagccccccatgccactagttgccaggatctggtagttttgtcgtttaacctttgaggaaaggtctgtcctctctctggcaaggcaagatctatcctagttcttgaggagcagggttgatcaacatatcaatagaccctccctgatctatcaacaagtcttccttgaagtggatttttgatgagatcctcacctcttctatcggttctctagttgaatcgcattattatatcgatggcctctctgttgcggtgatttaactctgtttggtgagatcgaagtatgtacttttggtcatccatccatctcaggaattcgtgtctctgctgagcaagtacatcgcaatcaatagtgtgtggttctttaaggaattcgcgtctctgtagagcaaatacattgcagtcagtatcgcgtggttcttcaattaggcatgcactgcctacagcttccctaagtctggccaactcaaggtcttctcccaagcccaagcgggttccctactagtaggctccctatggtttgtctcttatgcatagtatcggggatgaaaccaagtcgttgttcttggggggtgcccccaaggagtcttcctacagttggaggcgcatgtggagggtcctcccttggaggcaggtgcctgtaactttgatccacctagatgcttgtatcagtctgaccactatagggtcttgacctcccatagacctactggggagatctggccacccaaggtgtgtaagatctagcaggtcaaggcctgcaggacctagtaggacaaggcatgcagggtctggtaggacaaggccttcagggtctggcaggtcaatgcttgtaggatctggcaggtcactatagctctgccaaaatgaggccagacttgtggcacctgttttggtgacaggactcaccacatctgtagtgttcatggggatttcaattgtaactagaacctgagtatctggatctacaatctgtgggtcttgaagaagacccaaagatgcctatggtgcgacaggaattattctcgtgttaacaatggtgtttgattaaatacgaatcaacgctctcaatgaaagcaccaaactgttgacctcaaaaagtgatcaaccgacagcggggtcgtatggatctaatgcttaccacgtgttacacaaacaaagaatgaaaagcagtaagcacagagatttgttatagaggttcgacacccttgtgatagcgggtaatgacctattttttacctttttttgtatttatactgaggaaaatactatccagatcactataggtgggatctgctatagcacccttaggattaaaaagtatgaatccgtaggtagatgtcaaatgctggatagtctagggtgttggacatccctaggtgggtgtttgagagatgaagtgagaaaagagaagaggagagagccctattgggcgtgtgtactagagagagagagaagagagaatatggctgttaaacttaaactatttggaggctaagtaacttagaggcagagaatatggctttcaaacttaaactatttggaggctaagtaacttagaggcaacttaggtttctaggctagagttaaggcctttatataggaggcctaaatcctagattacaagtttcaatcctagatatttacataggttgttagataaatacaaaagactaaagtgcccttggatctagatattattcagccattctgttaggcttttagggctcaattcacagcccatgccttgtgtccacgttttgggttgtaaagagagtcttgccaggttaatcctgccatccataggccaacagggaagtttcaccggccataatcatgtcaggtcaatattggccggccatggtcctggaggacctggtaggtcactatagcttcaccaagaggaagctagcctttgacgatggaggtcagccttttgcaagttgaggaccactttgcacattgttttcttgaagaggtcaggtttccttggtcgaacggaggttccttgggtccagaagtcacttcttaactggccagtttgtgcaccaatcctggctggcctataggctcaccctagccagcctataggctcc

SEQ ID NO: 21445 - DNA, 2128 bp, Cannabis sativa
atagaatttcaaatttcccttaaacaatacgcttatttagtactttatattttaaaattgtatataagagttcgggagggattggttttaggaatttacatgactttaacttatcttttttgggcaaacaagcttggcgattactaactaatgatcagtcccttgttggccgaatctataagagcagatattttcctcatggttcattccttactgttgagattggtaacaatcctagctttatttggaggagtatctttgaaactcaatcaattgttgcagcaggggcacgcattcgcattggagctggtttaaatgtgcctattctgaacactccttggttacctgataagtccaacccgtgtgtattaagtactcatcctggtcttgtgggggcttcggttaatcaactaatgacagcagctaatgatcaatggaatgtggaaatacttgaggacttgttcgagcaacgagatcgtgatctcatcatgcatattcctttgaattctgatgtagtgaatgatgtttggttttgacaacatgagaattcgggcttttattcagtcaagagctgctaccaatggttacaagtttcgaaagggagatggtctgctgatatcgaatcgaacctttggcgttctttatggaaaaccaaagttcctcctaaggttatccactttgcttggaaagcaatcactggttgtcttcccactcgtactcaactttataccaaacatgtgcctatgcaacttgattgtgtttgctgctctagagaggaagagtcgatattccatgtattggttgattacaattttgctcaatcttgttggaacttgtcaagtgtgcctactggtgctattatggcgactgaatttggtgaatggatagagcagattttaaatcgttgccagcctgtggtgtttgaagaagctcttatggtggcatgggctatttggaaagcaaggaacgaactgctatggaacaaaaatactactagagcggctgaggtaattttcactgcaacaactgtgctgaatcaatggaaaactgcttcttccaacaggttttctcccctgcctgctgtcgtaaacaacaccagcaacaactgcattaattggacagcacctgctactggttttttgaaggtaaatgtggatggtgctgtgttttctgcatccgattcttttggtgtaggagggcttgcccgtgactctaatgaccaatttattgaagccttttgtatgcacaaagcaggttgtgttcaacccagtttagtggatgtcattggtgtcaaagaagctttaagttggattaaaaagaaaggatgggaacatgttactttggaaaccgattctcttgtggttgttcaagctcttcaaagtaatgtggtcatgcattctatgtttggctctactattacatattgtcttaatcttttaaagtatttgtctcatgttaatgtttgttttgttaaacgatctgctaacaacaccgctcattgtcttgctcgtggcgcttgttattggtcagattgtatttttgttggtagcaatgtccctgatgctattaacaatgctgtaatggccgatttagctgttctttcttaatgaaattttctattttcattaaaaaaaaaaaataccttcaagaaacattacacgttttttttattaaacatacaatgacctatatgaaattatataagaaaaaagaacgtaaaattgttatttgattttttttttttttgcaaaagattgttatttgattaaattctaacaatttcttatgtttttgtatgaagtttagtttcaacaattaagcaaaaaatttagtgcaaaataataataataataataaaatagcaagttattaatccaaaaagtaataatacgtggtacatatatattaattacaaatttaatacatttatgtgacacttactcatttttatttcagaatatcacttatcaaaaataacttaacacatgtaacaagtcttgccttatggcatgtgtattggttttttctctctaaaagttcttatttgtctttttctgggttattttatttggtgatatagtttgaacacgtaagacgttgagttaaggttggactgaattatggcttc

SEQ ID NO: 21446 - DNA, 914 bp, Cannabis sativa
gttgacataaatcgctcgtctcgatctaaaacaatagaagtgggagctccatgcatcttacaatattcattatgtaaatatctaccaatctgtcagtcccatcaattttctttactagtaaaaaataggtagacttagtcaatctatccaaagattgtaatgtccctgctactctttagtgttccgccctggtttgttgcaagtcaagcatcgtgcaacaaattctactacctcattcttcattcctgaccacaagagtgtttagatggagcgactgggggcaagccttagaaggttttttggccagaggagggaagtctggatgttaatggcagcaacttccttcacccaagaagttagggccgcctaagttttctctgtgtcagggtaggaagtcttggggtcggagctatactaactagaggaggaggagtatcccccaacttcttttatttgacaagagacttctggccaaaacagttgccagccttccccgtgaacaagttcttcaatctgttcgacatagatccacagaatcaaacccttaataaatagttatgcaagtcataaaaagtagagcttgtgctaaaatagctaccctaaacctctaagggacaccctcccaaactacaaagatggagcaacgtcatccaaggaatctcctttgtgttgctccttgactacccgttttccctttccagttactccctggacggtgggacaagccgcttcttcagaatcatcttttatctgaataggccattctactaagtcctgacctggcttcttttggttcttcctcttcctcttcttttgtggaacctcttgctaaggagtaggatccttggctactacatcatatactcgtactacttcgaatggatataacccgcaagtatgttgattaacaccct

SEQ ID NO: 21447 - DNA, 3128 bp, Cannabis sativa
  modified_base (3089)..(3089): a, c, t, g, unknown or other
tcttcaaattcatctttttgggaacaagactttccctcatttatattgtttatctcttcttctactcctgtacaagttgccttcatttttgagaaatcttgttttaacaataagtcaagaagattgccaaagtgatccattcccatattaacatcaaatgtctatttctttatctctgatatatcattgattcctttctttacattagctgtttcatttttaatttcatcagtgtctttcttaactacactcatttctcctttgacatcctgcaaaagttataggaatttaaactgaatgaaaaaaatatatgaaaacatgaagcaatctaaatacatatgtaagtaaatggaatttcaaggttactgtaatgtaaacaacatattctgcacaagtttaactactgattttgaaatgtaaaatgctgaaattaagttgcaaaaaaaaaaaaacacacatgtagtaataaattaaaagtaccttcagcatttcaaatatttcttcttcaatgcttctttcttggctagtatttgtatgcttttcagtcggcattgtaagggggatatcaacactgttgtctttctctttattcaaagttggagttttaacacaatgaccacttaatgaattttcttcagcttcagatcgaatcaaaggttcataaccaacttgtatatattacaaaaatgtatattagcaaaaggacagtatacaattaaacattatgaaaataattaaagacaacaagaaacaaacctgtaatttttggaaaacttccttccaaacagtttgcttttggggatttttaagtaacttccaattcaaaagtcttggaattcttcttccaacacgtgtctcaaacgattcccctagcaatggaatcacttcgaaacccccagacttgaaaagctagtggaaacccacataactcatagcccttcttgtcgcattcttcagcactgataagacctttaattgtttcgtcgaatgaacgacgaccccaaggatacttgtcaaaatcttctttgtcatctactagtttcataatgaattcatcaactgcagtgcttcctctcttactttctaagatgtttgtcactgtaaacaccttagccatcttgatggcatcatcaccatccttaattgttccaaacaacataaattctttcaaattatcccttgaaacaaaatgcttcccaggaaagtatttttcctttatcatattaggctggttgctatctccaacatgctttggaagctgagaacagtttaagcctgttatcagagcaaattcatccagtccaaacgttgctttcttatcttcaaaattcaattctaactctgttttattatcggtatgtctttgatgtagcaagagagaatggatgatcatgatagctggttgaagagattcatccatatcaagaagaaacccaaaacaacaacctttagatctgtctatcagctgctcacttagaaattttttaatgatttctaaaccacaccaataggtttgcacatgtattgttgattttgcaaaaatcaacttttttgcatctaaatcctacacacaaaataagggacatgttactgtctagttatttgaaatacatatttggcatagaatgtgacttatttttttggaatgtaaacatgtatttataatattcgaaataattattatttaaaatatattaaagaatagaaatgcaagatcaatataccgaaaattcattctcatttcttctttttttccgacttgatgaagctctcctttctttcttcaatggggatacttttgtcatatctacaagaatgacaaacaaacaaagaaaaaagaaacatattttatttaacatatttaattctcaggggtatggtgcgcacaatgtaaatttaagagtataattaagaaaatagactataacttttatgtactttaagagcattgatatgtaatggagaatatctgattgaatgagttgaatatgtggattcgcaacttttctaataattaaaactactggcttataattaataagcttattgatatttttcttgaaatagattttaataactattgaaaaaaaatgaagcttattggagttctgctacttatttcagtgtgtttgagcccttgtttgctttagttgacaatggccaatgatctaagtccaagtccaagtccaactccaactcccatggtttttccaagtaagaatgattattaaagtcatatatttagtttatagaataaagaaattaatgaatgaagtatgtatgtgtgtgtataggtatttgtgattcaaagtgtgaggttcgatgtggaaaggctggaaaaaagcattgatgcttgaagtactgtgaaatatgttgcaaagcgtgcaagtgtgtcctatttgggacttatggtaacaagtcagaatgcccttgctaccgtgacaagttgagctctaagggcacccccaagtgcccttaatattatcatcactacgaatactgtgtctaattaagctaattaggaattacaaacataaacaaaaagatttatcataaactaattaagtgaaggattctaaacaaagaattatcataaacgaaaagaaaagaggaaaaacacttccttggattttcatatatataatcctattactgttcatatatatttaagatgtttacatttactgtagctctgaaagctttggatggcggcgctggcttcaaaagcaaaacagagagactgttggaggagagtgatggagactgtttgatttcagatttatgatagataagatggtggtcattttaaaataaaaacaatgaatgttatattttagattgcagaatggagattgcagataaacatagggaaatcaaggaaacaaaagttagatgtaattgaaattcttaccttattttggatttgacgggagagatttgagtgattgaaactcacattgcaatgatttggggacggatcggagagctaagctccgacaacttcggcatgattgcaacggagctctttttggttttcttcttttttctttaggataggcgatgatttgggggcgggtggatcgaccggngcagctccgaaatcggcgttaatggaggttttctccggc

SEQ ID NO: 21448 - DNA, 2783 bp, Cannabis sativa
  modified_base (2736)..(2739): a, c, t, g, unknown or other
gtagtgactttgaccagaaaaagattgagcgaatggttatggctgctactctttgtattagacgagtgcctagattacggcctcagatcagtgttgtaagttctcttctcctaaaagttgtgtttcttttatttcacgtagatttgttctaaatgcattagttgatatattttttttcttctcttcaaaggttttgaagctcctccaaggcgacgaagaggtcacaaaatgggcaactcaacaagtgagtggcgcagaagatcaagaagaggccgtagatggagagctactccctactaacattcagtcccatctaaacttggcattgctagacatggaggatgactctctatctgttagcagcggcgagcaaggcatctcaatggaggattatttaagagggagatggagtcgttcatcaagctttgactaagaaagaaaatttgcatatcgaggaaaggtttttggtaaattgaaaatttttgtgtatattcattctattattgtgcgtggtcatttcggtgatggcttgtggttagtttgtatcaattattgtaaacaaaaacaaagctgggtcttggaagagaggtcgatgaaatgcttttgccccctccttgacttgtgtggcaatgagaaatgtattgtatctatagtttttggcaacacaaatagtaaagggatggcaaaaaaatgaacacgctacctgtcttatgttataagcccagcatcagcgtctaagttgtaggtcaaattgttattatttgaaacatgtaccaagatcaacatgttaccataaagcgcagacgtattggacatacgtgtcttaatttataagcccaacaatctcaatgttttcatgtatggtcaaccaaactaaaggaaaccatttccttcttttaagccaaaaatgtaatattagtaacatgttacaataaagtgcagacatattcgacaagtaagaatacttgaattgttgatatttccttcctttaagtaattgtgtgcctttcaagtcttaagcttggttacctctcatatggaacggatcttctttggggaacttatccgacagtctagtagatagctcaaatcagcaaatattttcccaagatagttcttcatagaaaatttctcttcttcgggcaaagatgctaacaatgattgattttggttctgtgtgttgtggcattaatttatttgttgatggacattgtgtactcattccactgtgtagatgtatggatgtatgaaaagaaacccattcccgacccaatgtctaccaagcactcttcctgtgacttttctcgattgcttgctgatattgtcgcatgtactatttcttctattcccatttatactgcttacaaaacctcatactattcttttgccttttaacattttggtgatactgctaattcctattctaatacttgattccaatttcatttgagttgacatatgagtctacaaattttcaggtttgcctattgctcctatacacaggtctggcatcctatgaaaacatacttggaccatctctaatgctgaaactcaaatttagtattaaatctacactaaaagagtactaattcattactaatcttttttttttagtattacaaccacaatattaaaaattatacaaaaaatatactccttattattatattattctattgtacaataaaaacatttacaaaaaatagaatgcggtggcttacagtgtctcactattattagtgggacacagtagacttccatcaaaatagaatggattttaaggtttagttggaatattttctaaaaaaaaaattacactatatataagtttttaatgtgttattgtagatgattttagaacaaatggaagtaagattcgtccatggcaaaagcatatgattcattatagtctcatcaacactcttttcaataagggcttgtgtcatttgagtatccaaattaagagtgtaaatgggtcgggtcggatctgatccggctatgatccgacttgatccaaatcatgtaaggatctgccctgccccaccctactagatcagatactcggatcagatcagatccgactcgacttattcggatcagatctgattcgacccatctctttttttttaagaattttaatattaacttataattttatatttattttaattttgtattagtattattaaatacaatgctatgtttattattgacatttattaatagattgtgtaaagataatatatttttaataaactctttcccaacaccaacaacgggtcgggttcgggtccaagtttgggtccgagtccaagtttgagtccaggtttgggttcgggtccaagtttgggtccgaatctgagtctgggtccgggttagggtccaggtctcgatccgggtctcggtcggggtccgggttagggtttggtttcgagtcccgggtccaggttcgggtcccgggtctggatttgggtcccgggtccaagtccgggtcagggtccgcgtctgggtctgggtcccgagtcccaattcggatttgagttcgaatctcgggtctaagttcgggtccaggtccgggtctcgggggcggatctcgggtcccgagttcggttttgggtcccaggtccaggttcgggttcgggttatggtcggggtctgggtctcggctcagggtcaggtttcgggttcctatccggaatctggtccaggtccgggttgttgggttttgtgccctannnnaaactcatttcaatataatcggatttactaattaataaagatca

SEQ ID NO: 21449 - DNA, 5870 bp, Cannabis sativa
aggttggattggatcggatgcccaccccatgacagttttggaatgtgtaatgtgtgactttttcattgaaatgattcaattttggcctccgttatgattcttgactctttactcataaagaatatgaggcacatattcaagttttgaaagataaacacacattgggattcaaaacttatcttggccattctaggaggtcttgcttgagacctggctagacctaaggcttgatcatgggagttggctagctttagggttttaccctataaagcttgcctgttcatgcttgggtttggtgaccctagccagttattggttgagtcatgggaccctggcctcaaggcttgtgaaccttggccatcatggaccttggttccaagtaggtggccagttttctgtcctttcttgactttggcaagaaactttgtatgaaacttaatgacaagtctattatagtcgaatgttcaacttaagactcaatatggctaggttcgtgtaaggaactatgccttactcgtagcctggtacgtggcccctataggagttatgtccaggtatttttttgctatatgattctagcagggccttggcctcatgcatgcaaaccgatctcatatccggcctcaaggctttcatgttcttgctttggcctataggccctctatttttgaacactaccattgtttagccttaaatccatctataacactcatatgattgtcctggctgtatttttatggccttaataggtaaggctctggaattactttgtcaagccgaagtatgcctgcacaacttagaggcaggcttagtagcttattttaggccttaaaatttctatgcataagttcattgtgccagttcgatgcgttgtacagtatgggtgcccctcaagcgaccatgtaggcaagtctcttagtcacttgctattcaccaagttttagagactttgcctgggttcttccttggggtggtgtccatagtacacatgtggaactaaaatagtaactttaagaagttagtcttgtgagcaagtggtttagacacagttggtctaacatgtaccaaaagcttacatcttagtgtcgacttttgaaatcacatagtggctacccctacgcggcttagcaaagcagaggccagcgttgaagaacagtgggagaccacgtactagcgcttttatgggttcctgcacgatgaaatattagaggaacttggttaacaagttggccagtgagagtacttaccgagatgttccctatttcagcatttggtagaagttttgactcaagttctcagtgtactcgccagacttgtgtgcacctttattgttatcttatagcatggtggagaccttttcagtttggcccgaacatgcttgttgtaagggatttgctgccaaggaatattctttagggagtaattctcctatgaagaatttatttcctcgatctgtttgtttacgggcctagaactccttgtgcatagtcatgctgctttgagttggcttggtctcttcttctttccgttttgtcaatggatcctactagcaagatgttgtgatcctcttggtccctatagactaaaaatatgagagcaaactatgggtggattgggcatgccagggcaagaccaggttgccagccatattgagggagcactgcctgggcaaatggatgaggccatggccggccagcaagtggaggtggtggctggctagaatgtggattctatagccagccagcttactgagggcatggtcgtccatccttctaaaggcccggtctgcattcgattggctttgcccctcggtgtaattgatgtagagcgtttgtgcacttctatcattagctatacaacttgcattttgaaaatgctcattggtggtgttggattaccagttctgtgtgttatgttgtgcagtattagacaccttgtattaaggtaagctgcgataggtgtcgtccatgttggagtgtcttccagcatgttgacctcttctgagacaacaatgttgggttttggatgggcaccaagtttgttttgtcaactatggtactgcttgccaggcgggcaagtgcatttgttgtggtattctgttctttttgaaacaggacttagttctttaaagaactgagcaggtaccaaatttttcttggttttcaaggcacagctggctagttgagtgagtgcgtcagctattgtgctgtctttgggggcttgccttctagtatagcctttgagttgtcttaccaactctggtacgccaccatcttcttgtattgagctgtatattcacctaggacataacctatgactagttgagagtcgcggtgcatgtctaggtggttagcccacactttgtatgctaggttggggctagcctttggagcttcatattcaacctcgttttaaaaagccttgtaactgaccttgttacctcatgcttcagctgcccccaggtggctagggggccatgcttgcatcgggcaagtggtcaacccatcttttaggctcttgttctcacttcttctatggctcctgcttttctcttgaactttgagaaatttagggagatatgcttctatgattagccatgaagctaatgagagcttggcctttggtggccatgttcggttatgaggtgcttttatgttagccgagtcttaatagtttgctttagtaattggcctgatgctcaaggtttctgtagaacctgctgcaactattgatcggtgtatacctttatggggtgtatctagatgtgtagccttagctttctggaagccaagagcaagttttgggccaacttctccatgagtgggaactgacttttaatgtcgatcagtctcttgttggtgtagtatatagggtgttgtacactgacctcttctcttgtgaaggcagcactcacagcatgctttatgactacttggtgcacgccttcctcttctttgtctagcgatttgggaaacacaggtgatcgagccaatctattcctttagctcctagaatgaagtttcacattcctttgtccactcgaatttgttgttgcttctacttcgcattgaagaagggtacccatttttttgtatacttggacacaagtctacttagtgcagcaatgcatcccattcggctttgtacctccttgattgttgtgggcgacttcatgttcagaagggcttggatcttgtttggatttaagcttcatcatgttttagctacggaggattttgaaattttctgtcaaggttctcgatatgcccccagcccttttagacttgacaagcaagtcgtccacgcacaccttcatgttgcggctgatgggatcattgaacattttgttcataagcttctaatgtgtggccccttgaagggcgtaactttgtagcagcacaggcctaagtctgttaagaagcttgtatgctcttgatttggtgggtgaatcttctttttcttagctttggacatggccaagttgtaacgagcagattgttgatctcctcttaacatccacctcatgccttgttgggaaattcaagcaaagatggttgatgggtgctgccgccttcaagttgcatagagccagtcagcccgtcatggtgttggaagctgtgggaatgtcgattatgactaactgttccatcaaagttttggtggttgaatttttttccagcagtaaggggtaatttgatatacccaatgggtgcgatgccttggttaaagaggccacacatcacttgattgcagggtgccaagtcaacaagtaagagcctcatattttcatgtgtttattttgaaaagaatgttggaggaggctccattgtccaccatatatcttgttgcagttatattcctaatttgtaaggtaacgaccaaggggtcattgtgtgagaaactgtcttggacataatcttctcttagagaaaaagatcgtggtctctccaagcattggttgcttagagcctcattcttcacctgccaggaagtcacttttgggcttgtgacggagtgtttgagcatagttctctctagctatgtttgtcttgcctgtgatatggggtccgttaatgatgcccccgaagtgttctgccaccagaggttttggcaaaattggtggtacctgcctgtgcgcctgagggaggccagcctttatggatgaaggctagccttcaaacatggaggtcggcctttggagatggcagctagcctttggaggcagaggccagacttctgagatggaggccaggcttctaggatggaggccagccttactttgggagttttaataggagacttaagcatacacacttctcctccttcttccttggacttcatggaataaagtgatagttgaatttccctcttttgccattatgttgggcagagtcatcattgttgcgcttgtctccaccattctcattgtgtcagaattgatagcgatcatctatgttggtcgacatgctggactatgtttggggcgctatgaggccctgtgtttgttcatcattaccttgtcctcttggatgggcttaccggacagcctcttcaaactttatgaagccaaaaacttgcttaaggaactcctgtgtgatgttcattgagatcctcctgacatctttccagaagtcactcaacagtagaatgcctccgagtatggccatatattggccttcttttgtcaggcttttgaccttgatggccacagccatgaactgttgaatgtagtccttcaagggttcatcttgtctttgctttattttgacaagatcctctagtcgggcacgtatttttcttgaagcagagaactgaatgtagaaatctcgggagagctcttcccaagaattaaatcttcttggaggcagcttgaaataccattggtgggctatttcaactagagtcgccgaaatgattcggcatcgcacatctccagacacttgtaggagatctgtttggatctcaaagtactttcggtgtactagagggtcttgctttcccgtgtacatcttccaagcgggcctcttaaatttgggcaagggcaaggcattgatgtatgttgagaattgtgatcccctcatcctgtctagctaagttctgagggctttggaccagctagtccttgaacatgtctcgaatttgatccaactacagaaggatctgttgctgcagaggcctagtttattggccttctttgattgagctgcaacctcggatttgacagagcctgaccggccataccttgggataaggtatactcaaggctggccagccctaagtctagtgcttgtatatggccggccaaccataagctgggcacctggccacccatgcttctttgcctgattggtggagtttgtgcattgacatggagtagatcgcaccaattgctggagtttggtggatctaactatctgaattgattaacttcacttctcaaattgttgtttttggtgttgccatcctctctcaatcctcgtcggttgaaaattgatcttcgggtgactcgctccccttggggagggagtgctcttatctggctagccacggggacttttggaagagtttggccagccataggggctcctgctagtggctggccggccacaggatgggcaaaaggggttgttgttaagcttaagattcctagtcagccccccatgccagtggtcgcctgaatctagcaatttttgctatttgacctttaaggaaaggtttgtcctctctctagcaagggaagatctgtcctagttcctgaggaattgggttaatcaacatattgatagaccctccctgatctatcaacaagtcttccttaaagtggatctctgatgagatcctcgcctcttctattggttctctagttgaac

SEQ ID NO: 21450 - DNA, 59418 bp, Cannabis sativa
ctctacaaggtcttctaagaaaatgaagagaagacgatagtaaggaagtgaaagttccgattccatccagtgaaccgattcaatccattccaaaagcaaggatctgtccaatggatttgccttggaaacaaagtcgtatttgagttgggaagttctaggtttaaggtttgcctacggagaagacttaatcaattcacttcgtggataaacttcatggtgttattcttttggaatttcctaagttaaggtgggaaagaccaggggaagcattggcactatggaaagaatctatctctggcaagggcaaaagcgataggccaggttaacgaggaaaggtctctcgagcctcaggaatgagagcaagcaagtccagctttgttgtgcaagtcactgtctttatccgatccgagttgatagatctgatgcatatatagtaaagaaaagctcttccgcggggaaattccctaactttgaacgaaagaatagtaagcttctttccttgctacttgaaagaatgccttggcacactcatactagaagtcaaagaaagaactcgggtctaagctctcaacttcaaggaaggaaaccgaaagagcagaaatgtcatctacctttccaacggaatctttgaccggctaacgtgagttctaggaaaagagagagactttaagctaaagaaactcttttttacctagacattcttctaagagttcagggctaataggcccagtctgatagttattggctgagaacatagagcggggaaagttctgactttgtggttccctaagagcagttacctcctgtcccggaaaagcctaacctgtctagccggaaaatgcctcctttttattacctccaatagagttgttctaacactgcaaggtgttattctgggagtgttgcatgcccaatagaaatctttcttagactctaccccttacagagagaataatacaaactttaatacccgaaactccaacggaagaactccggcaaagacttccactatgagctcgattgttccgcttagggcccgtaggaatcttaagccttagacttcaaccaccgggacaaatgaaactactatatccggaaaacttctactctgtcactgtttcccgcggccggaagtttcctttttttaatcgagattagtttggtgtgaggctacgcttcttagtacaagttccgactgatctctttattgtatcctcttttatattaacccgggggaggcggagactcggattttgacagcctacctttccaactaagccgcggttttatcttagaggctcgagagaccacgcgtttacctgtaactattcaatatcatatccggaaggaaatttttattgagtgggagtagggtctatgttgaacagatttggggtacagtaaattttcgtgccatgatcttatccataatgtccccttttagagagcagtagaatgttgagctttgagatcgtcaacacaaaatccgagaaaattaggataaaatgtactggctggagggacagactccagaaaaaaccgcggtcatacttgaagaaaaccattgactgttcttaaactccatagcctggaatttagataggcgagaggtgccccctgtagttagtgagtcgtcccggcagactttttcttcttttatccgaaatggggagagtttatacgaaccagtaagaatagcccgttccagtctaacgagatttactagagagtaaataaaatcatatttttttaccgtctcctgtatttgtaggattcttaggtgtaggttcaggtttagcaacaaagtaagttggacggggtaagaaagcctgtcctctaaggaagcctgcccgcaagaactctggttaagtgccctccaccgcaaccaacataacataaagaaagaaggaaccggtccgcccccatggtcgccttcgttcgtaaggtaagaacgaatagacattcttgtcttggcccaggttatgcacatgaccgaaagtgattcttttgtgatctcgcttggaatagaaccctataccatagttagccctttaacttaacccttgctccttccgccttggagaaccgcttgattgaggctcgagagaccttgcaactaagagatgggtaaagccattttgtgaagagagagggcaactctaccacggagtctctcgccgcattagtagccccatagataaaggaagttgctgaagtccctacaatagttcttaggggacccgattacctacttctgccggcactaaaggggagagagtccttagagtagttccaacgcctgtggatccggtcccgggttcaaccatactgcgaattctcaaattttgggtaaagaggagtgccccacgtcgctctcaccatcttgtttgttctctttgcgcgcttcactttatctaaaaaggggtgagtacgagatctttataacaaagggactaccggttaaattcaatgatttgaatgtcacttagtagctcccacagatagaagaaccccatcattaggatgccagacgatgggttaagctcctaagatcgatgaaagcttatagggagatccaactataaggatttcaattccccaagcggatcccttgcgtgctatgtatacgggcctctccaatccaagaaaattagatcaagccgcatgggggtctttttcttttggacttgggagattgcataaggagccttcttctggtcagtttcctgccaaccagtttgaaattaaagcataaaaaaaaagggcaagccagtgaataaagacaatgagaaagaaaactagggatcgggattctggggtaaaaggggccccttcgtggacacgtaacatgagtccgaatgtccattccttaatatcgctatgacttccctgggcaagcaagtgagaaagcagcttaataatttattccctaagataaacactagtagttctcctaaaaacattcctactggggatgggatacttttttttcggggatagtattaataaggtgtatatcttagcttagagttaatagtaagatagttctcctattaatagcaagactagttataatagtaagatcgtgtataacgtggataatagttctaggactttcagtaggctcttagaccattcataagctaaaatcttcccttgcgagcgcttttggccgattcctcgccttagctgcaagtgccttcaatttaacttgcacaaaccgccctcagagtgtattctatattagtgagagtagtaagccctttccctttcatgtgcagcctagtctctgtattctattccaaagagggcattctattccgaattctcggcatcaagacaggaccgaccctttgaaaaggttagtatccaccgtactaacaaggcattcaaagacaggaaagagccatgcaggggattctgttgatgttgcctcttcttagaccttcctccgattctgggcatggagatcaaatttctgatttacctgttccgaggaagagataaaatatctaattaaattagcagatcagatgtagcatgagttctataaactttattaaaggtgcgaatgcggggaaggtgcctagcctttacatatgaatctgactctatcaattcctttttcataaagggcctagcgatctacaaccgagtcttcttcacgtcgaaaacagtccccgagatgcttctgattcaataattcctgaaaacagcatttatcctaaaaaaataaggcgggaatgtgtaagatcccttccatgagattccgttgaaaagcatggcgtaggtcgccaactggttccaccttatcctgaagaaaatggaaagcttcctttatatctatatctccggtatcgaagaagtcccggtcgagaacgaagtctcggtgaaatgaatctactctccatacttaacacatgcgattgttggattgcacctttgatatccgctaagaacttcccaatcaaatagatctaacctggctaacaatctcaccggtgaagttatagctctcgaacaagcgatgaggggcgaggttgaccgaacggatcgaaggtagtatagtatttaacgttgtttccacctgcatgcctaaccgctagggcccatcctaatacagtccttctagatgtatctttctcattccccgctatccttgcttggctagcttgcttcgaaagctgtcatgtaagaaaccaaagaggactgctaccgtaactgcttgactaagtcctcggtagaactcttcctttccactcctgacatccgctctgaaacaagcttggtgtatggcgcaccgcaatcaacggatgtgagtgaatgcattggccgattctcatgcctaatgtctaagccggaggcccctcctgacaactgtatttgagtccgttcactcctcactctcctaacgcggggtaagtgattattgatatccgactgccggtgtcggtacctacgactgtggaatgctttttttatgttattaaaagaggaactcaaagtctagtttgacttcagccatagtggacaggagaagcaaagaagagtgaaggcgaagtgcacctgatcttgccagatccaacaacaattggccccgagagttcctcctcttctttctgagatcaactcggtctgtgattatagcaactattttaatagttgcgatagccctcctcaatggaatcaatccatcctttctctcttctttctcatccgccctccggaaacgaacggtagggatctttcttttctttctttttagtcacgatcagaagatagtagagctggttatagaattatcttcttcctcatcaacctatagccctgtctgaaatcaaagctagggttacggaagggtggaactttacttcttcctttgcttagggaataggttgggttaagtatgggggtacggctgaaccggaaggagatatctaagaaaagccttcgagttggagcgaagccactcgaacgaatgtgagaggagcgaaagtctgtgatcgaatttcaccgacagagatgaggtcaggtgctcccgggatgggtaacataaaggagagaggggcgacagccgcgaggcacttttgctttgattttcttgtttcgggagatgggctttcgtattagttgggtttgattctaccgaggcaatgttcaggctcttcaagacctttttctaagttttgaatatatctttggtcactttctttgtgcaagtaatctgattttgcttcgagcacagggcttcacaagtcaagtaacggatcccatgtagggcttcccgcccaaatgctccaatagagctcttcccgccttccagataaaacctagtgaaaacttgttttataggttggttggaatggggggttgctcctatcttgactcgatgcttggtcactagcagacttgtccctccgcggattcgtagacccactaaagtcaaggtaggtcaaagaaaggactatctccggtggatcttctaacttcagtctgtggtcgtagagaaggtaaatagccttatttcggggctggggagaaaggagaagcggcagtgtccgtaaagccgcaagtcctaatcgtagcacataggccgttgaagaaattcggtaagccttggtaagccgccttgtacgggggttgggcggaaagcatttatcgtatagtagtaatagttatacccctcgttcctacttgagtcggctagtcccgtcccgggaagctaagaaccgtcatagcccaatgcacaaaaatgtcttcaaagaaagaagactagggcgcatgggactctcaataacggggaataaagactcagagtggttctctgtctgtgcccctttttccagccatgtaggttttcttgaagcacaagccattctaagagcgccattcaagccttagcctttttcaggctaaagactgttgggagagtccagggcggcgaccattgccccttttggatgtagctatttccttacatatagaggagctccaggcgtatacacccagaagctcgcaagacccacggcgccttgctacaataacgagtggctagttcgttcgatatctaggggatacccgtctacttcgcttcaccaagcggaccccacgtactttaattgtccgtctgctactacgaacccgacccataggcccatacctttctcgaccgaagccataagtagtagtttaacgcttgatcgaagcggcagttaccaggcccggcccaactatcccagggcagaaggacgcaaaaagccaaatgttacaggggcttggggcaggaagatttatagacacagaaagagaagatctagatttcaaagaagagaagcgaaagccgctcacaaatgctaaattggggagcagaagccactcgcttcactaagggcaaggagcaaaaaccactcaattctttgtgaaatgttggatggatgccctttctaatttattctattaattattagcgggtagattgcttcgcacctgaagcatagatgagattagagatgaaaaagacgctagcattagcagaagatcattgatcatactttcttgccttagccactattgaggaagagaaactcatagcacagacgatccttacccgtgaaggtagtttacttgcttacttgttagaggaaggtcttgaagagcctgttgttaacaaaacggagtctcaaaagcccttttatcgcactggtctcaaatcccattttttttatcgacaggcgccagtaaaagaccacctagaggcctatgaaagtcacgttttttcttaagaaagatggcgcctctaaaaggatgtcttcaatttaatcagcagccaaggcgaagagagagtcctaccatcacgagggattcgagatagaaagagatagcaagccggaaggacgacgggagatgatcgttcggacaggagatgtggacgagttttagcctagctcccagaataaggtaccgggacctcattgagcacaagatttgagcggttaatggagagcaccaaattcatgcgttggctttggggcgaggatcaaggaggccggatttacctttatgaacctcagcgtgaaggcttgcagacctcctattgcctttacccagcggcaagacgcttagttttgtcggaatccaaacaacttcttaaatcccctctactgtgcgggtgctaagactaggcgaagaattaaatgaatcagttcgcttgaccaacccgagcctctagttcttctgattttgctaacatccttcgatgacaggccgaccgaaggaagacgcaccgggatcctacttctatctcatcagaagcgggcgcataggctatagaatatataatctcaccttctactctatcagctactgtgcctaatttgaagctttttggtcataggttgccagttttcggagctcactttgcaggtcagaactatcggaagacgaaagagaacttatttagacgaaaagtgtgccggtgccattaccccaaaaaaccctacattagcagttcgggtggaatcagacataaaccaagtccaagaagaccgaggaggccttggggagaaggtagcgcactaattctatcctcctttcctgctactagggaagcgcgtgctactgctactacttttgcacctgctcctcctatttcaactatttgaatgaactcctacgcctggaactcctctttatttaccgcatttcttccttctgcaagagtcatgttcactgctcctgcacctccaactccaacaggaacttccgcatctctattcgcatcttcctcatatgtagtatctacgcttgaaaaaaaggctttttgatcgcatctgaaacgacaacaagtgcgtgcatttccctatcaaagcccttgaactaaccttttaggcacgaagggcattctgaggatgtatttcatcagccaggcacccaccataatattgatttgttgaaaacagctccttcgtctaccgcgcctatttgtattgctacaatcatgcttaccgatatgcaactgactgaacaggacatatggccgggcaggacggctttgcttaagaccggaatgctacccccgctcgaactccagaactaaactcaagtcattgctcattcccgctcatctttgctagcccatgcttgctataacaattcttttgcctactagacttgtttgtctaaaagaagaaaagatgcacgagccactctttctcttatataagctatttgaagatagtgatttgaatgcctatcccctgcctatgcgcttgcctttactacctgccttgaactactgcacttgcgcatactttttcttgctctatccagaagatagcttgaactggcattgtgactacagatatatagccaatagaaagaagtattcccaagctggagaggtgggagaggagagaaattcaatttacaggctttctaccaatgaccggagaccagaaaggggaatagagagataagccttgagcggtcagaccaattacgatcgattcgctaaacattcaagattcgagatgagctgctaaaagaaggaagggcgatagagagaggtgggaggctcgagagacctataatgcattaccagaaggagagctaccagcactaatagctagaggacctagaactccagaactagagtcagtgattgcgccataacagagtgctagggccggagagatattgattaatgatattcatagggattgactggctcgcttgctgccagccttgaacttgaagtggatctcctatctatattcgacagcttgaagagggctgatggctgatttctaaagagaaattgtcattgaaagcgattccttcgctcaagaactagactcaagggattgtgcctaccagtcaagacaggaaggtgggacactgcctcttgaccgaagcgccaaccccccttctctaatgcgcatattgagactgagcttgcagcggatctaagcctatcgcccgtctccaactgcctttctattgcgcctgccgttaactcctgtttacctgcctttcggagagttccttactcataagtaatatactgattagattaaagggaggagatatctttcataaaagtcaatcgcaattttttattgaattcaaagaagattgcgccaatgaaagagatagaagagcggtatgacagagctcaacaaaggaaggagcttgccaaactaagcaagggatgccgcaagaaagaaaagggcagggccagcaagtaagaatcctaccaagaccttcgagattaagagcgccagagctagaagcggcagccattaagtggagaatttccatccatttgctgtctcgttcgctacctcaggtcataattacccaattggctcagtttgagttctgactatagctgcaacctatctcatattggggagaagtgtaccgctctcgatcaaactagaaatttcataagagaagaaagatcgtagcgtagaaaagaaaggagaaatcgttttgattcgaggctcctcccttactttaacaagtaagcaagtaaactaccttttttgtttgcctttacgagttgagtaaacaaataaaaaagctttctcgttatttaaggttataccactctaatgacaaagcgtccgttcacgtcaggaatagaggtttttgatgtagttgcttgtagttttctttttgaaatcgagattgggttggtgttcagtgtaccgtgggtacaagatcgaaaagaatgcattggatggatgcccgggcattgagaaggaaggacgctttcagaggcgaaaggccatggggagataccgtctgtgatccatggatctccgatcgggaaaccgtatccaagctccgtggctagtctgcgctctttggacttttaaaacttagcgaactgaaacatctgagtagctaaaggaagggaaatcaaccgagaccccgttagtagcggcgagcgagagcggattgggggtttgaagaaaaacaaacacgtcttgtcagcaaagtgttcacttctttttcgccaggtttcattcgatttgttgtggattggatgatggaaaaaccagcaagcccctttacttgatattctattagtaaagggcgcagtgaactgtaattgtgaaaaggttggaagatctggccaaagaaggtgatagccctgtagattcgttcccatggttcgatccttcccagtaaaacgcggcgtgttcgaattctgatcgcttttacgcgagaaagggggaccaccctctaagcctaagtattcctcaatgaccgatagcgtacaagtaccgtgagggaaaggtgaaaagaaccctatttagggagtgcaatagagaacctgagatccgatgcgaacaatcagtcgaaggagcggagcttagagcctttacttgatattctattagtaaagcgcactcactctaacggcgtaccttttgcatgatgggtcagcgagaaaatgggaacagcggcttaagccattaggtgtaggcgctttccagaggtggaatcttctagttcttcctatttgacccgaaaccgatcgatctagccatgagcaggttgaagagagctctaacaggccttggaggaccgaacccacgtatgtggcaaaatacggggatgacttgtggctaggggtgaaaggccaaccaagatcggatatagctggttttccgcgaaatctatttcagtagagcgtatgatgtcgatggcccgaggtagagcactcaatgggctagggtggccccatttcgccttaccaaccccagggaaactccgaatacaggcctagatcgtttgtacagacagacttttggggtgctaagatccaaagtcgagagggaaacagcccagatcgtacgctaaggtccctaagcaatcacttagtggaaaaggaagtgatcgagcgatgacaaccaggaggtgggcttggaagcagccatcctttgaagaaagcgtaatagctcactggtctagctccatggcaccgaaaatgtatcagggctcaagtgattcaccgaagcgacgagaccttgaaagctgctttttcaagtgtcagtagcggaacgttctgtcaatcggggaaggtttttggtgacaacacctggagatatcagaagtgagaatgctgacatgagtaacgataaatcctgtgaaaaacatgatcgcctgccagtggaaggctttctgcgttcagtcaatctacgcagagtgaatcggtccctaaggaacccccgaaagggctgccgtccgatgggtacacgaaagtgacgaagttgctttgactacagaaccatgcctgtctgttggagcgaattggatgatcgggccgagggctgccccctcttcccctcactctcctttccctaatatgaaccttgagtcatcaaagcctttctgactcggcctggcccggtcgccctacgcgactggcgcttcaaaaggtagtttacttgcttacttgttagagtaaggcgaaactctcgtcgtagtttgtttggcgacctaaggggcggacactttttgttatctaaaggcgaagactctgaagtgggcgaacatgccgggctccggctccgcgcacctgctgacacctttcgaagcactttctagtgtgcgctttagttttagaatgtgtcgttcagcgtcacgagtctactttctcatttcagtgctcgcctttttgaatcttcagtaggggcctttagtcttttgattagagtagggtcgcgagagagcagagcgtaccgccctgccatagtcgcgagtctgtttatagtcgcgactgttgtcatagtcaacaaggttgaaacttccaggaaaaaacttcgaattgggagggcgatccccccggtgaactgaccgtaccccaaaccgacacaggtgaacaagtagagtatactagggcgcttgagagaaccatgtcgaaggaactcggcaaaatgaccccgtaacttcgggagaaggggtgctctcctttcttttgattaggaaagcggcacataccagggggtagcgactgtttattaaaaacacaggactctgctaagtggtaacacgatgtatagagtctgacacctgcccggtgctggaaggtcggaaggagaagtgttataagctttgaatggaagccccggtaaacggcggcagtaactctaactgtcctaaggtagcgaaattccttgtcgcataagtagcgacctgcacgaatggtgtaacgactgccccgctgtctccgacatggacccggtgaaattgaattctccgtgaagatgcggagtaccaacggctagacggtaagaccccgtgcaccttaactatagcttcgcagtgacaaccttgatcgaatgtgtaggataggtgggaggtggtgacacacaacgaccaatcctgaaagaccactctttcgtctaaggatgcctaaccgccgcaccgataattcggggggggcgggacactgcgaggtgggtagtttatctggggcggatgcctcctaaagagtaacggaggtgtgcgaaggtaggctcaagctaagattctgctcgtgagcgtaatggtataagcctgcctgactgtgagaccgactggtcgaacagagacgaaagtcggccatagtgatccgggagtcccgtgtggaagggctctcgctcaacggatcaaaggtacgccggggataacaggctgatgactcccaagagctcttatcgacggagtcgtttggcacctcgatgtcgactcatcacatcctggggttgaagaaggtcccaagggttcggttgttcgccgattcaagtggtacgtgagttgggtttagaacgtcgtgagacagttcggttcctatctaccgttggtgttaaagggagaactgcgaggagccaaccctagtacgagaggactgggttgggccaacctatggtgtaccggttgttatgccaatagcagcgccgggcagctaagttggtatggaagaactgctgcgccgcgggaaatccttctctatacaagttctcggacgaggtttttgaacagaacttcgataggcgagaggtgtaagcaccgcgaggtgtgaagcgatctcgtactaaacgaaacgactttcactttccataaccaaaatgaaagaaagtcaacctattcctgcaattgcggtcagtctcgctacctctttagttgccgccccctacttgctcattcgcaattactaccacaagaaagtagcccctttctctaagggggcttatgcactccacaactttcttatgttatggggtctcgaagactgaatttagctgccaaccctagtcagcaagctgaaaaagccctttccccttttcataataataaggcttcatagctccaacctagacaaggtagtttacttgcttacttgttagagtaaggtcttgaagagccttactaagcgctggttctatcccggccaagcaaccaaagccggggacctaggtgggaatagtgaaagaaagagaaggggaagaagcggggtagaggaattggtcgactcatcaggcccatgacctgaagactgcaggttcgaatcctgtccccgcctaatcacttgagatgcatttttggtatcggtggtactggacaagctcttagggaataatctctttcttatttctgcctttctttcccggcaaatcaaaaatttcacttcgggtgagaaatttataggtgtcggtattggtcggttacgcagctggtgtattttcgacacggtatgtcatacatagcatggattgggaaagagtacagctgatttatcacctttctgtttcagtagtggtctgtgtcgtaattctactttatttcttttatttatctaatggaagcttcttgtctcgggccgaatgtgcgggctcggggctccaactaatctagcatcggcttgcaggccgacggcaccggcagaggcggctctgtttgcttgcattctctgtcgcactagaagcaggtagtcaacgagagtgtgatctcgttatctacgtcaatgaatgagactataggcagactactgtaactacttaattgtcattataacataacatcactatagaccttcaacaagtaggaatctaacctacaatgtcacccttttgaaaagccgaaatcaccgtcgtcattcgcaaaaggtagcatcatgatatcttctttgacgatgcgggtagactaccttcacttttcatggagcaaacagagtttggtagtcggaccggtaactaactgttagaaaggaatagacagaagaaagtgttagagaggaataagcgagtttcagagtagaccgaacctcagttgaccgatgattgggtgagaccgcttgccgaacgcttcggactgtgccctcttgcctgacctgatcttctcttgtttgttccccgccctgctcacgagtcgactattccagtattggccgaactctttggctggctcacactctgtccatggaacccgtattttcgtcgtatttgttactttctttcggtaactgggctcctccaactactgttgtctgatctacgaaatcccttcttttctggcggagacccctttatcgaaagcgagaaccatagaccgcttgccttcctcttcgaactgccctctaaaactcagttgagcacaaattgcctttcctgagactcaagccccggctcacttatttgctggtcacgacctctttgtgggagaactagtacttccctttgggacaggattccacaactctatcattttcatgagagcccttctatgcggtatacttttgctccgacttccactctttgtcccactgacttcggactgctggagccgaaactggttggtgctttgccgggtccaggaaaagcggattctcagttagctgctttttttttagcacaggaggggtagatcaggaagcaagtctgacactcatattggaagggactgaattccgcaacttattaggagtagggacttacggtccacgcattaaagcgctaatttttggtctgaaaaagcgactgttttaacaccgatttgataagattacaaaacgactctctttcttgcatgctcccatctgatctacgaccaccctcaatcgtaggtttcgctgccccatccaacactaaagcaaagagcaaagagtagtccctgtggggcaaccagccagcaaaggatagggctaaggatccggggttttcattgaccagcgatcagaaagcggtcaaagtcaggtcagaccgagctggttgagcagcaggaggagaatcggtctaatctcagggaaaccacagtcggagtcataaggaaagtaccagttggacagggccggtaaagccatttcttgatctttcacagctgtcagacggtagttcaaaaagagcttcagaaggctggccagcacacgagaaagcagaaggatagctatagaagtgggggatttattcaaaaagtggtttcaataaaaaaaaacagggaacaagcccagtatagggctttgcagggaccagttcggagtactcagtggtgaggaaagcagtagcttgctttcgacctaagagggaagcgcaagtggaagatcgactggaagagagaggacagaggaagcttactcaaccatcggtggaagggaccggatcctgatgaaaccactttttccttgcgccccctatctttgtctttggaaacaagtgacttttcctccccaatcgcaaatgactcattctttgctctgtccctgtctttttgaaagagctctggttttctctcggtgcgagggtccgattctgaacctgccgctatggcagccgatacaacttgaaagcgagacccttcactctactcctactcgaaagatcgcatgcattgaaaaactattcgacagacggacctagctgattgatgtcataagcaatcttcctcgtatagcagcagcctgaaatctccagttcacgctcagcgtgaaggaaagcacttctactctctctgagccctccatacagtggcacatcaccagccttgccttagttctcttctcgttcaatgctgtcttttcagcgctgatggaagcatgccaaggtaaagttgacgatgtgtggtgacgtttagcctttctccggatcttcatcttgccctatgagctcatgcagtgagtgccgatgttcaggatcccttagttctgagcgagggcttgacccgttgaggagggcatattcttctgcatttctcttgtcggatcgcccatgatgggattccccgtgtccacgtcgtcgaagagaaggtctttggacccctttttcccgtcgtagggagcactcttctgagccccaagattcgccgaaggatgagatcttgcctatgcagtaggattcaaaggaaagttatccgaacagtgagacccgggaagactactacttctgtatttttgaaaaatcaaagaggcgtttgaagcatattttcaagcagggtctggatcgataggtagagggctcaaagcgggacagaagggcttacagggctctgggaaagaaaggttccactacgggagctggactccaaaaagtcaacgaattctttcagccacgtcctttgcgacgactcgttcagctcactaaacccagcaggattttcgacttcattcaccggtgccgtctactccgacgctgcttgatctactgctccgctcgggcttccggactcgacagacactggtcactaatgtttgggtagttcttctttcttttgccagtgatgagattctcgcaaaccgccttactaacccttttatccggcataccaacaacttttcacaaaagcccgataaattgacttcaaagatcaaagaaaaccagagatgttcgagagaaagctgtggattgagaggtctctcgagcctttgatttgcaagaaggacgctcgagagaccaccgaagggcgtttagcgcgagcttcccaacggaaaggccagaaagagtgaccgaccacagggagggaaggtttttattccactactagaacggcactgactaaagagagagaattttctcaatcccacgagcgacaacacgacagagacagcacgccttatgacgaaaggggagagtgaaacctagaacgacaccgccacgagaacgatacttaccggaatgaaagctggaaaaaaacctaccggaaagagagatatttaccaacactactagagcagaacggcactgacaactaataatcataatggcgctcgcctattcctctctctgatctacgaccaccctctctttctgtcgagctccctcaaacacaagtacggataaggcatgggactaccaggcgctatgaaactaacctttagtccagtcctactgctactacctgcctgagtacagacaaggaatatctatctcttactcaagcaagggaacaagccggactcgacttgggagctcttccttcttcttccgaaaccataactcacgcttgctttctgctcttgaccggtcttgacttcaggcggttccaccactagggggaaacaacaactacaacacggatctactgacggacggcgtactcacgcgcttcggctcttggtagcctacgcttgttctccgtcttgcaggtcctgattccgcccacttcatgttgccgtgacgccggagactgcaaatgatgggaactgccgctgaattccagagctatttgcaatcgataaccccctttagctgaatagcatcctgaggagttttgcgtccataccagcttatccgccttctttgtcttcggtaagcgaatagctttaagactctccgcagcctgcgcaccctgggatcctaaaggtttatggacgcaccattccctactcgccagcaaacattgttagagactaaactccattcccaactaaccgccttccacacagcagaagtttgcgatctttgtttgggagttaagccctccatactgatacaatacttccccttgagaattctgctccaaagactttcattatccactgccaaatcccagctcatcttccccaaaagcgcctggttcgccgtggaaactctccaactaccgagaccacccttgtctaaaggctttttcacagtttcccaattaacccagtgaaagccttccaatcctccagctttagaccaaaaaaataaaaagtctatctacgctcttcagcaatagaaaaaggaatccttaggcaggtcctctaatgcataggaagaccccctagaacttacttaatgagtgtcagttttccagcagaggatccaaaatggtccttcccggtagtattccactgaaccaatccaccaggggtctacagtcttccttgttaaggcagcctacttttaagggaatacccagttgaaggggaaagcaccttcattcatgcctaaaatcctaccatgtcttcttttaagccaagccggggcgtgaagactgaagtaggaatgtgacttagtaaagttcaccaactgacctgaggctctgcaaaacgggttgagggcctttgaagctcttttcttttaataacaccagtggaattttctaaaaatagggtgcagtcatctgcataaagcagatgtatgacaggggttgccactcggtctactttaaaacctctgattgtatttcttgaggccaattccaacagatatcttgagaatacatccataccaagaacataaagtaaaggggaaagtgggtcaccctgccgaagtcccctcgagctcttgaaactttggccattaataatgttagaaaaagttggaattttcacacactccataatccggtagaataaaaccccagcttctttaaggtttcctcaatgaaaacccattctatctgatatcatatgcttgtcgcatatccaccttaactgccacatatccatccttggcctttgatttatgcaaaacatgaaccagctcttgtgcaaggattgcttgatggtggagcttccgtcccagaacaacctgattagaggaaaaaatctttggaagcaccccggttagtcataatcttggaaatggccttataaacaacattacataaactaatgggacgaaattgtgataagcgagaggaaccttcacctttggggataagggcaatgaaggtatgattgagacctctaggcatggtcccagaggaaaagaagtcctgtataacatctaccacatcagctccaacagtggcccagagatattgaaaaaggaagctgaaaatccatctggtcccggtgtttttgaattgggcattgagaagattacattttttatttcgctttcttctggcatggaaatcaatctctaattttcctcatctgtgaccaatctaggaataactcccatcagcttgacccgtaatctaggattgtccaacttgtacagattatgaaaataggcaactgtttcattctgaatgttttgctgcccataaactgttgagccatcatcaagcctcaattgtgataaacgattcctgcttctgcggttaagggtttggagatggaaaactttatattccgatccccttccttaagccaatcaacccgagacttttgcctccaaagaatttcttttgggagtaggcattcattatagtattttcgcacttcagcctcttctttgagtttcgccagattgggcctggatgcattaccaatctcaacctgtcaagcctgtaatcttgtaagagctttctttatcaatattaagaaattccccaggttccatcttcttaattctggagctgtcctgtccagatttagggaaagtctcgggctagaaggcatcggggaatgattgtgccaagcttttctgaccacgtccacaagggtgccttaaccaaaattcatggaaccagaaagggtcgaggaccaggggcgaagcgagataagtaaaggatttggatctgattttgctctagcgagatgattcaccgtagtctcactaaaactctccaatttccattagcaagaggggccgctctaaaacaaaaaaaaaattgtctaagtaaagtttgaaccagagaagccgaggtcaaagaagttgcattgggccatagtctcctttttctcatttgaagcaagcgagggaaaagtacgcgaacctccgcacttttcagatgttgtagtaatggaattcaaatcgccgaccgcccctccattcacctgaaatttatttttactcttcccaaaaaaatgtccgtcggagatattggggacttgcataaaccccaaagagttacctcttgatttggttcagaaagaagaacatgaatggcttgcttagatattaaaagggttcagaaatctttacctgtttagtccagcaaaaccaaataccaccagctcttctttccggatgaatacaaatgcaacgatcgtgcaaacggagcttccgaagtccgagtttcagcaatcaccattatctcatttccgcggcctgtaacacatggttatcaagcttcttactaccgccctatggggaagtaagcaatagcgcgaagagagggaaatgcgctaaagcagtgagctagtaagagagagcgcacctaagaatcggttttttcgtaatagttggaagttcccgtgcaattttaaatccagaaaagagacgggattctaggattgggcggtgtccgtccactaatgtaaagattgggcgtgggagaggtgaatttgacgaaagaaactttccgggctcttctgagctctgatctacgaccaccctcacactgctatcgatccggcggacagatgccagttctgctgatccaagcttcttcttccggaccagaacaagacagaatgaatctttatctgggaaggcatgattgggagctagctcgaaatccgataaatcgaatacctcctggcctcagttagaaggttatccgccccgccttgagtttcggtcttgcgcattcaagcgttgaataaggcctaagaagggctttcccgaggctgggcgtagatgtatctattcggggtcgaaaccctcattattgatcatcttgggaaggattgagtggaatttacggaaccatggaccattaccatcgctcctgggggtcttcttaccatcaccgatcagttcgtgcgcctattcagggacgttcaaagcatgaaagcggatctacgaccacccttgcttgtttggcgcaagccattaagggatttctttgtgaaagaggatgggttttaaagcggtgctttagagggtttaatatcacccgcttcgagcaattcttctaattgctttcgaagttcttctaggtcgacgggagccatccggtaaggtgctttagccggggccgtgcacctggaaccaactcaatttggtgatcaatagtccttcggggaggaagagctctcggtagttgcggtggcttgacatccgagaactcagtcaaaaaatctgttattgctttcggaaccgggaactgtctggtcctctcttatgatagcatcgtcatcagcgcagcctttctttatcccttgcttttgacggccctgctactaatataatactaaagctccgttgggtgctgcccgctggcaccatgcacggggccctgtcatccaagatgcaaagtgagtttcgtttcagagggacagggtttcaaacgagcaagttccaagtgagctttaatcaaagacagcttctaagagagcgagtaggtccgcgtatagtttttgagtaggtctgctcgtaggcccgctagtcactttgccctctgataattagtaagaatgatgtatggaggaatcataatcgcctattaaagaactagggcaaaaaaaaggaacaaccgtaatagaaagccaatcccttttcccctttctccattgaaagctttcttccggccgaaagcgctacaaaaaagatcgattatgaacaggagcaggactagtcataccaattgcaggtctctcgagccttcaactcaatcaaaaacgggaaaagccagttagccaacagaaaacgatcgccatcatatcttcatattagattaggccttccagtggaaaccatcccaaatcataggttgtatcgaacagtcacacctgcggaaaagcccgaaagaaagggaaagcccaagcaagtgctcagtttcagatcagtgaataaaccgaaaactgcgacgatacaatagaaaaaaaacccttcgttcatcacagattcagaaactgcagaaggtgaaggctctagaagagagacggattgagaacagtttccagagatcggaaccccttttagtaagcttagcagaccaaagctgaggggaccaaagatcatggatcatggacctttgtacgaactatctttagttcaaaagtgaggctcgatagacctagttctctcctcctgcctaagcgaaatgaataagtctcgtctcgtcatcctttcttttaaaaattcctcccctacctaggtggctgctggatgggcagaatcctcgtccaaggcgaaaggaaagcgagcataacttcttgtaagtctaattcacaaaggtgcttccagaccttcttagtgcgggcactttgcttcctccgtcaccgagccgaaaagaggttgtctcgtccatctactgagtcagtgacataagtggtatcctctgcagcagtcaattcattaatcactaaagaagactcggttccccgggcggatgggaaaggagatgaagcaacatcagttgtatcagctacagaatctgattcaggtgaggttaacaagcctatcttcgactttcgttgttctttcttcttgctgtaaagtgccatttctgctctccaacgacagaagtacgaaattactaactagtctagttgccatttcatttttctgcccgtgtggcatgggacagttttgttaccctaaagcagagaaagctggatcaaaggatgcttttgaaaaggccgattttcggtatcaattgccagatgaattcagtgacagccaaagaaaggaattacaaaccagtgatctccgcctttatccaatgaagcgaaaagcctagttctctgtaaagccttcacggagttcaagaccggcatccacgcttattcttctcgaggttgactcttctctagatctagaacaaggacgggcgcggcaagacattctcttacagcagaagtacattctgactttctatttaaagaaaggaaagacctgaacactattccgtaacacagctaggcttaaggccaactactggctatactgactacttactattgttctagagcggggaaagtcttcaagaatgtaaaaacaagtgccgtccccgattcctcttattggagaactagtctagtagaaagaatattaaccggcgaattccgatagatagagtagggccaagcccttctaaatcaattccaacctttcgcccgccctttactttagccaaggccaataccagcttcttctataggaccggagagtcgtcaacaagaactgcagatacgatcactccgccatcaacagccgcatctgagaagtaaagttgattcccggtcgatgaatcttttcttggtttttcttttccactactctattaagatgaaaggttcccatcgagaaatgaatgaatttaagaagcctttgcctgctttgattaggactttgccccgggcggggaagaactaaaaaaagaaagatttaagtcgaagtaagtcggattcgctagccttggggcttagttcagactgatttcttcctgccttggtcacatagacttgacctgctcctgggcaacagagagagaaaagagcttcctctagaataagagactgtcttccttttttcgttatcaccctggggtgaaagagcaaactcccgttcgagatgaagaatctttattgcattgccttccttaactaagtaaaattcttcctcccggtcgagcatcttcaaacctcaacctccgggtaggtaaagaagattcatccgtaatgacataaaaatcctgctctcatttcattttacccgcgccatcaacaaggcattctgttgattcactgtgccatcttccttagactattgattaaccgcagacaagacctgctactgaaagtaagaaaactagactaacgaatagaactgagatgactgtctttacacctagaaagatcaagctttcctagctcggaggaaaaaagagatttgagtcaagccctgctactcacacgggcttccatctaaggaaagagataggttctatatcagctcataaaccaggctgcttcaaggcctacagcttcaatcaagtcactggctaacaggtaaactccttgcttgctgaacacaaccgctgtgcaactcatgcataatacagagaagaaggataaagatagagaacgaagtaactagactgatttcaggattttgtaaacatagatctctgactgactcttagaacgtcttctaaaacacaatagatacccctactaatactaagtatatggtttgctgctcttcttctttctttcatctgtgatagatactggaatctactgtctctaattaagcatctgctttcaactatttcatagcctcccgtcctgagctaacttgagagctggattaagagcaactaaggaaaatccatagagttgggagcctagattgcctacactggaaccttgttctctagatagaggaaagcgtcggttttctggaatgtactactccactggaaatgtatcgaacctgtaacctataacatcctatgcatggaacgcaactacaacttgaactcaacccctagcactgaacctccaaaaagggaactggctagcctctatccttaggacctagaatctgctatccaaggtaggacggactcctatcatcatatggttttttgaataccttcatttcattccctgctaggtctaacgattcgagagtgctccggaaatagaaaagcaaataagaattcgtttatcccacttgctttactcctttgagtgactagctttcctaaaagatctggtttcaaaaggggcattcgatagagtaagatacggcttttgaaagactttaaaacccctagcttaaaaaaaaatataccacctaatacagctttaaataaatattcctgcgcttaccctgcggtgacacagaacatagaaaggctggaggaacaggcatacagaaaaaaaggaggattcacttattattaacccgaaatctattacctatcaacaactcctagcctagattggcttcctagctatgaactcatactagatggacttagcattgtaattatcccttgatctatatggcaaaactgacttgctctagagctttagaacccgtgaaatccgctatcccagatttcaatatttgctgcttttgcccttgtgcaatgagaatattctcattaatctttcgtccaggaacgaaactcgtttgaaccggactaatgagcttcaccatcaaaggcttcaacctgttagcaatcaaaagtttatagagcacattacataagctaataggcctaaagtgactgtaagttttactgttttgggaatgagaacaagtaaagttttattcagttccgctggggctccgtgaataccgttttaaccatacgacaaaccgactccccaactgtatcccattgactttgaaagaataaagcgtggagaccatcacaaccaggtgctttcaaagggctcatgtcaaaaaaagctgttttaatttcatcatctgtgacttccttttccaagcacaggatatcaacatctgtaagattatggacctctcctctacaagccactgcagtgagggtttggtctgaatctcgtattgagatcttaatgccataggtgaacattcttgttcgtcaaagccttgtctttctattgtcctaaataagggaaggtagctcgaggtagagtccataccataggattcaaacaaaggagatttattcacgaatacgatttctattgcggtggagggaacgaagcgaaagagcagcttcccctcttgttcttctattcctcttatcgccaataagccgagagaaggaagatttggagattatcagtaactcctcctcagcaaagaataagccccctatgtgactttggacaggaaagttttgaacgttgggtatagaccgaggaagggacttatttcaaacctgcaagggcggagctagtctaactatccgagacatcggcgactgataacgagtttacttacaatcaaaatgatctttctaggctgcaggctctatgatcaggaaagcttttcaccggcgggcataggaagccatacctggtgaatgattcttttcctctttgagtgctcgctctatccttaacctaggataataggtctgtctttcctgaatattgtattcatgtggacggttgagtacattgtttaagcgaggacatgatgaaaggaatgcttatcgtacgtcattctaaagataaggaagggctaaagtcaaggtggggcaggttaagttagggcatccgtagtttcaactaaagaatcagtcgaaacggacactgaagctaaatccgcaacagagcgagtagccagatgtgagtgttataaaagtaaagccattagcacttctgttagagccttgtaagctaatcctgtctttcttccctcgaaccagtgctaagataatcccgaaagtgagtttgaaagtgtttttgtagttcctggctcttacttacaagagcagtgtaatctaattctaaaatataggctataccttaccagaggagaagtcagttaagacacaagtttgaaagatagtcgatagcaaatattccagactcaaaagaaccaattgcagtgcttttgtaaactccttcagttgctgtggaagtccctatagcccacgggagagaaaggaagtttcatttagatagttccgataccagaggctatataagtgaaaaggaaagatgaaaagcagaagcactagagctagaggagggcttccttatactatcaataaatgcatgttcttagcttaccaattacactagatacctctgaattagcaatggcactccaactggcattaggacaataggaggtgttacgaaaagggcactataccctattggatcgcttgaagaaggtaatttgaagaaggggaaaccttaatcttaccccgggcagagactgcaactagatagcttgaaactggccggcaaagatgtaaaaaaacttcaactcgctttacaatagcaatggaaactagcactcaaactggatggtttgaacctaccatcttagatagaaggcaagcaattggatcactgggaactgccccccctttggaaaggtggaactatggagactctttttccttcactcggagatattccaaaaggtccagaaagagtattctagaaggcctaagaacgttaggagaatacagatagacgctaacgcgaccttagcctgtcagatcggtagatgggtatgaaacatattgccattacaattaggctcttagccccttagcgtgtttggactcgggagcaaggtaacttaaaatccgatttcgcccatagaaattagaatccttattcgacctacatccaaggtaaaaatatgcgatctacaaccgagtcttcttttgagccggatgtaaccaaggaactactatggaatgctactatggactctccctattctctcggctggatcgacatgcgagggattaagataggaagggcttatgacaggggaagagcttacaactagaagggattctgtctggcaagctactcacacaggacagcaagaaatgtatcaattagcgctttagatctcccaggaatcaaagggcgaagcactacaactgcttatgatattagaccaataagcatactatcctcaggcgaaatcactttaatataagtacgggacaggcactgatggattggctaaggctggtacaaagactcctacaaggaaagcaagaaaaccaggattgtctggaggggcttaccccacgacttcaactgacactccaactgtgcctggctcgctatcgaaagagagtccaactgccactggaactcaaactcaaaccgcaggagaatggccctagaaactcctccaacttccccttctactcaaactgccgggaaggaaaccccatccaagagaactggcaatgcagcggattagcctagcaatgggcaggatggaacagaacttgcacgagatgcttccttagcaagtaaacagcagttaaaaagagattggattgaaggcgctcgctcgatagagaatctggcataacctaagagggctcaaaggagatcttccacggtctctagtgagaagaaaactttgagatgtaaactatcttatagaattctcagttgaaatggattcctgcgcttgtttccagtttttctgcaacttccactgcaactacaggggcaaggaccactgggaatgccactactgcttcaatggggaaaggggaacaactacttatttatatttatactggtctagtactctttatttacatttacccgagtttctttcaatcgggctttgtgataatatcctatgctcttttttctcttagctcaaagggactcgccccatccactcaatagcagtgagttctgcccccacatctaaggtaacctacactggtttaaagggctttcaaagtctcttttgaagacgcgagttgccggcgtggctttaaaaaaagtagaacgaattcccgatgattctggtacgaaatatcgtaaaggcggttaaaattggaccgaatgagaaaggtccataatacgtgacgggtctctcaatcaagtcaagcacttttaagtaaaatgacatagtttcagtgatcacttaggcaattagtctttgctagcgcatatgcccttttaagaaattttgaactataggatataggatagttgacccggccaatgattgtcaaacttgttttacagtcatgaggtcgcccgaagaagggaaactggcagcttcgtttaggtctggcagagggagttggtatggtgacggtgacaataaccttttctcataagagaagaagtttgtggaattgacggtgacccttgatgtgactaaggctgctttacagtaggtgtgaaaatggaggggaattctattgggctgaaggcaggtgactttgggttagtgttcagtgacaatggtagctaacattacatgagatgcggttggaagcgaggcagcagtctttctatgtttttccactctaacgaagtttatctgggtgagcttagatgacccgaaacaatgaccaactcaattctctccgccctttgcggaggagtttctttttcttaaacagtcccgtctcgaaccggaggcacccactagtagtagggggagcccataattgacccgggtaggcgagcagtaggggctatagttaccagtttcgagttacttagcgggtattccccagcacggcttatgcggatctctctctctactaccggggaacgggttagaatcccggagcactacaggcctaacttattattcgatataatgagaagcacctttattgaactaaaacccttatcccccaactgatctactcagtaatgtgatgagttccgacctcgaaggcccaatccttcgtcgtactgaatgagtatgacttggctacaagggaaacaaagcgcccaagagatctagcttctttgaggaccggttgctagccccatcatcatcccgagcttttcaccgtcggtcccatgactgcacgagccctatgaactagctcttccgtgtccgccgaactgtactatggagggcgttcaattctagtattgaattttcccaaccccggcaccgttaatgtctctagtagatagactctacaaggaacctggctcagagggagaaggacattagtttgaagtctcgagtctctatcccctctctagtgctgcttacaaggaccggtttccctactaccgtgtcatggcgatatctgcctcgaaaccctcggcttgcttcgtctcctagtggtggtttcccgtggagcgaccgtgagtcaggtggagtagccctattccactccatctacctcctgagacaataatccaccaatagattttttttcgaggtaaggtagaggataagaggtttcccaggctgtggtgctacgagatggcgatttatcgtatagaagatcacggctgcatttaggagtgataaatctcacaaactcgaaatttcataagatcttcagagaagaaagaattgacaagagcctattcagttagtaagaaagctagatccagaaagctgcgcccaatagagcaacgccttgagtagaccgataaggtctcgcgaagccggtcaccggtagcctacgatcctatctgactattgaggagtttgatcttatttttttccattgtgcgtactttggcaattcgaacttctttttcccttagacgtaccaatcctatatcatttgttaatagatagggcgccccctgaagagatatatataaggatattgtggagagagcagaggctctcgctttttcttctcgctaacgatcggcattcttttcttcccccttccggaaatgatcaaagaagctatggctgacctggccccctttgaagacaagacccccctttttctttctttgcttttcagctttataattggtttgaaaacctctgctcctctttctttctagcgcactgctttattgtattgcgcgcatttggtgcgctattgaagaacattcttagttgtggtcaaaccatctcaaggaagtcctctactttggttggctagtcgatcttcctctctccgaattgacattttgatcaccctcgttgtacttactctttcgaaggatcatccgttgccttgaacctttcatctctccacatccctcttagggattcgagtgaagcagcggacaatacgacagagcaaaagctagctactttttatttaatatttcttgcctgcttgaagctatggcatcctaccgatcctatccgaaagggtgagttgatgctagggtggtgccttaccctgattgctcaggtgttaaccgaactaaaccattcccaccgcccttctttataaaagaatatttatttgcttacggagcggtgaaattactttctttcgagtgatttgattcatcaataggggactatcccataccataggaagttgcttcttggaatgccgtcgttcaagcacaggctgaccactgattcaatcttcaaaccaaaagccagatcttgctactagaaaaccgaaggagcacacaaagcaaacgaagggactcaccaacgaatcaagcggaagacatgtttgatccacacagcagaagtttgcgaaatcttgcaaaacaaccacgcccggatccgcaagaatggctatgtaggtaaggggatccgcgctatgatcgctttgagttctgctcgaaggaataggaattcttcttaggagtttgaagtaaaggcgaggtttgcaaacgatcactgaattttctccttcggaccctcggccgtatattcttgacgtccttaccaaaacatccttaccaaggggttattttagcaccaaaaggcttgttttcttgatctcaaaaagggccaaggaaatgaaattgatggaaccagtaccagtaggtattgatctaagcttagaacgggggtagcctacgagcgaagaacttcctgggatcgaagaacatcctgagcataggctcgtaagagggaaatgaatagatgagctccccttgccttgaaagaagctagccggtagaagccatccgtgagcaagagaagagaagaaggaacaagtgcaggagtggttggtcacctaggaaagaaagataatatatattattaccccgaaacaaatatctaatatctacctttagcgcatatttcctgctttgaagaaaggaagcgaacaacccccttttcttgccggattgatgctcgagagaccttaacggaagaaagtcacgtgaatctctccgatacggaaattcattccgagctatgaaaaggaagttcattcccggctaggttcttcaagaaagagggctaggcccaggagaggagattccgcttcaatcggagatttccgctatgaaacccgataggaaggtcatggtttgtgtctactcctctgagcacgggattaggcacagaatcatcagttgtttaatcgattcaatctcagtcaatggtccactttctcctagaaggcaacaggcaggataagctaaaaaaaggcattggagaacgattgtggtggtcaagatagaagaaaatctttgaacaagcactggtctggagaaaactatggcaacgaaacttcttggtgatccagtcaagcaagggcaaaaactaccagtaccaggcccaggctttgatcacatttctatggtgcgggaaattcgatcacaactttttttttggaggctctgaagtttctttctcatgcgcggtcctcaacacgacatttggcaggcaacactctaagcgaagaaagaaaggcatggaggtagccccgccggctttcgaaagatgggtttgaaagagagattaggactctagtcaggattataactataaagagatgggcgagataggaagagcagggctataactcactctggaggtactattggttaatgaaatgcggttgacacgcaagaaaaaggccttttaacgaatttatttattttttttatctaggatatatatgaactcaaacttcagcaagtgttctacagggcaagactcgttctttctctcaaggcgggtgccttgcctgaacgctttcagagcagaaattgaagcagggagacaaactagcagcattctacgagattgggcagattaccttttctaatgattcggctctatcgagggaagtcatgaaagtctttcactccgttcctcacttgcttagctgtggtgaatagagactgaatcaataggataggtaggaactagtcctagcaggagaacagaagttgaagctggcttggttcccgccctattcagtgaaaggtttcatattataaaattctatcagcttgaattgaaacaaaacacgtgaacactgctcgctttcttacgtgaatctctcattccttctttgaactcgcactacaatacagaatgaacaggttcgtaagcaacttcaaagatacaatcaatcgaaagccttgccttgtccccaccgatgggacagattcaccggagtgactgaccgaattggtacaggacttacttgcctgtccacacatataggtctcgttccttggtggaggtttgtgatgaatttattgcattagcaatagagtgagagtgccctgcctttcatatccatatccaaatgttgcaaccttggggaatttatctccttgccatctatctagaaaagcccgggagcacttcttttgatctaactaaggtccaaaacaagggtggttgagactgtgtcgtctggttgagttgagcaagagtacgaagctcaagctagtggtagtacttgatctcgcccatgaccctcctattagctgactattgagccaactccctgtactgtagtgagatattgaaactcagaatttgataccggtatcatacacatgattatcgacccaaaatctaatagagatagatgtcgaaattgatcggttcgatctcggttagtttgatttctcgcattcatcatccaagcttgagtgcgctgtctgtcttcatgctccagagggatgtcagataacatagtcgttttcgccccactgtgtcctctcccttccttcttcacaggctggaccagtctcaggaaatgaagtcaaaactttctactgatggagcggcaggactttgcattctcctttctaactagagttctttgagaccacttcgtaaccagtagttgtttgttcacattatatgtctcaggcgcttcggtgcgagacagcccgggcgggctggtaatagatcatctcttgttagttagcaaggtggaagggaccaaacgcagaaagttttaggtaaggaacgagcgtagacagagaggagactgtcaaacagaaaaaagagaaagattttgaccgtgtctgttgttttttatttaccttatactatcaactagaaagtttactattgagcgacgtcggttcattcaatccttccgctttcaaacctcactccaactagtgcattgcccattgtcgatgaatcacttcgaaaccaactaaaccttgtgcacctgaagagttgaaccttgtcatggaattttgccccctatttgaccgctctaaggtcctgcctacaactgcctttgcagctggtttgctactagatagaaccctcagcctaaatgaaaggctgactttttatgagactcaaagttgaataagcgcacttgacttttttgccctcgtactgactggctttgggctattggactcgattgagtacgagtaccttgatcaaatgatcaaatagagcgcgtggccttctatgatcaatttcgtggtaagtaccgtacttttgaattggaagtcgagtactttttttagataaaaaaatatgttatactcttagagcaagtcctttcattttcttagaagttttttcgtgatgagtcccgtacgaagtttcttcctaagatgaaagcagctttgcttcaagtgaattcactggattgccatcattgtacctgaacctcacactcgcttttcaagacctttcgttgctctcacaagctgtagttatataagaataaagaaagtttagggggttcacaactgacttgagttataacaacctggttcgctgcgtagaactcgtaaatatgaatgaggccttttgaatgcttaaaaccacctcctcctttccttgccttgaggaacttgatctaaggacctctctttgtgtagaagttggccagtaaggtaatgttgtaattaacggcttggattttttgttttgcttccttgtcctcttgaaatgaagcaactttgttggacacattcccggagtagttcgggaatgaatcgtgagctacgacgatcaaagacggaaatctcatacacccatacattatacctagtatagtacgattcgaaaagactataaattctgtttcacggctctccactttcactccgttcctcatcatttctgccctttctgaattatcctatccaactatataggacctaaccttgtttcactaccaacccctttctcctgcggacctttacggagcccctgagatgagacgaaagctttgattgggactcctttctacttgtccaagtagagcttattaggaggatactccctgaatgaagatccgattagtctatgtggggcctgaagcttgagaatgacctctcagtcgtgataacagctgtttctgcgctgaaacaatatcccatcccagaagacctttggctgatattttagatccttcactgccgaaaccaaaagccgattccttgtagtcctactggctataacaagaaagacaagcttacctacctgggcttacaagtttcactctctattaattagctacaccacctgcacaggcagaaaagatatatgagacgtcttcttcctgcatacttccttttcttcctcagtcactatctgaaattacgtctcggacaacacaatacaattaatttcattgtacctctaagccgtgctcgctttgcttagagcgtccatcgtcctgctatcaagccctttcctagtaattaatgtaataacacaaaaccaaaaaccctttttcccgtgagaacaaagcctgctccttatcgcggagagaggcagaggtcagtatcgcgaaacacgaaaaaccaacagagagactatagctgttgggacggggcagccttgcctagtttcaccgccaccccatctaaatatgcccttgtgggcttcttgcctttgctttcttgaaaaaaacttcaactacaccgaaagtaaagacataattgacctgtggaaagaggcctgattccggcctcaaagctgtaatcgcccaagacatcactctcagctattcggctaatactaatagatgatcccgctgtacgctgcctctgtttattggtgaaccactctcctacttgtagatagactgctttgttgaccttacaactgggattctttatattggtttgtttcacccaggtgatagaaattcgtctatttcaagtgggttctccggctgagtttgagtagtctcaccttcacccgccgcgcgcgcactgacttctattcgtcttcaattgctcctgagcttgccagaaagtagaaagcctactctctttctgactgaatgtctcgcgtctccatgatactttttttttaatcattttctcggggcctgactgaatacaattctcgcccttgattaggtaggctattctatttattcaataataagctcattctcaaagtcctacctttccgaaattcccgactttcaaactcaaacttccgaatttgcttcctgcgtctattcaatcaactacagagacagcccgccttgattatgcttttgattctgaaccgttctccaatcactttgaaaagattgtctttctgcacggacttgatctttcttttcattcaaaagaatcaaggcgggctcgagagaccttaaggacccttcgctcgcccgcgagaaccgttctgttctaactagaagctctgagttgagtacttctcaacaccactactactttgcctattccttgccttcggattctgccgtaaatgaatccccatgctatttattcttctttgaactctttgaaatcacatgtctgcttcacctctgctaagcaaaaaaaaacctagccgctttatggtaacgtctcaataggccatcccgcttactgaattagtacaggattcgcaagaaaagagagtcaactaccagactagagcatgacctctaggtgtaagcacatgagaattcgtggctttctataactagaaggttacatcatctggttcataggaacactcgcgacgctttgctttctttccctttctattttccgttcctaatctttactttcaaggttgggaatggaatgattgacgatagctagcgcgttgaaagtctagctagggcggagggcgtgtaaggttcgcgcgctgagcgattcaattcatcaagtaaaggggttccgggtcgagagggtttaaaggcaataattttctaaccaatagatccggtgtatcccaaaccaccggaggaccaaggttttcccgaaacaacatatccaaatctctcggatcccgaaccaagagctccggcttctcccgatccctcagccaaaacataaacataagttaccactgaagtatcctcacccgtgaaagaagatacctttgattctaaggtttttgaatcaatcaaccgagccgaccttgatgctttggttttcgcagctgtcgaacccgtttcggagtaagttgttgagggcttggagttccatatctctgaagagaaggaggtgggcgcaaaagcctcttctggatcttgatccgaaagtgacgatgcaacaaaggctattcggtgtgagttggtgttcagcatggaggtaccgcttcactagggctctgcgcccgttccttaagttcttgacccaatgccaggtgattggctaaccgtgccccttccttagaaggtaagggaggtatggttgggagggacagagagatcagaaaccaaaggaaagggaatagactcacaaactggattggataaagcataagctctggaagcggatacgccgatggttggaagggaaggctagcacacatcatttctctaagaataagtgagtttcacgacgagtccagctcgtagtgaccctaacactgcgttagggcgaactgggaaagccttccaagtctatagtcttataaactagtaaagccgcattccctcttcagttatcgtgaaatttctctaggctcttctctctggtctctcgagcctcgctcttcgtccatttccgttcgatggagaaagaacttctttttcgggtgttcggtctggcttgcttaggtcgagtaagcaactgaagaaatttcgtatacaggatttcagtattagattcagtattagaaaggtctgggtgatcgcagtatattcggacctgtagttagctccgcttgggcagcacccccattgtgaggtaccatcaacagcaagaccatacagatggcatcgcgaatcccctaccgaagtgactgaaccaccacttcttgatccgttctttcggaagacttacttgatttgaggctcgagagacctgagcgtgatgctatttgatcggtgatcataggaagccgctaggcttactgcgaatgctttctttctatgaaatcctgttgctatggctcacgaagagcaacgggacagtcacaggttaagaatcactaacctccgactccctaaacttggtgggtgtgcctgcttcttccgacctctatccaaacaaatcatcgaggaagtcaggtaggttccgggtagcacttcaatgcgaagcgcacccttcacccactggcacgagccaaactagctaagcgcgaggaaagcttcaccgccctcttccagctcgagctcacagacctctctgagtcaattccaaatggaactaaaaaaaagattactcctttcgaatgattcagtgctctcttcaaccggcgagtttagccttgtcagtgctctcagaaaccagatcaattaggtctggatcggctcactgaacactttcccaatcgaaatgaattcgaaacgcgagacacgagactcgaatcgaggatcaacccccttccttcaggctagttcagctctagataagaaaccgacccaaagcatcgcaatagacgcaacagcaacctgcacccaccggcacttttccttgacttctgtcggtccccagactccgaaaaagtttctgttattacgatccgtcagtacgaaactatcaagctgagctagatctaggctgcaggagagcacttctactcagagcggccaagctcacttcgcgccaaaccaacaatctgcacgcttaaccgcattgttcatcttgacagggaaggagaaaggaaggctatgaattgagctaacgccctctgtaacccaaggaagggggttgatcctcgcaccgaactctaagcgagtggctcatcgtgagaccttagcccgatgccttttaaccgaagcgaagttagtcacaggtcaacccttcagagttcttcttactccccgattctgtacccttggctaacttgttttcctgcgttgctcccctctcatctaaactatctttctctcctaacgttgagcgtgaaagcggctctgaacggtctttctttgtgaggattgggctggcttctttcctcatccgaaagggtgggtttacggtatccccgtcagcgaaggtctgcttcactaaatggccttggagcaggtcactcccacgaatgcagatccgttgcaaacccaattttttacgcaagcagcatgttagagagtgggacaactaactgaagtagaaggctacttttttatagagcatgtgcggtgaaaagggagtgaagttcagtatcatcgtatatcaagtactcgctatggacaagaagatgatccactagaggaggccttagaggttggggggtggggaaggaaaaggtggagaggaggagaaaggagaaagagtctcttttggttagctagaccatcttccccataggacaccaaggcttgcagcgaacctttcccttgtagccagcgaaaccctgccttgcgcaattgctttgcttagctttcgagctagatagctctatacttctttctttatgtcttttcttagttaacaaccttttctttctgcctgcctctgaaaaagattaattcctgattccaattcaaaagaaaactaagtactcccttgctgctgttctaagctgatctggctttcagcttcaaagggcccgatccggaaagcgttgcctgcaactcatttttcattccaaggagcttccttgggaggctcccttatggacatgggaggtcagtcaaacctgcccggccaactcacagataccccccgcaaccaatgtgggctagtagaggccagaggtccacttgcttcactgacctaccccacgcctgctgcctccccatggtttcagagccggcttcaggccttggccagctttagaccttaggtttggagttccatatgccacttgatcctattattttattgattgatgccctatactcactccctggtctgttggagaacagagcctcccccccgtggggagtgtcaagcaaaggtcgtcctccgcctgacgagattgaccaagatcttttggaagtatccctcggagaaacacctatttttgcaaaaaccgcgtttgcgtggtctcgggaccagcttcttcatcagattcgacctcgtactcatacttagtatgcccaaaacctaaagtggttggtccaggagaaatgggatctgttggcttgatataaaggaagcccgttggtgattgttagaaaattccctacgagatgcttgcttagccttccccacccacctacctttcctgggtcatttctgtcattttcttctcttccatggacgtagtttcattttcccggaatatcttctctacctatagatccctaccctttggattgaatcgaattcattcgctcgcgcctctcgcgtacgtagccttttggcaaagctcttttctctttccccttatcctgttcaaaggcacagattcacagagcctctatcagatgacgattgaatggcttccaccacgacacgaagaactactccttatttacgaatcaaaactactctttttgttgaaccaacgagtgccgctaagactaagagtgattatgaaagctttcccctgactgaacccaacgactctcgagtctttcaatagaaagagtcaaggggcaaacaaaacaacaatgcccctctagttaagtgatttcggtccagctaaccgaacttctgcctatgcctaattcccagctaaaagcttacgctattatcggtacagagagaatggacttgatccctgattaggccttagagcagtccggcgtggacgagacttcgaaccctgcggttttcctctattcaacgagcgtacgttcgcactgactgacactatttaggaaagcaaggactaattctacggctccttcacccagggaacgaatgggggcttcgctacctaaagatgaagtcataatattactatagcttccttgtctaaggtgttacatcaaatactggaagggctcacagtaattccaggtatacgggaatagcagtaataggacataaacaataaaggccttgtcacgagccggattcgaaccagcacttccggaggaattatctcctacttcataccataacgatcgtgatttggttacccggttcctcactgccctaacgtgagtacatccggggcgcggaagctaccgtgccgagccactagtggagtggtgaaggaggcctactatacgtatactggattagtaatcggttaaataaaaaaataaaagaaagtgaactattgaagctatcagtgtgattgatcagacaagtaccaagggctttcggtagacttctttcatttccgaattagcttgcgacaagtcctagcattagtatgagttcgttgaccgcgtaggggcaatccatatttatgacgaattccacgataacaagaaatagaaattaatcgttcgatgtctgctcgttctcccctcttcaattcccaatgaacaacatgatcttgacctatcatttgttccattttgtcgatctgatacttagttaactctttgatctttatgttccaactgatacctaatcgataacgaacctgaatggcttttttaggtccaattccatcaatttttgatgaggcaattcttacttgttcatcgtcaactgatctagctcctgaaatatatgacattcttgatccttccttttacgagtcttctcggctggaatcataaatgctctgatgatcttttctataggtagaactactgtgagcggtctaaacttcgacccggccgggggaattagaagctataggagcggcaccttttttggcgcttagcgtggtaccgctcagactcttcatcggtctcccgctgacgtctcccgaggtctaaaagaatctcctggagactggcctccagttcacgcgtacgcggatcggccctcagacgggctttctcctcctccggggccgcttgaatatcttgttctcgctttctgatactatcgagaacaagggaggtcttttcattgagttcggcgatcttcttttgctctagctgacaggcttcgatatcctctttggaggaaatcaattctgtcagcccggtgagtttgaaaaatcgccgatcgatgaaccggagatcctcgattagctcctccgtgaccgtgacctcccctaggtttgtgtctaggttcaggtccgggtccggattttgcggcctcgaagagggcccggcggcggcggcgctagtggccgggccctcctcttggggaccagcgccggttgcctcttgctgccccggcctctcctggtctgatgccacctcccccgtttgggtaccaaaccactccgcaaattgcgagctgccctcgctcgatacgggtgatgatgcgggaagaggctgctttgggctaccactgtaaggtgacatcatgttacctatagtggttgcgtcctcgagattcagcaaacaaaaacctatagacaaaaggagacctacttcccctttgtaatataataaaaaagatatgtatcgcccccatagcgagaaagcggtcttatttaataaagtatgaaaaatttcaagcgaactgagtttaagactcagataatagaacaaaccgaggaaaggcatcagtattatgaacttccagagagaatgacggaaccatgacttcttaagatgaggagaaactggacaaatgtataaagataaagaaagtaggatcaaagagactagcgaactgataacaaatgagatacaaagaggtaaaattctgacataaccagagtccacttggttctttcgctccttgctcgcggagcggcataccggaaaagagttagaaatttttctccccaacgacaagcgaacgggcattttcggggactagcccgctccccattactcaagagagaaaggaagaaagtaagacaggaggcccgcgaataaaatatataataatatacattttttttttaatcattatactcatattcctgcaggtcgcggtcttttattctggtcaatcaactatacaaggatataagccgagctcttgtcagaaagaaattatcggcagggttggtgctcacaatgtcactgagttccgcgagccctgccttacttttatagcgcggtcccgcgatgagttccaggatccgcctagccttttctttagatggctttggggttcccgctggagtcacatgctcctgaatgtaatctactaaattactacgactcttccaataggaattggttgtattaacactgtccccggtgtcatccggatatactggaggatccctttgggaaaagcgatacgtttggggaaggattggaaggtcccgcttcccccgagcaatggcccgtctagggtggaagagctagccggccagcggtcttccttccgctgttcgggaagaggacgcacgcgctgacgtctccttgatagctggaagttctccaaaagtatgaaaagctggaggactttgtaccatccattccagtgtggttgaattctgttcaacagcccaaggacttggagcacaccttttgttatttccactgcttaaagtgattgttacgaccacgaagaaacaacaaatcccaactacggatatataagagccaaaactgctaagggcgttccatccagcgtaagcatctggataatctggaatgcgacgtggcatacccgaaagccctaagaaatgcatgggaaagaaggtcagattaaccccgaaaaaagtgatccaaaaatggatttgacctaaagtttcagggtatgtccgaccaaagattttaccaacccaatagtaaaatcctgcaaataaagcaaaaacggctcccatagaaagtacataatggaaatgtgcaaccacataataagtatcatgtagagcaatgtctagcccagaatttgccaggactattccagtgagtcctcctatggtgaacaaaaagatgaaccctacagcaaataacatgggtgttttgtattgtatcgaacccccccacatggtagcgatccaactaaagatttttattccagtggggacagctatgatcatggtagctgcggtgaagtaggcacgggtatcaacatctaagcccacagtaaacatatgatgagcccaaacaagaaatccaagaacacctatactgatcatggcataaaccatgcctagatacccgaagaccggttttcccgaaaaagtcgaaacaatatgacttatgataccgaatccaggcagaatgagaatatacacctctggatgaccgaagaaccaaaagagatgctggtataatatagggtctccccctccagcgggatcaaaaaaggttgtattaaagtttcgatcggttaataacatggtaattgcccctgccagtaccggaagtgataataaaagtaggaaagctgtcactagaacggaccacacaaataggggtaatctatgcatagtcattccaggtccacgcatgttgaagatagttgttataaaattgatagaacctaaaatggatgaaacaccagatagatgaagactaaaaattgctaaatcaactgctcctccagaatggctggtaataccacttaagggcggatagaccgtccacccagtgccgctacccacttctactaaggctgagcttaataggagcaagagacttggtggcaacaaccagaatgaaatattatttaatcgtggaaatgccatgtcaggtgcacctatcagaatcggaacaaaccaattaccaaatccacctatcatcgccggcataaccataaaaaagatcattaaaaaagcgtgagccgttattaaaacattataaagttgatgattcccaccaagaatttgatcgccgggtcgtgctaattccatacgaatcagtactgagaagcatgtgcccatcactccagcaatagcaccgaagatgaaatatagagtccctatatccttgtggttagtggagaacagccatcgaataagatttgtcataactctttattaaaaatgatttactccagacagcttaactccgtaaagcctgtaggagtagtgaagaattatagtgagttgtggttggttgttgaccaacggaaagcatgggagaaagaaaaatggcattcctttcgatcttgtactcaagtacactgaacatcaacccaatcttaatgaataagggggataaacaatgacacctgtgaactcggatagccttgtagcagaccgaactaggcgactttctttcttatattacgaaattgatcgttttacgatagcacgtaaggtattttcgggcggctcgcccgaaaaggattcgatccagccaaaggtctaaccaaaggaaattcaccatcaacaaaatcacctaaagcctttccttacgttcaatgcccagtccaactttccaagcatggctatcttgcatcttcttgcgcttcgaataccccaaccacctcaacatctacttttcgtaatatggtgccaaccaacaattagaactttgcctttctcatccgtagaaccctagagataatttctattcatcctatccaattcatcacaaaccttttgagggagtcaggcgggtctggttttttttcctaagaggtatgataacttacaccattcaagatcaatgcttgcatccggggcgagagatggacgaaagtggaactgattcttatctggttgttcaaagcctgcctacttttgatgacatgagattcaagacccccttaaagtaaagcggatcccgatttccttgatccttcatctggctggactgtcgatagagtaagctggatgtgctattcgatcttgtaacccacgaaagctcgagaaagagaatgtcctctcaaggtctctcgagcctccttgaaagccgacgcctggatcacctggcattcctctagttaacctgtcgcggggtagggaggtccctctagttgcattcctttgttgagagtagcatgtctagtattcctggtttcattttgacttactttagacgtttgcgagacttcactcctccggtcatctttaggaatacgttattgccatctccggtgcatccatccataatgcctccctcatcggattagcttggctacccggctctagtaagacttgtaagacttcttcccgcgtggagctagcatgggcctcccattcggtatcaagactaagagcccatggggagaatgattgggactaataagactgaatagaccgacccttttctttttccctgtctcccgcggtggctgaaccgcaactgctagtgatgggacggagaaagaactcctccccgtcatctttatctttctttttctctccaattaggagaggctgataagaaatcgtatcagatgctattccccgcccatccatcggagagaggaactgtcctagctgagctttataactcctcgattcaagaagagctcggagataggaggagaataagaggttagcaacgtacgaacgttttccaagcacgccatgggagtctaggttttgcgagctagcccggaaaagaggcgagcccgtataaaggtttaggtccaatcattctccccatgtgctatcgggcataaccgcggggattaggacataactcccgttgtttaaggataataggttggtgaatgaggtggttaagaaaaaaaggttagccgggtttgggattggtaacggactcgtgcggaatgcctaatacctaatagcagcaaaatatctgtcaaaaaagtatatacatgaatcgaaagacagatagatatcgaagtgggccagcgaatgagtccaccagccgtctatttagtatataactcgtctctctagcttggatagaagatccaaccccctgaagcaaggtatgcacgaaccacttgggcgaggtggggttagattagagggaggggaactgcgaacgcccgtcccatgaagcgccagggaaccatgcattcctcccgggctgggctctcgcgtgtccggggtccgatcagatcaaccagcgaccggtttacggaacaaggagtgttgcaagggccaggagattgatagaagaacctggccgaagtcagtgttgtgttcaactccgcgggttgactggttggaagggattgctttctgccgtctgtctttcccttctatctcttctcttagcaaagtaggttcaagtaacacttttggcttgcgggctcagggactgcagtcagccgcttcccctgtagtcgtcagctcgttcttgacagatccgatcgggtgttcataatctggagtaaaaggattcgaacctttgcatgccggtaccaaaaaccgatgccttaccacttggctatactccatacggccttgttttggacggtagaacggggagagggggaagggagaagcagggctcgaagaacgagccgtgcaagacaagaacgcggggatatcgcaagtaagcagcaaggttctcccctttaggaccgactacaacaagcccgcgactctaatagaaagaaacagtaagctctctgctctatttgcttgcaatgctatacctataaaagttggcgaacgcttctgtaaccttagactcgttacgctgttcgactgaactcgttggctccgcgtccaccgaaagtcggtaaccttcgtcaccgtcagcatttggtactctctcgatagcttcaatagttcactgagagcctttggtgtaatgaaccgcaatcccttcagaaagacaaaaaaaaaggcttggttgcgggaaccgacggtgacgaaggttaccgggccgatgcggccggttaccgggaaccgcaaggttgcaaggttcccgggaaacgacgttccctttgtaaagtaggccttttgataactaattagaggtgacatgaaatggatcacacggaagaagacgtatctgatgaatgaatgattcaatcccctcccacccccacgggttcttctattgaaggggttccccttcttctatgtgaggtggggcgtacgtaagagcggaacctagatagaacgcggagcgccggccccggccgccgatacagttaccatgcttaccagctcttaccattgctgcctatagatatagatgggaggtaggcgaaggtagcttgcatctcttctcctaggctactgcacatgttattcgcgaagaaaaggcagcgagcggttcttcgcttagtagagctacctgccgccggtcacttggggggggcgagacatgaccgcgacttaagattcaagtaccgttgaaaagactaaaggaacggggggaatgactacctgtaataaagcacaggctaatatgagccgaccagaagaagcaaggcttagattaccagatcctggacacaatcttcctagagatggagagccccttgcctcgccttttctagcctctccttcttgcttgcttacctagctcttgtcttagcgactcttcctctttatctaggtttttttctgagtgttaaaacggtagatttctcatttgccaatgaatttgatccgccccgattcgatcaataatgggattcttggctagaataaaggttctgtgacatggacgcccaactcggtcggtcggttggcccacctaacagatgatgagattctcgatcgatttgatcgaattttgaaaagtctttctcattattcagaacagtggagctttcgatcaagatgttctcgcctcccccgttcgggctctcgctcgaatcggaacctttatgcgttggtaggctttcgactcaatctaatagcctaccttacctatcgggcgccaataaaagagaaagttttcgcatgggctcatcatctgatgcagaacttatttcataaccaccatccatcaccaatcacattccacatcccacttcaaacttttcgattcctcgggtagcctcctctataaaggcattccagctgcagaggcaggtgagccggggcaggaaggagtttgactgctgggatgggatcggatcctatctgtagggcgggctttcaagacagagatgcactactccatccgctaaagccctcgtggggaaagagaagaaccccttatttaaaggtaaggccagaagggagtcaaaaagaaagaaaaaaaaaatttcccggccgacgggactctacgtctgggtcttattccatctcaaactcggattaggaagagtgcccttgaactacggatcaatcataataaacaatacaagcaaataaattgattctcctgccggtgagaaagaaaggaaaaaaagggggagatagggaagaggagattaaggagcgaagccactccatagatagtgaacacagattcttgtttcattttcaattcctttcgggtcgaaaacgcgggctgctggtggggctgtgcccattctccctcttcttccgctttacaaccggaataaggaaccttagaattcacccgacctgtcgataaaaaaatgggatttgagagggcggatcagaaagatttttatggaatgtcctactcctgcccgagctttccgatcaaccaatcccctatttcagggacatctctttgttaggtagggccagggatcactaattagtcgaatgagcccactcctctggcctatcatttattggtcgatccggctggcggctcctgcatctcctgcgtctccatgggggccccttcaaaccttgtttatgggagtccctctagtcgaatcaataatcaatagaagtttactgacccaatcgacgatctacagctccctcttagttgcggatgcccctgctttgattcgaaagccctagccagtgatgaatccccagtaagatcggagtattgaattcctcctcccttcaggcctgtttgaacccgtcccagcaacgaacaccttcctactgcaaggtgaggctctgcccttcccctagaatccactccgggtcggaggagcagctagtccaacttcttgagctgccgagatattgaacaacgaacatttgattgaattccttgcctcaccctgagatgagagggaaggtcgatttgactcgaatcctggacctgatctttaatcctacaccggttaatgatgcgatgggataagtttttcttttgtcattttttcatcaatgctggctcagtcgaggctcgtccatgcccaatcccaatggacaaaccttcgatccgcccctagctctataatccacccgtcttccccagtccctgagagccccccctcctgggcctagccctctttctcaactcgagtcttaagttcagcggctttcatcgttgacgaacacctgcgctaataagacaaagaagtggggagtctatgccttgaatgaatcagtaacaacgaattagtggaatgagagatcaagagacgaatagggggggaatggcctatcaatcattggtggcccttcccttgaaccggtcacggagctctcaactgagttgtttaggttctggaattccatctctagttgggggttggtttcggttcgaaggttataaaatgtggtgcgggttcatctctctcgaccagttccggttcaagggaagggtgatcgaggggacccagactttagatctcttctctatggcgggaggtttatttcgtatcaagagtgtgttggggaggccggggaagacggattggatcgagaggcgatgcctatgcctcttctttatcgataggattcccatccgcccggcgaaggagacaagggcgaggcaccgaacatgttctatcctcaacctgcatccgtcattagtaatctcaatccgcttttcctattcactagtacactgcgcgctacaactagcagccccttgtatagtaagggaaaacgctagcgcgctagctagctacaactagttatatactacttatttttaataggatatttgaagaagccttctgaaaaacagaagcgcgctagcgcgcaacggccgaaaagccagcaacttgttaggtcttgaagagccttcggaccctttcttattattagtaagataggtttggaaccctatacaaacaaggggctgcttgctgctcgcccctatctctaaaggggcttatgcactccactcgttaccactaaacgacgaagccaggagcggaaggagggacttgaaccctcaacctcagccttggcaaggctatgctctaccattaagctatttccgccagctacggtagtggcgaagcactactgagcaattcacgtatcacttgatacggacgacttctgtttttccgccggaccacactcttgacctccgatcgagctacgagcacgagtaggtaggcgtctagggggggaggggcggctgggctgggaaggtctctcgagcctcttttttcttcgcgccagatgagatgatgattagtgggtcaggtccagtgtgtgctcttgatcacaatcactaaaggggcgggctgccctttcaatcaatctccggccgctgtgcgagttgtaaggagtcttggtctcgagtcgagctggggcgtcatttcattctcgtaacgggagtgagtgcaccgcaagaccagacaagttactccctcgcctcgcagcggcggcatctgtcttttaagttaagtcatttcctaagacggctcctcttattctacgataatccaagcagcagctccgctcggaaccagtcgattcctgagccattcgttctcccctctcggttggcgtttgccagccactagagcaagtaagagaacctacagtgaatgaacttaaagaaccgcagattttgaccagattgtacacctttgtgtctggctatgtatatggatgtgcataaagaagggacgggacatctctctcctttttttttgggggggggggaagagagagggaataagctgcagcggcacctcacgaacttcttactggggcagcaccatcctataggcgcgagtgtttggatgcacgtgttttgttcatattcctgcgcagttaagagaaaaattgtccccaaggcaaccacttgtgtctttcttggatatgctcagtccgggtatagatgctatgacgtgaaatccaagagactcgatgtatccttgaatgttctctttaatgaggtcgcctcatattttccttaacctaattaatcagccccgggggagaatggtgatggagatgtattgcggccttctcctgttcatcaactcgaacctcattcttctgcagttgatgttacggatcagcctcactcttcaggttcgaaagaagcttctgccgattgtcagcctgttcagctgacctcagaggattccagtcacccggcacagcatgtttattctcggcggcgattacattatgtttcccaggctaatactactccagaagatcagcagtctagcccagtcgcttcctcagattctggatccctctctcaggttcgtcgatcctctcaagtttcttatcctgttgaaggatttttgtcttatcttatgaatcgttttccccaaaacatcgagcttacctcatgtcagttcaatcttctcatgaacctgaatcatttgctgaagccttcaatcattcttgctggagagatgctatgcaggaagaaatcaatgcccaggaaaaaaaaaaggggatcagtttatttattttctctattgacaaaaacgtaacaacaatccagatcgagatgatagattagaaaaggttgttcttcgatatcccgtatgtcccgcataaacctttcaagcgaaaagcatgtgaacaagccaaaaaagaagtatccataatgtaattaaagactcgaacgatggcctcagagaccggaaaatctttcttacgactataacaaaccgttgccaatactgaccttagtctctgcaggtaatgaatttcttggatcgctactactcgtactgttcaatcagtcaatccattaagtaaagtcccataaatctatctcttccttaactagcttctttgtttgcgcccaggagcctgcccgcgcttgaaaactcccttgctcttgtttgtgtaaagaccttaaaatttttctaatggtgtcgagtgactgcgcttgacctagaaccttataaccagctttcctagatagcacgttagagcaatagtattcgtagcactgagaatgttagcccattaaaaagttagcttctttagagaggactgatacgagaataggtcctgtcagatagtgagttctttacagcgtatggaataagcacaatctctgctgctagtgtttgctaggaaggtctctcgagcctttatttaattaaagcggctcactcttcttccagtatgacctacttcaacagaaagtgaatcctattaaggccaactcgactgcctaaccactagggaatttgcagcagcaagagcttccgttttcagagagattccaagggctgtgctttcttcaaagacatccgacaagaacttgagagccttggaaatcttagctgcttttgtgctttttcccatatggatagcttgcgagatactccgagagctctcgaatatgagataaagcttgtccatttgaatagccttctaacttgccagctatatataggatatactccaatgggagaagagaatattgatagagggagttactggcccatagacagagactctctacctagcctacttacctcttagtccttagcttaggacttgaggaacggagtgaaagagctagattagcaactgctactccaactggttcgtatcccactgcatctaagcttgatcccattgccagtatgaaacttccttcctcactggatgctaaaaagcaacgacaacttccacaggcactctagaaggaagggatatgtgataagctattgactaaggaatcttaggtgggccggttctttagagatattgactaggcgggctctttaggggtggatctttaaagaaagtaaatctgactggctagcctgcaaccaatgcaatccaagacaagtagggggatcttaggctatcctccctttcagccattggaagtgctaaggttaggaaagcgggtaagctctccgtgcaagtgagttggccaggaggaaagaaaaaaaatccatcaggcaaggaaagaagttgttgttctagggaagctagcaatcctgttttcaaggaggagtttttttttcaagctcaagctaggctttgagttgctttccgtcgaatccaaaggcaaaggaatgagcgtctcgcctttactctaataagggcgttagcgcagccgtttgattgcttgaatggatggcttccaaggccagggctcaatcctgcacaattgacctgcttcataccagctagtatctgacttacttaatgcactcacaagcgttcgcatagctgccctagcttcgtgttaagggcacaacggaaagaactacttactctattgacgtaatattcattcatagtgaccaggcaggccgttccattatcaggcttaaaccacagtgtttgaggctcgagagaccttttttaggaccgctttttcactttcacacgaacaatgtgaaacatgtatggtttccttgcaaagtccttccgctgcatgtttgatttcattttcaggtataatccctgagacgtagccgatacatacgataggcgaggcttcgaagcctgtaagtacgtctccggatctgtctactcatcaagtacactgctatgcaaactttgcatatctacccgggtttgattcgaaacaccaatagtcgagtgttccaaccgacctcggaagcgctcgattcagtgaaaaagtggtttccataatcacgtcgatggaactagtcgagcggatacagaaagcaaagaaagaagtagggcctgcgctgtggccagtcgtcttgagttgtcttcttaggggggtagggctccgggtgcacatttttatagatgcaataggtgcagagactcaatggaagcttgaagcggatgtttcaaagcttgaatgaagaatactcttaacgtttgtttcaaaacaaaccccgttagctcgcagctctttgggattagttggtcagaatcaataccattgaacggagcaatgcaagaccaagctacataatgggggctcgccctcactaagctctacgctccaaaacagactcactcgtaccgaccctcgcgttaataagcactagactcgttgctcaatgggtcgagacatttcttcatttcaatgagttaggtccgcataagaaagaaagaaaaacgaagcgaagtccttgcttttttcatatcaataaaaaatgaatatgtcttaggagaatagtagttgaggttgttgaatctcgtgcaagtataagtggaaagaatgtggtgatgtcactgctttttctggaaagcgctaagaaagagctccctactctcagtggacgacttctaggaggacctctagttagggaaaagctgcgtgcagttcaagagagatcgaccaaaagaaaaggggggatagagcaagggctccacgctcaagggatttgaatttggggggtattcgacataatacggatcggcgtatagcctttttcttcttacgatcctatcgtttctgcttcagcggaatattctgattcggctttagctgctgcgtctggagaatcacattattcaaatgatcctgaagcggacctttcctttgtgtttgttgtagctcgcccttacaacgctctgctctctgtgcttagcttccttccctgagctaacctcctctaccacgtttctatatgccattaggagaagtcagtctgcgcaatcattaacccggctctgcactacttcttcttaagaaaggtgcgtctgtattcactttcattcagacccgaaccggagaactatccacaagaccgcttcatgcgccaaactcgagaagaagctttcgaaggcgcgtgtaccattacttgttattccactagtgattttgggcaagatcaatatatagtgatcagttatgattgccggtacatagtttcaagttaggccttacttaagtctggtctcctctcccaggtctcagcttcaggctcccactgatgaacgtatgaaaacggcaaggcaagcaaatgcacgaacgtattggaggctttctctcataagaatcttatttctcataatgtcatcagtatacgcctgatcggcgagttcagtcacacctatggatgggcccaggtccgctacttcaaaggaaaagcatcgcctcacttagatcgccggggttggagcttcttcgacctctagccatgacgctcttttggacctgaagaagggaattaaaccggcgagtagggcttgtgcccattagtctatgtcctgccctatccaactattttgatagtcctcacgtgcgagctcatttctgaggtagattagatgctcaattttgacttgcggagcatcattaacatgccagacatgttcggcaagctctcttaccgacgtccatgctggtggcaaccgaagaccagttgcatccatgtttgtagatactcgatcacataagttctgtaaaactgcttctcgatcatcggggacaatgaattgaatgttttgattttccattttttttttgattgaaaacaaatgattccctccagactccgtcaagcctgtaggagtagtgaagaactatagttaagaactatagagagctgtggttggttgttgaccaacggaaagcatgcgaattcgaatgcacaaacgaaaggggatgcaagcaaggcacatcgaagtaacctatcggtatagaacagcggatatgagttttctgtgattatatatgatatttctttttttcgcatatcagctgttaacttctgttgcttatcgctgttaataaaccgaatgaatatgatagaaagaccgatttacctgtgttaaggatagtgcactagaatcaatagaatcagaatccgatgtgagtgagggtactataatgtactaaccgtaatgacacaacacataaccctaaataacatgtatctctaaaatagatatctcttttatcttatcttctctggcttaaaggagaaaaaggcataaggcagcttttaatgcagcggccattccgcgcccgttagggtgctataatgccctaactctaatgaacaaactaatcccgattaaagaagtccctctctaaaatctatctatcaggcaggaggcgctcccttttacatgccatgtttagaggcggctatcttaccttcctataataaaatgtctactggcgggaatagaatgagtaaactcgataatgctcacagttctgggatgatggatgataaggcacctgtctccttgcagggaataggtttgatttagaatgagatgagtggaagatttcggtcgaggtttagtcatatcctagaattgatagaaagattctatatagttagagtcaagagctcatacccgttatgatgcgagaccggtattgtgcgatctccgattgcctgttattccttttgttgtaggacactcccttgtgcaggcccagactcgtctatcaactacctaaaattgttgtagttttcggagtaaacaatgacggccgggaaatgttgtaaggacatttaagtcttactgccacgtcggaaaaatattatcgaggagcaggtcgaatagtcgaagaaggggcctgctttagttttcgaagtcttcgatgtatttatgttattacgatccgtctgcccctatgtctttgtgaagcattttcgatcatttatttcgtagaggggggactgcttatacggtgccccattgccgagtggctaaaagggcgattgtagcttggcgatttgccttgcctttccctttccagcggcctaatccctttaatcgatgtggtcgaagaaaacgaaaagcaagcctgagacggtcgtttcgcttcctctctgtctttgcccaagtcatcgatattagatacgtcattctatatgttctttcttctgcgaggtcgggatgtcagactgtcgtcgaaagcaacttcctactcacacggctcgaacccgacttcctagactggatcgtgagctatcgattgggtcattacggactctactactatctactactatcaatgttcaatcccaagtttcgtcaaatgccatctctctctttcgtctagtcgagactctctttcgcctaggcggggtctgtacgccctgcccattgttccagtgatcctgaagcggactgtgaacaacaccaagaaacgaaagaacaccaagaaaggccgttacagggcctaaaagactgcttatatcgcatttcatttccctagcttatatggcatggaatctccttgtacacccatttcaagtgagaaaatgacttgatttagcttgaaccttgagccgtagaagaggacctttcagaaggacgctcgagagaccttgagcatggaattaaccgagagtgaacctatttaaaggtttactgtatcgtttactggattcggtatcatatgtaatattattgtagaagtttccagcctcacaggctttagattgaactatggaaccgagcgaagacctttgagattgatattccccagtccacttatgaaatggatccggattaaccgctttcgactgagatgtaaagtcaccttcgcctttgcttttcgtattctatgcggctttctccaactctaatctcagggttttccttctctatgaactctaagattgatccacaaagatattgtacctacttcagtagaagtttatcccgaaccctacggcacttcgttgcttgctccagtgagctacctatttaattaaagggatattatcctttttcagtgtacacgcttgaaagcggaaaagatgaactaagactaataaaaggaagcggaaacttatcttctgtcccgtgcgtgcaattttccatattacctggtgcaacctagaccacaggctct

SEQ ID NO: 21451 - DNA, 2147 bp, Cannabis sativa
cacattgagtatttaagagagaaaggcaatggaaagagaggtatgagaaagaagagccattaaaattaaagagatataggatagtaatagttggttttggtttccccttgaaaagagcaacaaaagttgcatatgagagtctgagattagtaagctattaacttgactttttgaccatgcacatctctccagatgtcatggttcgtagatgttgtaggacacgaacggtcagacctagtctctttctaaatcacaatcagaatcacagaacacatatcccttactatacccacaaatccaccctttggaaaagaaaactctttccttttgagttgacttgtgacaaattttccattctttttctgtcaaactctttctaagccggcaggcattctgtttctttcataatgctgtattattattattattattattattattaatcaattaattaattatagagttaagaagtaggtttttcttttattaatgttaatgtgcgtggtgatgtgattatagaaaaagactcttttaaagtaattggagaagaagataatgagagcccctcaataccgaaacttgtcaccaaaatgatgaaacggttttccatgttgagaaagccattgtttggtacaattgctcttttgggttacttcagaaaatcatcaaacaaatccacaacaacgaaagaaagtggcaaagagaaatgagaaatgatcatcatcatcatcatcattatcaaactaacacattttgctcatctgggcactgatcaatattggtcatgatcatcatcttggcatcgtgaacaacaaaagaaaaaggaaaaaaacaaaaaacaaaaaactacatccaaaaatgagcagagaaagcagtagtaatagcagtagcatgataaaggcatgggaggcaacggtgcggaggacacaggcagcgaagaagcgcgcgaatagcatattcggaacatcaatcatagctcacgtggacgccgaaaatgaagaggaagaggaaaacgacagtgggatgagtgtggttggagatatgtaccacgcagacaaagtccttcctaatggggactactacacagggcaatggtctgataactttcctcacggacaaggcaagtatctatggaccgatgggtgcatgtacgtgggagagtggttcaggggcaaaactatgggtcgaggacgattcagttggccgtctggggccacctacgaaggcgagttcaaaagcgggtacatggatgggaccggtacttatactggccccaatggagatacttataagggacaatggatcatgaacttgaaacatggtcatggtgtcaagaactattttactggtgatttatatgagggtgaatggcgtcgaggcttgcaagtaagataacatttgtatatattgtatatacttacatacacataaccttcccttgtttaatttctctgaacgttatatccattgttgatcaactgttattcatatacatatactaaccattgatcaaaatgtatgtggatgaatgaggattagcattaccttcgtataaatttatataatagagttactaaattttcaatcttccttctttacttttcattactggttactagatttcactgcattttccatcagaagctgttatggttgcaaaagaaaaatagaacaaaaataaatcttttctgaatttcttaaatttttactacattttccattaatggagattttggtaagcaggaaggtcaagggaggtatcaatggaaagaaggtaaccattacgctggggaatggaaaaacggtgagatatgcgggaaagggatgttcatatggacgaacggaaacaggtacgacggttactgggaagaaggagtcccaaaaggcagcggtaccttcaaatggccggacggtagcttctacgtcggcaattggagtcgtgacccgagagagcagaacggcacttactacccttctgggtcttctccagatgccaatctcgactgggaccctcaacaggtctacaccgtcgacctctgcgattgtcgtatctctcccagcgagaaggtctccatcttaccctcccagaagaaacttgccgtttggcgctcttccaaggccagcgaatccggcggcggaggagagag

SEQ ID NO: 21452 - DNA, 2554 bp, Cannabis sativa
tctctctctgtttttctttcgctttcagctttgcctctgtttcatacataataatatctacctttgttttccctttcttttggaacaacacaacacaccttaacaatcacaactcacaagccctttaatcttctttcgcaaaatggctgaaaagactcaaactttagaagccgtagtcaaagaatctgtcgatttggtaaccacaaacaaacaacagagcattccatttccatggctatgttaacagtttcctcagttttttttctttaaactttgattttcaggagaacgtgccacttgaagaggtttttcaggctttggtatgtaataaacatggccttaccacagaggctgcacagcaaagattgaccatttttgggtacaacaagcttgaggagaagaaggtttgtaattctttacaattttttcagatgaatttgcttcccatattcatggagccttcaacttatttataaactaaaagaactacaatctttctgttctttcttcttcttcttttaaagaaaaaaaaatgatttttttctcttttgtcttttcaggaaagtaaatttttgaagttcttaaggtttatgtggaaccctctatcatgggttatggaagcagcagctattatggccattgcactagctaatggaggagtcagttcttcttttccttatctgttttagttcttatgcaaatttagttaaaaaaaacaaaaaaaaaggtcgaaattttgtcattttgtgataaaagtgaacactcaccaatgattaaagatttttcctttttagttactattataatctttgctctgttttagggaaaaccacctgactggcaagattttgttgggattattattctccttctgatcaattcaactataagttttattgaagagaataacgctggtaatgctgcagctgcactcatggcacgtcttgcacccaaagccaaggtatctcatatctgaaatgtcctgctcaaatgaaaaaaaaagtttgctttttgatcattttccaaatgaaaattcccactgttgataggtttttagagatgggaaatggcttgaggaagaggcttccattcttgttcctggtgatatagtcagcattaagctaggtgacattattcctgctgatgctcgtttacttgatggggatcccttgaaaattgatcaggtcaaaatcaatgacaagaattcttgtttttatgttgtttgtttggataaattgtttgactatctatttggggtttttgcagtctgctcttactggtgaatcacttcctgtgacaaagggtccaggtgagggtgtctattctggttcaacatgcaagcagggagagattgaagcagtggttattgctactggtgttcatacctttttcggcaaggctgctcatcttgtagatagtacaaaccaacaaggacactttcaaaaggtaacaagtaacaaaattaatttcaatagttcttgttcttgagttgaatgtgactaaattatttggcactgctatacaggttttgactgctattgggaacttttgtatttgttctatcgcgatagggatgatcattgagattattgtcatgtacccagttcaacaccgcgaatatcggcctgggattgataatctgttggttttgcttattggaggaattcccattgctatgcctactgttttgtctgtgacaatggcaattggttctcatcgtttgtctcaacaggttggttataacttatagtgagtgttttgtgtggtctttgttatttcgggtttgatgattggtcatttttatagggagctatcactaaaagaatgacagccatagaagaaatggcgggaatggatgttctttgcagtgacaaaacaggaactttaacactgaataaactctcagttgacaaaaatcttatagaggtttgtttctttctttcttacttccctttctataagtcttaatgcttattttgattttgtttcaattgtttgtgcaggtgtttgataaacgagtagatgcagataccatagtactaatggcagctcgagcttcgcgtttggaaaatcaagatgcaatagatgctgccattgtggggatgttggctgatccaaaggaggtatgtaattcaactctatcatctttcctattcgggtataatttgcgtttgtctatggctttttctccttactttttgctacaaaataggcgcgaagtggtattgaagaagtgcatttccttcctttcaatcccaccgataagcgaacagctttgacatatattgacagtaaaggtaaaatgcatcgtgtaagcaaaggtgcacctgagcaggtatgtatattggctaatccagtttttttcttttctaaaggtttgatttttattcaaagtaactaactttcagatttcatttgttagattttgaatcttgctcacaataagtctgatatagaaaagagggttcatgctgtgattgataagtttgcagaaagaggcttaagatcccttgcagtagcttaccaggttataatattgttcttatttgggtta

SEQ ID NO: 21453 - DNA, 3284 bp, Cannabis sativa
  modified_base (3253)..(3257): a, c, t, g, unknown or other
aatttcgtagaaatacaaaaaaaaaaaaattgatttaaaatgtaaaaatgaaaaagtccctaaaaattataacttcaccccattaaatgtttatttttataacaacacccccacattatttgctgaaagggtattattttaatacaccccaaaattcaccttaaaaaattctcacagaacggaagaattcacacgactttacaagagttgatcaactcatgaggatttaagcaagagattctatgaaagaccaataaaaaatgaagaatgattgaagatgacttttctttgtgagtagtctaagtattgagaattaagtttggaattataattcttagcaatagataaaattttgaaaccaaaatggttatattttatcgtgcgatgtgaaaatgacaaatgttagtactactatatacataacataaaagttgtaatgcttgttctcttccttgttcttatggtgtacgactaatacattatgaagttataacacaaaatgagatttttttgcttgaattttgattttttttttctttttaatgaatggtggtaatgggaatggagacatggatttcactaaaatgtttgctggtagtagtggtgttacttttgtatttgatgattgcttaatgaaattttaaaattttgttcgactgataaatgattttacaatttcaaagattttaacgaatagtttcttattttctgaaagatttcaacaaacaatcgtgtgttgtacttattaatatataaataaaataaaataaaatattttaaaaatacctattttagtcatttaacaaaaggttatatatgtaattatatttttttttgggtgtagttataattgtatgggtgtaaatataactcccctttcataacatatcataaagtgaaacaaaagaaaaggagaatcaaaaccataatttaccactgaaatacaaagatatcattttttttaaaatatctctctctggaactttctagcgggttatatcctgttttcgtttctctcctggtacccatccagtttgtgttcaccttggtggtgttaatcaattttgttttgccataattagttttgatttatcttttgatcttctttctctctctgcattcattgcgattgaactctgagtaaagaatttttgtctctttacttacctctagctctcatttaatgcactctcactttaactcttactcttctcttcgtccttctcatttatttcatttgattctctgatacataacctttcatcaggtgttttctttgttttttttttttgcctttcttactcgataacccatcaccataaatggaagccttcattttggctctaggatttgcctaggactcatacagaggcgggtggagagtcctatcgctgacttctccaataagctttgaatatccaggtacaattctagtctcatctatttaagggtgtgggttctttggagatcattactttattgcttcctcctctttcttttctttaaaaaatactggtttccatctctgtccttcctattttggaaatagaagatctttctgagaatatgttgcatgttattaaccttattgaaaaaaaaagccatcatccatgaacttatcaaagatgtacgaggtgacaattagcctatgaaagctttctgtctagtcttatgtgtccttaccccaagaaccatcaagcttcaatggtttgaggaggctatggaaaatgcttcgattactcgtgcccctattatcttttttgaatatgggaatggtatgtttatggtttaatttggttgtgagggggacatgcatagatttatcgaagggcagccatggtattttgaccattgtctggtcactagtgcaaaccctgctgggcttgacacccttctccccaaccaacttaggtattctcttttctggatccaagctcattctatcccttttgggatgaagtcttataagttagcaaaaatgataggggatgaggtaggagattttcttgaagtggataaaactactattttccaagtccctggcttatttcttcgggtgagagtcttagttgatgttctaaacctatcactagggggatcttagttgattttagaaacatccacaaggaaaaatggttgaacttcaaatacaaattttttcctaacatttgtttccactgtgggatgtttgatcataccttgacaaagtgtatttcttatctgaaaaagtgtgatgagtttgcttctccaccccctctccattataaaattcccttgaaagcccttgccaaattgaagttcaagcataatccctttgatctttccaactctattccattggaggaaatggcttttccagcagtgaacgttgatcaaagtttggctgttgtggttagcgaattccttactactgaagatttgggagatggctcttcttcatctggtcctgttgcaagggtggatgaagggaactcccaaagtgttatgaataggcttgatatctctaataatgataaccacactgttgatatgctcccgattacacaaagtcgttgttttaccataaacttgagtagtgatgtccctgttagcatccactgtgatattcttgagatggttcctcctacagttgcggtcactatccatgttcatcatcatgttgttactgagcctacttaagatatggataagactactgaaaagtccaaaggtaaagttattgttgtggtgaaacaatctgctttcattcctcactctgtgatggtgggagagtctttcagaaacattctcaagcgagctaaaggtgaccttgtcattaatgaagttccatctgttgcagtctcttctttggttcaggcatgtgttgttgagcaatctcgcccagaaaaatgagtcttatctgttggaatgctcgtgggttggggagtcctagagcattctgtaatttgtccctagttgtacaaaaaaataatcctaagtttctttttgttatgaggtcaaaacttatggctgggagttgtgatattttgaaggctaaatagttttttgattatgcttttgaggtccttaggaaaggtcttagaagtagtttattgttattttggaagcaggaggtgaatgttagtattttgaattactcctctaatcatatagactgtattgccaactttgatgataatataacttgtaacaccctaactagcataggcgtattacgtgattcttaaacatactgtgtagctcgttgctaatnnnnnaggtttatggaaatcgtgattaattaa

SEQ ID NO: 21454 - DNA, 4356 bp, Cannabis sativa
ggcgaccttatcttgagtgttcaagatgcaaaaaaaaggcgccatttgagccaatgtagaaccagatcttattttattgtggggtagggggtcatgtgaaaagaacctacctgttgttaagaaagactgatatgttaaagcaaaaaagtgcacgggttctggccaagtgccagttatgactcaaggggactcgggtatcagtcctttggccgactaaggttagaattttataggcaatgttatatttgctctttcaatttatattggcattaaacattgtactctcaatgaggggacatcaaaagatctaaatggactgtgtctgtactattatttaaatgtaaatagtatgatactagaaaaggaaatatccaacaagatagaaattttactagtgtgcttgttcatgatcaatggtgtcaagacaatctatttatacttgtgtcacaagcacaaatggtattttatactaatgatgataagaatgactctaattgtagagttgcatacaaagttaatcatcaaaatatatggaatattctaaatattaatgtagatgctcaagcagatgaaaattactataacatcctaatattttaggaagataattcttctaatttttgtaaatggattgaacttccagcgcttgataatgtgcaatttgatccttatgatgccaaaacagaagatgtcaacgctaatgtggatgaagtttttagttgatgatggtgattttgaagatgatacacttgaagaatatgaagacaaggaaagtcatctaaaagatgatacatttaattatgaataataagcatgtacctttatttgtctctttttttattctttttaattttatgcttttctattttaataataagcatgtttacattttttattcttgtgcattctcaatttagtatgaaagtcatattaactttttttttcatcttgcattgtagacttatgtcttcttcagcaaatattcctactaaaagttctaatgagaatagattttagactcaaaaaataaaagtacgagaccaatccaaagctgctgatgtggagaaaaaaattaagaaaactaaaaacccattggtggtggaattcgatgcggctacaggaaaatcttatggagacaatagaaaagctttcaacaatatgattgggcaataagttcgagatgtgatttctcatagtatatttcgttgggatgatgtgtcaaaagaagataaaacgttaattctaaaatcactacaagtaagtaattaactaactagtataaataataaactttaatattatttgttagcaataatatttggattgcaagcacattactcttttcacattttcttttttagtttaactttgtaaaatgatcttattaataattcattggctatagtatatttacaaacctatttgtattagattacgcaattgaagtttgtttaagatcgatctaacatattcatcttagataagattgaaatactagccataaagtcatttagaagatagagacatatcgtaaaaagatattggaaattgttggatggagagaaagatccaaatgtacctaaaacagaactactagagaatataaaacttttagattagttagtttctttgtgacttcttctcttcagaaaaatagaaggtatgtgtaatttggaagataattgaaatttaatttaatttagtctaatgattttttttttttttaaatacaacaactattggagaaatattctgctaatcgttcaataatgccatttgaaagtcgtcatggatcaaagtcttatttctcacatacaaagagcaaagtaatatgataaatatttattttattttattattttaattttttctatattttgcatactaattatttgaatatttataaaattactttttccaaaaagttgatagcgagatctcaaatgaacatattagtcttatggtatatctcagtataaaggatgataccaatgatctatatttatttataaactcttccggcgtgtgagtaatttctggattagctatttatgatactatataggaagatccaaccacaaaacaaatgcctattttggtggaaaatttcaaaaatatgcactgacatccaacaaaagggtgaacaaatgaaatcgaaagtgataaatttgtaagtttaaaatcatatcatcatgcaattgaaaatatttttactacattatctaacaaccattgatgcatgttatttgccattgtttcaacatctgtactcatatcaaaatatttatcgacattaattgagactaacctttgaacaactactgttcgatgttgttaataatagctatagctttattcaataattcgttttagagaagaaaattgaagtatagatattattagattgtaaaatgttaaacgctatatacaaattattgaattgaatcatactatggtagtgtcttaattggaaaaaggggctctatagttatggtttttagttttgtggttgaaagaaaattagttgtggaaactacaaatacagtactcttattaactcacaacaaatcactttaatcaattaattgtttgctctgttatcatttttaatattaacttgtttgttctaattcttctaaataataaatttttcttctaatattgcagatagagatgtacaacttgctttctactcagagaataaatgttagttagccttctgattctgatgttactgttggtcaattagatgttttatccaaagacgagatggatatggtattaggaacccgttcacgttataagaaaggaagaggtctaatatctaggttgaaggcaattggtggaacaagagctgctaataaataggtttataatctatataaagttcaagctgctacacaaaaactaatagagactcaagataattttgaagggcttgtggagcaattaaagaaacatttgtcaagtttcaactatcagccttcaaatgctattaatgccttttcatccaatgtctaaaatgcaatatgtgaaactttatgacaatattgtatgaatgttatcacatcatatgaatatttatgtttaaaattttaatatgttgggttgattctctaattttgtgtagttgtattactattttagaatttaactagcataatgaaatgttcttacaattttgtaagctttacaaatttagaaagcaataatatgtatgaacattttaaaagaaatgaatgcaatattaaatttacaaatacttgaaactatcagatttataaatattagtgtaaaaataacaagtatttgaaatgattttgaaaaatatattgtattatatatatatatattttattttcttaaaaatactttcttaagcgctttgaatgtgtctacaaaagtgttaatagttttttatgggcgcattaaaagcgcatgcaaaagtatttcttaaaaaataaaatttatttcccaataatttttctaggctctattgttgcgcctgcaaatgattttttctttccatacgctcttgggggtggcgcctgtatagtttttttgagttgcacaattgtggacgttggaggacgctaaaaaatttatctgtgatacttttgtaggcattgtatgagatttttacaggcgctaaattgtacctggaaaagcgttaatccttaatgtaaaagtaacttttttttgtagtgctactatataactttcatattcatttttcaaacagattgtgataagtgtttatttttgttttgtgttattgacgaaaattgttacacttaaaaataagatttatattttttacactaaaacacatcaaatcttatttgattgaaaaaaaaaatcttaaaattaaaataattaatgattattatataaactttgcaatactggattttcattaaattattattatttataataaattaataagtggtattctaattttaaaggtattttcttgcattttctgtttgtattcatatatattcatattaatatatacagccttaatttcctaatatattcacagtcgtataacatagagggttgagatgcaaaaatgactttggtggtaacaactaataagttagtaaatgtccaacaatattttttaaaaaaattaagaaaagagccaaatctaataaattaactattaaaaattataaaaatacatttatcacatattttttttaaaaaatatatataataataaaattaagttactcattttttttagtattacatattattatattgtaacaaaaataaataaatatattaaatcatttaaatatatacagcagtattatatacatcgcagtacaaaaaattaatata

SEQ ID NO: 21455 - DNA, 2172 bp, Cannabis sativa
gacaactcgaaaaaaataaaatgtcgggaaagtggcaaacgaatcctttctttagttaggtttactatgccccatatatattttctaattgtttcgattaaaaccaatgaatatattttttatttgagataaagatatattgtcattatatatatttgtatattatatttgaaaatgttatagtaagattatccaatgttattatttttttttaaggaaattatgtaattttattaattatttgtgacataattgggatattttttagttggttgaaaacacaattaggattagaatcacaaaaataagctaactaatcggtcacttgattcctagatcgttttacaaaagaaattaaaatatagtcagataaaaatattaggcaaatagtaacataaatatctaaaattttaagtttgtaagcgacataaattcaatgatttttttagcagatgtttataattaaaactgtaattttcttttagtttcattagtacggactctgttattgtcttaaatagaacatatataagactcaaattttaaattatttagtctgaatggaaatatgtagtatcatttattgtattgcaaatagaattcaaacattcaattatatctaatttttttaaacgcatataattaattatttgaattatatttttagtacgataaattatatgcataaagttttatatttttcaaattattattatgattaatgtcacatgaacaactatttgctagtctacccttgtttttgagacatttatttttatatacatatgatcattatctcatgttactttcttattatttttcactatttattttaccttttttcaataatgatatatatatatatatatatttattatctccctgtattatttatatatatgatgggacttatataaaattataataatataatttcattttcatccaaaatatatatatagaattgaaaaatatgcacaataaaaattttagttacaacaaaaatagtttgtgactaaatacgtgtttataaataatattttagtcacatatttgtgacaatatatctttaaatttttaaattttataatttataaaatatcacaattataaaattttatgactaaaatctgtgactaattattatttagttatcacttattttcttagattgtcactcataattttcttttagtcacaactatttattttgcatactcattagccacaacattacttaattctagggttgaccctaaaatttagtaggtcatagaaaaataaaatatttttgggcccttatttaaaattacatgttggtattttttaaaaccagtaaaaaaagaataattttaaaaggaggaaattttttttgcctttgggctaagtgggccctaagcacacgctaagttcgcccagagacgggcctacttaattcctttgttactaaaatgtattaaaataaaatttaaaatctatatttacagtatagttacctctctctctctctctcgcttgccatctcgctttgtaactgtaacttctccaattcccttttcattctctgccaccctcactggccccgacaaagctctttttttgttcttctctgttgcggcttataatttagttgaaagagatgttgtggtctttcatttagtatcttctattaaatttaaggtaattattctcaagactctagcatgttattgactttttaagggtcatagcatgttcaagtctctagcatgttttttaagaagcatcaacatggtattagtatttttttaacttacttggcatttgaatgccagaagtgccatttagttaatattttcgcatttatatacatattttattgactgtgaatataaattggattccacgagtatactatttcgtataaatgtatgttcactaatctttgttgttaataattttgggtttgattttttgtgtaacgtcccagtttcaagctttcattgggcctttcccactgaccaatggctcttatacacgggtacgccactctggctgctttctggattaatgactgaccctacgaaccaatacaagtattttcagtatgctttgtcctcactcgcacgcttaactgtggagttctttcatgatgggctaccaaaaaaaatggaccttgttgatataggtagt

SEQ ID NO: 21456 - DNA, 2629 bp, Cannabis sativa
  modified_base (781)..(785): a, c, t, g, unknown or other
tacacattctgagggaaccatctttctttttcacaaacagaaccggagctccccacagcgataaactgggtcgggtgaacccaatatcaagcatcccttaaagctgtaatttaagttctttgagttctgctgtaatttaagctctttgatttcccttcaaatgtaactaagcattgggtcttggtgaagctcacatcttagttgttgtcacacagttggctgatgctaattaggtttgcttttagaccctttacaaataacactccagtcagagggaaaacatctgagagatccagatcaccttgtcccattatctcccctttatttccatcaccaaaggtgacaaaacctttgttggatgaatgaaaattacgtagaacattgcatgaaccagtcatgtgtcgagagcatccgctatcaaaataccagcagttatctttcatggctgacagagaggtatgggcaactagggcaagattttcacatttggattttctcttcttcttagatccatgttgaggagcaaagggaaatttaccttggccagatttcttattaataatgtttgtcaagtacgttcggagtttgtagcatcttggcctgatatgacctcttttattacagaagtgacacgttggaacaaaacgatcagcctgcttgacatttgatttttcaccaaccgaacctcttttaacagaattagacttaggttcatcaggtattttctcagattgatcatccttgagagtttgagaggcagacacaaactttattttatcannnnnggatgaagctgagttatcttcaatagtcagatcgtgaccttgattgtataatattttgtatccaattgaggttttgtctccatagggcttctgattttggagagcttgattcaaggcagcagtacccaagggaacatgggaaagagattgcttagctctcacaagttcagcagtcaatttatatatctcactatcttaggaacacaactccaacgtcagcttcttaagtttatcttcaagttcacatttactatcatcaagtgctttgttcaattcctgtagttccttcactctcttagccatatagctccaccgtgcaaacatttcctcataagccttatatttctcatcaagtgttgattcagaatcagaaataacctcatctccctcagattcttcaggaagaaattccctgaccatgaacgccatcacagacctatcatccttagattcatcactagcctcttcttcttcactatcactctaggtaacaaccaaggccttctttttcttaagagtattagcacattccacctgaatgtggccaaaaccaaaccattcatgacattgaatccctttcccctttttttatgattgttgagactgcctgttgggaccagaaaagttcctcccagaagttttttctttattgccgggattagatttcttgaagttcttctttaggaatcgagcataattcttcgccagaagggccagatttgaatctgtaaaagaattagagagatcaacttttttggagttctcttccttgtggataaacgcaacacccatttcagttttctccttctcagaactcttcgttttcttccctttttcccatctctctagagttaactcataattttggagagacccaatcaattcatctagatcaagagcttcaatatcctggcttttttcgatagacgtcactttggacgtgaatctcttaggaagaactccaagtagctttctcaccagtttcttgttagagtaggtcttaccgagtgcataggattcattagaaatatcacacagcttaacatgaaattctgagatagattcatcttcctcgattgacagattctcaaaggattttgctaaagaccgaagtcgagcctctttaacagcatcagttccctcattcttgattttcagcttttcccaagcatctttggcaacttcacaatttgaaattacttttagctggtttgtagagacagcattgaagagagcatgcaacgctttggaattgaaattttctcattccatttcatcagtcgtccattcactggatttcttgatcttatctccttcctcgtcaacaataatgggggtgaccatccttcggcaacagccatccagactctttcatcgacagccttcaagaacgctctcatcttcgttttccagtagggatagttagatccttctagcatgggaggtctagaggttgatcctccttctctgaacatttccatgtctgaatgatctgcacacacttaacaagaacactatgttgtacgacgagatgagactcgcagtgggtcagttttccaaaaaatcacagaagaaataggttggcagagaaaattaatagacaagcagaaattaggacaaatccaagatcgcaatttctttacatgaaaaagcgggctctgataccaattgaaagtcctaattactacaaattctgattgattaatctaaacaaattattccttagatctaagcagatagtaaatcaaagaaccgagaatttacaagcttcctctgcattggaaacgcattccaaccgagtagtgcttgggttcccttgaactgggtaaagtaacatccactat

SEQ ID NO: 21457 - DNA, 1242 bp, Cannabis sativa
tttagggcataaaatccaacacaacctttctttagttcccaaataaagcaaccatactcttctccacgtatttactcagtgtattggtggtgcttcaccaggggcttcggggactctatacggtcactgctcactttcaaatcctcaaaactagatttaaaagattttcactagatgaagatgaatttgtatggagtcaaggatgatctttgtataagaactgaagtagatcctggttgatatggtgtttacctccttagaagtcactagggttcatctacaaaaagatgagagacaagagatgagagttggacagggggaaaggagaaaaacatgtgcaatatgctgaccatgccgactaatgataaaaaagaaggaatttcattctaaaatggaattcccaaacctaaaagttcaaaatcacgaataatatctagaaatttttcagaaacccatgaatgggtgaatatgaaaatttttaggctaaaagtgatacaaaattagagaatcagaaggtcgaaatgtatgttagtcaaagttaaaagccctaatgtcatctagtctatgatcagtcaagaaaaacttaagaacatagaaatctcgtagcaagaagttcagaaaataatgcatgtactcaacagatattgcataaaaaagaggggaagacaacttacccattgtttgaagctttctaaactttcttggagggtattagcaatggagtttccaacatattttctttgaagatttgagaataaaaaggagagattctttgctttgatttttttagagtaaaaatggctagaagaatcccctaaaagcttttaacccctttattaagtgtttaaaaagagaaattaattaatttaaaatttgaatattttggttttccccctaaattagatgttagtactcattgaaaatggtacagacgtcacacatggggttgtcactcaaccgtcactgtgtgattcgaggtatagctttcaagaagtattaaatgccccaaataccaaagagtcgttcgatcaagtcacgttgaatcaaagatgataaccagagacccgtcaactatctgatagcttcctgcctgaataagtccacgtgcgaccaagaagatctcgcacgaacttggggagaaaaagttatccgaatttctacactgacgtggcatccatctaggtgacacgtgtaacatatttcataacctgggcgaatgattctactcctagtaggtcgtgt

SEQ ID NO: 21458 - DNA, 4843 bp, Cannabis sativa
  modified_base (997)..(1014): a, c, t, g, unknown or other
  modified_base (3800)..(3827): a, c, t, g, unknown or other
ttttattaaatataaataaaaaattacccataaatttctcataaactaaaaatttcagtatttcagttatatagacacactttatatagaatagatatatatacagtcacattggagttcgtctaaggaataggctggttaagtaagataccaattaagtttaactcataaaatcataattaaactgtagcttttaacgtccaaaattttaacagaccaactaagataccaaattccagtaaggaatacgctggttaattcagagcctactatatagccacacgtaccaatatccaacttcctacctatcaattattttgtaaccgattaaaccaaactcagtggattttattattttagtatttgcactgtccataaatgcatattttcattggatcatacaaaaatacgagaggctaggaccaaatttgaaattatgcattattttttttacaaaattttaaaaatatatactattaaaattttcacacaatatatatcaccatataaaaaatggccatattgaagtaatcatataataatattttgaatatttattgaagtattatatatttaatcacttttataaaaaaaaaaagtatagtaaagattttataatcattttttttttatcatatattaacatttgtataaaagtaaaaagatacataatgataataaatatactttttatttaagttataattaccattaattttttaagttataatattcttaatagtaatctttttttaaatatttgatttatttattataataatagtttttcatatattagtatacacttaaaaatacttaatgtacactatatgttttagagtaattcttaaaaaaaattatataaatataatatttgctcataaaaatagagataattacgtaagacacaattttttgtaaaaatattacattttttacatttaaagatttttatttttatttttaaagtttttcataaaaataacacgaaaacaannnnnnnnnnnnnnnnnngtaacatgaaaataacatctaaattaaaaacaagttagttaaaatcagttcagaacctaactaacctaaccgtttgcaatccaacatcaagaaacagttagttgctcttaattatagtaaaaatattttttgacgttaaatttaatggtagtgtaacaccaaattttatattggcttaatttagtgtactactttgttttacccaaatgtagttaaatgatttttcttgcttaatgaaattccaagttattgaattaatcaatggcgaactttgatttttatgtatattttttctcttattatacttacacgtcgatatatatgtcccatatattactcgatcaccaatcatatatatgtatatgattaattagtttcaacatgctagttcaaattctaatgtaaacttgattgaattaatgtaatcgaagaaagtaaatgagaaccgcacgtaataatatttgttatggaaaatcaattagtattgtttatatcatgacctatatgcagctatatatatgctataatttaaacaagcataaaagagagagagaaatggttttgaaattctatttttataaatcttcattaataatcaattgactgaatcatcttcatcatatatatatatatatatacacgcattcgtaaaatctaatcaataaatatctcatgcaaagttaggcaaccataattgattggtaattcgaataagatattttgattgagtacgtagtcttattattaatttatatacattaagtgtatatataacatatgctcaaaattaacgatcgtaatcacatatcaaatatcatacactatggtcaccacatatttaagcaaactctaaaccttacttaccacgtgtccaaacctcatgactggccgatcaaactatcccacgtcacaaagggcattggtcaattatcaagaagaccatatccataccatccacattttgtttattcaataataataatttataagatatacataatattttacaatatacgtaagcttccaggattttgcctcctcctttataatcttgtataataaagaactgaacaaccaaacccatatatattttattttatatatgtatataaaataaaaacacgaggtgggcagctatgaaattttgaaaaatccctagttcgcaccgttcgaacgtgtcccctttcactcctaattcttctagggcccacaaacgcactcatatttgatataattatatataaaaaaaatcatattatttattacacaattacaaaagaatcccaaacactactatcagcttattgctttgaacccacacacatttattatataaacacctagctcatcacaacacacccacagtacagtctcatgagattgagagctcaactcacccttataattattaactagtttaattacctcatcactcttctcaacccattacatatatatatatatataacgtatatattaatagtaggaaataatagtatagagtatatatatatagtttgatagtataataatgggaaacaacgactgtgtatacccaaagcataaggtggaatcggcggcctaccacagggtggcgattccaccacctcagccatttgttaaaacgtttaagtattcactgatggaaacgttcttcccggacgatccattccgacagttcaagaatcaatccccgttgagaggagtgtggctaggactccagtacttcttgccaatcctggaatgggctccacgctacactctcaatttcttcaaagctgacctcatttctggaatcaccatagctagtttggctatacctcagggcatcagttacgccaagctagccaatttgccacccattctcggcttatgtaagtctagtattagtagtagtagtaccatacatattaattctttacaatatatagctattttttgttaataatattatacatggtatagattcaagttttattccgcctttgatttatgctatgatggggagttcaagagatttggcggtggggacagtggctgtgggttcgcttctgacggcttcaatgttgggccaagaagttagttttactgagaatccttctctttatcttcaccttgctttcacagcaacatttttcgcaggagtattccaagcttccttgggctttttaaggtataatatttactttacatataatatattaaaagatcctcacatcacataataattatatataaaaaaaaaaactacactcgtgaataatgagctactgtacctgtacaagttgttattattattctggcacttatttaacttttaatataacccggaaaaaggaatattttaagctgttacggcagttatattaattaaaatatattttttaaaaaacaataattaaaatatttagtacgttaattaattaattaatgtaagagaaggcataatttaaatatattgttgcctatcttttcatgtgagaatagcatttttttcttttgtctttttcccacaatttttgagtcacttttagaaaaaataaaatgtgtaaaaaaaaataaaaccttgttttaagaaagaatatgagcacgggtatggttgatccgcttgctcagctttatatagctgtcagatatatagaagaaaaaaaatctagcctactacctatatgcaaattcaaggaccaatagtcgtatttatttactatctcactttttgggcaaagaaagtctaaaaatgagtaaatcaatgaagatgtgggcgtataataataataataataatnnnnnnnnnnnnnnnnnnnnnnnnnnnnataataacaataataataatattgctaattacaacttctattacaactttttagtcaacctccatatccgaaattacatgccgaaatattttttttcaattttttttcatagcggtatttgttatagttacagtatcatccctgtaaattttttaaaaattccgaataatttacagtaccaaaaacagagttcctgataatccagtttactaagcgtgtttaaaaaacttcaaacgtatttttagtactgtaaataattcgaaaatttttaaaaatttacaaggataatattgtaagcataacaaacaccaccgtgaaaaaaaaaattaaaaaaaaaatattccgatatatatgtgttttcgggcgtggaaattgacttaaaagtcgtaataagaggttaacggtagcactactctaataataataataataataataataatatatgaatatgaataaataataatcctaatgataataatattgtaatggtggcaggctagggtttatcgtggatttcttatcacatgcaacgatagtagggttcatggcaggtgcagccacagtagtttgcctgcaacagctaaaagggattcttgggcttgaccatttcacccattctactgatattgtctcagtcatgagatccgtcttcacccaaacacatcaggtttcttgtctttttcctacaattacattaatttatataagtttttttgaaaccaacataatatataattaaataattaaataattattacttgtggtataatgttatatatcctaccaattacgattgactatatatttagaattaatcaaatatggaatttaagaaataagtaattagatacgattggccattcatattaattaatagaataattatcttctttacccttgtacttatgacactatactattatgccccttaatctattcagcttgttacaaatagtccttgtataattttatatgcatacatttagtccttctgtttattttgtttaaaaata

SEQ ID NO: 21459 - DNA, 5037 bp, Cannabis sativa
actctgtatagaaaatttagaagacatcatttatatgatttgtaacaccatagagttgcactcaatttaagacatttttattttgttcttcaatcttgatcgaacggtcattgtcctattttcttttcagaaggagagagtgagtatttttgtattggaaccacttgagtttgagtatatttataagactttaaaaacatgcaatatgtagtgtaatatatggtgatagatctaactgatcttagagggatattgagtgttttcggagggttcgacgaaggagaattgatcttcatcattgctagttgatggggcatcatcttgggatgtaatatctgagctttgactcttgaaaaagctattgcttgttttttgttgcatgtcaaacatcttcttcagttgctttccttgttcttcaatttgaagttgtagatttcgctgaatctgtgtttttttgtttattattattttttttaaaaaaaatgtattagaattttaactaagatcaagaaaaagtagtatgcaataaagagagagcacgttttggtacctctaattgttcatgaagacgcctctgtacatctagttgtagttgcagggcctctctcatctgggagccactgtttaattaaaataaaatcagtatatatagtgttatttaacgaagagtaccattaaaaaagagtattatatttggagtaatttgtgtattacgctgtggtttcaaactgagttgtgtcattcaagctggttcttttatcatattttcctgcacatatatgacaatgctaagatataagacaaataatccaaattatttacagaaaatgaaacatttaggatgcatttgataataattttttcttttatttttttttaaattacataaataaaagtagaatttttattttagaaaaaaaacaacaacgtgttttataactattttttatttatgatttttaaaataaaaaataaaatgtgttgtataaattttattttaattttttggtattttatttaagtaaggaatcagaaactaagttagaaagttcgttggggtctctcacaggatcactgagtctgggtcggcgtttgaggtttgggttgggagctagggtccaaggttcgaaattagggtcggcctaaattagggtaaaggtccaataaaagaaatgcaaatacagtactatagttaaaaaaaaaattaaaaaaaagtgtttaaattttaatgtgatttttttttttatttttaaaattaaaattttcattttaaaaaaagaaaagagatttacggaatatatatatacatatatttgcttttctattttaaattaaaaagaaaaaaagaaaagaaaaagaaagaccaatatcaatacaaacactaagactaagagcatctcaagcgagttctctattcttttagcaaaaaataaataactattttttctaacattaggtttatatttagggagttctttatttatttcctattttagagaactataaatatatacataaatatatattaaatgttggagattttttttttttttaataatactctttattttaggtgtgtgcataaatcattcaatctaatgataattgaccgatctaattacaactgaacgttaaacatttgatatccaattgtaatcgcatcggattggatgtcatttaatatccaattggatcagatcagatgttggatggagtgtctaaatatccaatacatccaacatccaatcaaactaattaatattttcatttagagtaattaaactttatattcttatatatttgaaatatatatgtatgtataaatactaatattaaaactttacttttttttaaaaaaaattggatggatccaatccaatccaatacatattgcacctaaaatattagatgaatccaaaaaatactaagtctaaaatattgaataaatccaaattaaattgataaatatatattaaatacatctaacggatagaaccgatccaaattgatcgattggatgaccgaaattaattggattagatggtaaaatttgatatccaatataaagtacaattatatcgaatctgaataatttaaaaatattggatgtggtctaatgaacacccgtaaaagagtgcattattatggtgataaataaataatgggcaaattggattgtgttgccgatcctaaaatgttaccctttgaagtgtttttaggtgtgacctagtggcactacatcaatgctttctaggtggcctctatttaggtaggcccataagaggaaaatattccaacctcactttccatcctagtggtcaagaagaacattggtaactcatatcctatgccaccttttaaagatttcatatgtgtacatcctttttcttctgttttttttttttttttctttgtttgaaatggaatccaacaaacaaacccagcaactacaaaggaatatctaaacaatgagccagaaggttatatctatgcttgaaacaaaactcaactgaaacaagatgtgcacatttgaggctttctttggctactcgaaataccttagtataacataggcttagaccaaagtgtttagaatcatgagattctatctcaaaaccaattagcaatgagtagaatagctcatgttcttatatataactcaatactttgccatttattccacaatacaaagtaatccttaccttaactaagcaacaagatgtgcaatatttgtaatccaaattatatttctatagaaatcctttctttccctccaaaaagaaattataacctttctcaaaaaaaaaaatatgaaaataaagtaataatatatacgtaccttcagtggaatctggcaaatattttgctattcgatatttctgcgacaggaaaaaaaaacattacaatttataaagttaggataataaaaaaagtaaagagcatacaaatagtaaagtttgttgaatttatgtgaatacctgcaaatgactttttacatgaaatatcgtcaatccctctgtctccattaacttaagtattgccttgggagttgcctctgttagaaaaagaaaaaaaaaatatatatatatttatataaaaactaacaggaactactactggtacaacggtaactttataaccaattctttctaaaaatactacttatagaaagaagaagaaaaaaaacttactatcggcgccgcctagacgattagcacactcaacaaacttctcgtgaagatcttgggtccatcttatacgtgatttgcttgagtttgaagctccatttaatacagagtttaatggagtaataatacaaccttattattactaatattattatttccagacgatatattttggcactgttgcttcttttcttcctcatgtgacccaaagctcagttgtgtatatggagaagtactatacgatgtgcaatactcctataccaaaattaaattaacaaaaaaatatatctattaaaaatccatttataatatattcacatatattcataaaaaaatcacctgtaaaacagtaagaacacgcctacaaaaaacaataaatttgtaaaaattaaaaagctaaaccgagaatattgtaaaaattaaaaacccagacataatattttaatatcagcatttaagaattatatatttcaaaaaaaaatgctccaataataatatatatatataaagggggaaatttttttcatatactatttttaattttttttttaaaaaaatttactttgggtttctcaaatatactgattttggtcacgatttaagttgatatgtttgggagtttttacgtgaaattctatcaaaataataataaaaaaaatgttttaaagaataaaaatgaaaaataaaaaaaaaaaaaaaaactattgcaaactcatttaccatatgttcaataaataaacccaaatatatattaattatatatatttatgtatgtatatatatggtatgattaccggaaggattcgaacggaggttgaagtatctacatggagattgggttcatatccaaactgtccattacttcccaaaatattactagtggagagttgagatttcgccattgatggaatcggatttctgaaatcgaaattgggctgctcatgggccgaatcttcaatggttgagtaggtttcagactgagattggtccgaagagatcagctgagaccccggagacgaaaaagccacctgagaatcatattgagagaaacccatgcatcgctcggtggcgtagaaagccgaagcaggcgtttcgaatcggctcataatagtcgaagaagaagaaagtttcgcctgaacgacaccgttttggtgatggtgagatctaaatttttcgtccatggctgccggagattgtggaacccatatttccatgttgccgagaaattgagaggaacgtctggagccgacttcgaagctaaaatctgaaatcactccattagagttttgttgaattaatctttcttgataatcaatccttcgatcgttcatttacaaatgaaaacaaaatatataaatatataaataaagaagggacttttgcaagaggaaagaagaagaagaagaagaagaagataatagaatggaaaaacaattgaggatattgaatttggaatttaaaggctgaggaaaattctatgttgatattaatatatattctaaaaaaaaaaaaaaaacttccgatataagttttgaatattaatgttgacactatgtatgattgtatttataattattttaataaagtatgaccaattgttatgagttgatattatcaaaggaaatcttttaatgaataatagttatttgtccttgtatggagattagaatcatactatactattaaatataaacacgaaattgggaaaaaaagagtagaaattatataaattatctgaaagaattaagagtttattttaggaattattacatagaaaatataaattgatattttatttacaaaaataccttcataaggtaaagataacatctataccttttatgtgatt

SEQ ID NO: 21460 - DNA, 3812 bp, Cannabis sativa
aagcttctacacattctctaaaggtcgttgacttactcggtctaactatattccccactctctctttcgaattcaaaatatcattaaagtctcccatgaccatccacgggttggacatgtcctttgctatcttagtcaagttcttccataaatcctttctcccttcctaatcattaaatgcatagacaaatgtgatataaaagtgatcttgttgtctagccggccacatttttagatgtatcatttgactagtacattgtagtatatttaatattatctttaatattaaatgataagatcatatattctaaatataaaatatatgaaaatttgaaatttctttttaattattataattgaaattatcatcttagatattttgatttgaaaagataagattaattgaacctctacattttaaaataagatagctattaattttatttatttaaaattttaagattgaagatgataaaaggaaatatattttttctcttattttttcattttagaaaataaatattattgaaggaaagttttgatttataaatcactaaattttggatatattttcaaattgatttaaaacttaagatttcaaaattagcgagatattttgtttaaattttaagtttaattaaaatgataaataaatatttgtttttcctaaataatatattttatcattttaatcttaataaaaatttaagaaataaaatatcattaaaaatataaaaaatatttttggatagatattttagttatttataacaaaatttttaaaattatatacaaatattttattcatttaaatcaaattgcataattaacaaactttcataatatgtggttttattttgaattatttattgcaaatatttttgtaaaacctattatttaatttggtctaaatagttgtgattcacattactatagtccaaatccatcacagacaattgttaataaaaaaaagtaaataatttgcatgttaggtgaatttgtaatctttccttcatctgtggcataaactagaaatatttgaggtcgatccaaatcttgtagtatatgtgagcctttatttattttgggcttagaatcatataaaaattcttgataattaaaatagattacgttgctaattaaattggatcacgttgatagattatatctaagcccaattagtcaatgaataaaagaaagttaaataaagattaaattccttttttttgggccttgtgtaagagttagcgggtcataatattaggtacgatatactgaactcagctctcccttatatgaacaaccacaattgtgaagacccatttgccttgtttaaatagctgtattaggctaattacattagtttaacctaataaaatttgattagcaacataattaattctaaaaatatttgaaaataatttttcaataaattatttttaaattaatcaatgagaagaatttgatcacgtactgcgtgaaaggattcattgagcccttttaggaattggagtacttgattatggttaagttgagcatatgattttgtgttacagctgcccatgtacagggaatgtgagacctaagttgatttatttcatcccacacagccgtaagtttagtgaaataaacaccaacagaatcatcaccttgatgaagataggtaagagtttcatttaattcaaaattttttagaccattgccttgattgaatctattgtttaggactgtccacacctcagatgcagtatcaagatacattatactactttttatttcaattgatacagaatggagaattgaagacacaccatctggttgcatcagacccaagaactaaagagagaatcattacgaggaggttgagggagagtaccttcaagaaatggtattttgtttctggccccaatagagagcttgaagtcacgtctccattgctggaaatttcaattcgtaagaacaggtgttgcgagagctaactctaggtgatctgcattactgagatgatatggagatatgacattttcataggcaggacgatctgttgaaattacacgaggaacttgaaacagagaatcagattgtgtgggaggatcgatagaagcctgagatggtaaaggattagtatgtgtttgagtttctgtggaattgtgagatggtggttgtactgtggtggcatcgaccacgggaatagtggtggtagcggaagtagtagctcttgttctcactattgttgaattgttgaagctgcaattgatttcttggagcttcaccttgtttcatctgataccatattaaaacgaaaaacaaagtattttattcatattgttttgttaaactgttacaatggcattggagctcttatataccggaaataatagtgcaaaaaaaaaaaatcatgcctaattgttagccctgtgcatgggttgggttggccgggttgaggctattttagtgggccaacccaatgagatcggcctattaaattctaacccattcatatcaaattttaattataacccaacccaaaccaacccattatttatcgggttgggttgggttgggttgggttacaaccctaattttttgcaattaaaatttcccaattaaaaaaaaattgagttgaatgattgaataaatataaatttcaggcaaagttataaaaaattcaaacatcaaaaataacttattacagtcatccaaatttaaaataagttaaattgtctaaaataattaccaaaacttaaaataaaatcgatgttcttctacgtagacatcaattaacaatgccaatagtcttcacttttgttgatgctttgaccttttcttttattacctacaattcaaaaactaagttactcaaattatttaaattaaattagcataataaaattaaattattaatttttaaaacaatcattataaaaaaataaaaaaaaataaataaataaaaaagttataccttcttcaacatacctatccattacatctataaatatacaaaaatttgtatctataaacaaaatcaacaataaaacaaccacatagataaaagagacacaaagtaactagcattattacatagtgtatcaataaacaatgttatgtatcacaacatatgatacagttttattttcaaatcaaagaagctttattacatattgttagtaactaaataaaatcataatatggagagtaaaccatatgctatatatatacactattatagtagcaaattgcattagccaaaatttatattcaaaagaacagtagctaagaatcaatttatattcaaatttatttttatttaaattataatcaacatactatttaaatatcatagcaaaaacttatagtagaaccaaataatttataaaaaaaaataaataaatatgtaaacagtagcaaaataaaaactaaaacttcatatacacaaacaaatattatatttatcagaaaaaataaggtaaaaaaaagtaagatgaagacctgagttttttgtcaccaagaacaacgaactccagcacttgagaacaatgaactccagcctttgtctgaccgctgagatgcttacgaaacaaaaaaaaaatatagctccagttccttccaacatagaaaaataaatgaaaaagattagagaagagaagagaaaaaaaatcttacaagttaagtaggtgcggctggcatgtggagagttggacagtgtggttccaagtgcaaatggccgtcgcggatggagatctgaacgatggtgctcgtgcggctagggtgggagaacactgctggaactagatgagtggatgggagacaca

SEQ ID NO: 21461 - DNA, 4516 bp, Cannabis sativa
  modified_base (347)..(349): a, c, t, g, unknown or other
ataattaataaatttgaaattaacctagatatttttatagacatcctaaccataatattttcaaatttaaaattggttatttagttaaataaataattgtttataaaacataagttagaaaaatgatattttatatcattttacttatcagaaatttataattaatgtttataatatttaaataacctaaatatttttgtaaaaatttgaaaaaatacttaatttaagatattttgacatataatttggataataattattttttttattattattttataatcgtctaaccataactgttttaaaattagtttattttattattttaatttattaaattataagannngaaaatgatattgaaaatatctattttgttatttttaaatcatttatcttattagatatttaatttaattatataaataagctctttgtttcctttgtttcttgctctcgagctggtgccatggcgaaaacgagatccaaggcacaaaggaaacacaatctgcaactaagaaacctggtgcgaagaaatgaggccctaattcatcatgtgaagctaagaaattcaaatccatggattctatccttggaattgaagctgctaagtttacggatgaagaggagttacctgtggaagagaatactgcactggacgaccaattccagattttatcacctcgatcatcacttcgagctctgcagcaacaagaggatgtttgtgacgattttgcttatttcctggaagctaatatccagtgcatcaaagatcttgaggaaggtaatcattcagttccccctatcttgagatctggttctatcctaagaaacttaactgattcctttaacaatgctgaaagttctggtgttgataagagagataatgctgaaaaagggaaagttaagataaccatggatgacaaagaagaggaaatctttttttggaattcatctatcgtttgctatgttcttggggctaacctgcctctatcaatattggaaggatttgctcgtcaaatttggaaagacaaagttgataaagtcggattgctatcctttggcatctttataattcggtttactactattgaggacagggacaccatccttaatggagggtacacattcttcaataacagaccagtgataatgaattcttgggaccccgacactaactttaaaaaggaagatattcgagctgttccaatctggatccaactcgaaaatctggacttgaagtacttgggccaaaatactctcttcaaaattgtagggcaattgggaaaccctataatggtggatgacaacacaaaaatgaggtataaactatcctatctccgaattcttattgaagtaacactgcagcaagaccaacctggatccatctgttttgaggatgaacatgggttcaatgtcacagtgggcatcaagtatgaatggaaacccctggtgtgtaaaaattgcaatggtctcggccatattactgaagaatgcaggaaaaaactaggatagaaaaagcaacaatggatagtcaaggaaaaaaagcacccaaccccaacagaggctacaaatacaaataaggctactgaagattttaagcttgttactaaagggtggaaaccaaaaattaaaccccctgttgctggtgcaaagactgggaattctttccatgttttagacgatcaacaagggaacaacaacaatgaagcagtgataataccagatgaggagcagacaaatggtcagacagaaatagagaagagtggaggagggggagagcctcctctacaaaatggataggctactaagttggaatgtccgaggagtcaacaaccaacaaaagcaaaacatggtcaagcaattgatctattcccaaaatgttggtttagttggcctcctcgagacaagagtcaaggcttccaagcttggaaccttgtactcaaatatgttcccaagatggtgctttactagtaatatagcttggcacaaaggagggagaataatagtagcttggaatcataattctttttccatcaacatactcaaatgtacaagtcaacttatccacctcgacatctctacttcagatggtaagaagttctttactacttttgtgtatggttttaatgaggtagaaggaaggaaaactctctggaaagatctaatggatatggccattcttgatccctggattgtgatgggggactttaatgacatactcgcaaaagatgagagggttggttctaaagttagacacaatcttgcaacagatttcccgaattgtgtagcttattgccaattagaggatatcaaatatacggggaacttcttcacatggtgcaacaaacaacaagattcatctagaatctattcaaaaatagatcgagttctagctaatggcagatggattgacacttttcctggggctgaaactatattcttaaatgaaggtatctttgaccattcaccagcgttactcacttttcaccagaatgtgcaaacgggaaaaaaaccatttcgatactttcgaatgtggtcatcacatcctagttatgcagagcaagttaaaagagtgtggcaacagaattatgaaggcaccaagatgtatgaagtggtgtcaaaactcaaagctctaaagaccattttcaaaggaataaacaagcaggggttttcagatcttcatgctgcagtgatcaaagccaaagaagcactagatgaatgtcagaatcgattgcaccaggaccctttcaactctgggttacaggaacatgaaaaatacttgagataagattattctgatgctcataataactatctctcttttcttcatcagaaagccaagctcacttggcttcgtgatggagatgacaacacatcagcttttcacttgagtatcaaggccagaagaaaccaaaataaaatactctcaatagaagatgcacaaggggtaagagttgatgacccgagcaaaataattgatatttttttgtcatattatcagtccctacttggcaccaacaaacacaacagaacaacagtcaacggacgagtccttaaaaacggccccacaatcactcgacaacaagcagatggacttgtagctgctgtaacaaatgaagaaataaagaaagctatatttgctattccgggatctaaggcaccaggtccggacggatattcaaggtatttttttcaagacaattgggatctaattgagggggacatatgtgatgcagtgagatcgttccttcactcaggacacatcctcaaagagacaaactgcactactcttactatcatccccaaagtcaagtgccccaactctccaagcgactttagacccattgcatgttgcaatgttatatacaaggcagccacaaagatactttgttcgagacttaaacacatattgccagaacttatagcacaaaaccaaggtggattcgttcaaggaagattcattggccacaacataatgacatgtcaagacttggttcgacactatggaaggaaatccaaaaaggccaattgcatgatcaaactcgatctccaaaaggcctatgacacaatagaatgggactttatagaggatgttctcaagggatttcttttccctgataaattcatctccttggtgatgtgtgtcaaaactccaaagttctctctttttttcaatggaaccttacatggtttctttgaatctaagagaggattacgacaaggagaccccctctcccctttattgtttgtcattggaatggaatacttgtctcgaataatgaaggagataggatgcaagcaagatttctcattccacgaaaggtgtgcatcgttgaaacttaatcatctcagcttcgctaatgatgtccttttattctataatggagactataaaagcattatcctactgcttcaagggcttcaacttttcactaacacatctggcttgactccaaacaagtcaaaatctgccatatattgcagcaatatggcagatatagaagttaaaagagtgattgatgcctctggttcttcccaacagaacctcccttttaaatacttgggcatgcccatttgcttcaagaggatctcaaagcaggagtgcagtattctcgctgaaagaatgacaacccgcatccgaacatggagcataagaaacctatcgtttgcaggtagggtcgtcctcattaattcagtcctctttgcaattcactcatattggtgcgaaattctcaaattgccaaagagagtcattcaagagttagaagccatatgtagagccttcctatggaaagaccaacacatcatgcaaggggctgggaatgttgcttggagctaggaatggcaaattggggatttttcgcggttcgagtcggggccccgatccgatggggcagccccgcccctgtacaatcgaatatctaatcgggttttcgccccgccccgccccgccccggtcagattttttcggatcggggctgacccgattcggcaattcattattaactaaaaa

SEQ ID NO: 21462 - DNA, 1983 bp, Cannabis sativa
ataagatatgattagtttcaacattaaaaggtgatagataagataaggaaagaagaaagaaataatgctcacatttttaatgctcttgtggttccttaatttatttagaaaacagaaaatattttagaatgataaatttacccaaaacacttataattttgtattttttttttatagtttttcatttggttttatgttgtttttccgaccgtagagtaacaaataaggttaatgttttgtatttttgtaaaagaaaaataataaatttgtaaaaatgaaaatctgtcaaaatttgtcatttttaccattttacggaatatattttagaaaggataaaaaaattagttggcttatgcacatttctgaaggccatatactgtacattcttaaataaatacccaaagatatttgtagatgatgaaaaggccgaagtccaatgcacattttcttactaagaaagacaaaaatattatgaaaataagacattataatttcgaacataattttactaataaatgctaaaatattatgaaaatacgactttatagcttctgcaatgcgactttatagtttataaaatattataatagagttttagtaatttgataaaaattaattttggtgtgattaatttttaggatttattaataataacaataatacagattagaattttttttttttttttttttgagagaaaaaacttgtgcttcattagaataaaccataaagtacaaagccaacaagttaaagggatggcaaataaccattccaaactaactcattatctaattacaagttcttaacccccattaaaatatcatccagaggactagcattttaattacaagaattaagtttatccactatagttttacaatcagtcttcgaaacgtccactggaagatgaagcagctgaacccactgaatagcataataaattgcctttgcttcagctatgattgcagggaaacctccaatacaaggctttacaacaccaactttcataaatccagaattatcaacaaccacaataccaaagctatgtctttgaccatggatatcaatggcagcatcagtatacacctgcaaagaagatccagaaacaccatctgagaccatgcttggagcctgagctgcaacactacaagtctgaatatttttctgagcatcaagatactggaaaaaataattaacactccaatcaaagatatcagcagcaggcataacagtattacgatgtatataattatttctttgattccacaaggcccacaacaagcaaaacaaaatactaatgtaatctttctccagagcctcaaaagaacacagcaaaaaatcagtgatatcaagttgtttatatttatgataatgatccacaaaccttgatgatttccaagcctttctcaatctggaacaccctagcaaaacatgatgaaccctttctggactattcttgcaaaaagaacaatgtggggaatcaagaatatgcatagcaaaaagattggaagcaacagattagaattttttttgtataaacgtacaagttgttatttgcatatgagttgttatttgaatattatttctatgtttatagtatgccattttaacattatttttatattgttcggtaaacttgtacaaaatataatcaaacattaattttgtaaaagtatttaaaatttatgtgtcagcaaaaaagtataattttttttattcgcccacctcggggctcgaataaaaaaaaaataattcatgtaaaaatatcctttcccaattcacgtaaaaatttaattcaaatctaaaaaaaaaaaaaaaattaatcttatgctcttttcttttttcaatggactttctcaaacaaagctttggttgcgtgtgtcattatcaacctatgtcctaaaaaagggaaatttacatagtatactaagttttgctatttttttacaaaaatactgccacgcggtattttttactttttta

SEQ ID NO: 21463 - DNA, 3255 bp, Cannabis sativa
aattttcttttaattttgacataaccaaatagaagtaaagatttaattttaaagtactaggattgacctcactctttgtgagtctattacttgtttacgatatgtacacttgcgtgttgataataccacaatagtataaaaaggaaaagatatagtcttaagatctctataattatgtcccctcaattaaaccaaatcacgaagaaactctgcaaatccgagacaggccaagatcgagagatatgcagagatccacatggccttatttcaacctcgaaagacttattattaccactttggaaccttactaattactggaccaaactcaaagttttctcaagcaatactcagaagggaacttgaagagtctgtcacagatgctgaccacccaaaaagaatgtgaatgtccaccttacatataaactaataacactaacaaaaaggaagaattaatgtagaggtagaaggtgggactatatttgatgctacaattcttttggttttggctttattgctagaaattgtaatggtcagattattgaagctgtctcaattggttggtaagtcgggccaagtttcacctgagattgtcaaagtaattaggatcaaagaaacccatacttaaattaagaacaaatgttggcaaggtgtctcacttaaaactgactgttttgtagttgttcaagccattgagagttctatccaactgccttctgattttagtcttttggttttgaaatgtaaacatcttttggcaaattcgagtaatgtcaattttatattttgtcaaaatacgttctgttaaagaggacacattttcttactatgttcttgtatttcgtccattcatattttttatgactacaaccctctttttgagttgttggagattgtaatggctgatgttaataaaatgccatttttccattcgaaaatggtagaataattaacatctacacttattaatctatgactattattatcccaaataatggataaattaaatatgacatttttttttcttccatttatcaattagtaataattcatcagatgtatacttataagataattaattaagtacttccatatatcattattaggtcctttaatattaatgccctctgattataaactacataattttacaaaacattatcattatcaccactactatttataatatgatgatgatgaggagtatcattctgttgaagtggactatgaacgacaatagggcttttaacgacgtggcgaggacttttccatgccagagaaccagaaaccattgatcccgcgctaaacgacatcttattcgccttcaccacaaccttgaaactcctcctctgcatggtcccagtgaaagacagggtcgatggggtcacagtgatctcaactcctttcggaggcttaaccgccacattgtacacggccttggcctgaccaacattggtcacagtccttcggtataccccatacgtcgtcgttgtgttagaatttaccgtaagctggaatgtggggtagttgagagcgtcgtagccgagtccagggataagtgaggagcagtttacggatctggaaccgactaaatgagctatagatgagctgttgaagccctccaggcaaaggaactggatatacgacatctctttcatgtcgtacactaagcctggactgacggctcttcttgggtttacttgtccagctccgtaagcgaattctccatccgcgttcacccttcggctcattggagttgcttcattattttcaaaggaataataaggtaaaagtacactttggaaaaattaataaattaattaataggattattcgaattcataatgagtactttttactattttaatttaaggcgttcaaaactagatgtgatattttatataagttaggggtattattttgttatagatcaaaatgtataaagtctaatattaaaattcaccaatatgttatgcatgacacttctctaaaaataataatactgttcactttaaagtaagatgatgtatactactatattactgaaatagtgaaataacatataaattaaggtataggtatataattataagatgatatatatatatatataatttatataccagtagtgataatagcagatcgaatggcagcaggagaccaatgcgggtggaatgatttaacgtaggcggctacgccggccacgtgtggacaggccatggaagtaccggacatgagggtgaattttgagaattgtgtgtcgcctttcaacccagtaagggactttaatggagtgtacgatgccaatatgtcaatccctggtgctgctatatcaggctgtatatatatatatatttatgactttgtaagattcatttcaaactaacactatactcattccaattaattattagcaattatttgaatacatatatagaccttgagtacgcgcttagatgcttgatttggaccccgagatgaaaacgacgcaataaacggagcacggatttttacttcggtggtcttgtgtatcactgccgatggtgctctgtaatgtgttaaacaaaatgccccactccgttattttgagttggtaaattataaacagtaattgattactcacaaatcaattttatctgagtacgtatacgtacttagtcgaatgaatataattgtcgattgtttgaccaacggtagagttcactagggtccctggagccatgaaaatttgagcagcatcgagaaattgttcattttccaatataataccgacccctccaattccttttaccacagaatcagtgccccaatttgcaagcgagcacaaaacaagttttccttttgctttcctggcgtctaaagtaccatcgaaacagaacctgttgtttaatattatcacttaagtttaatatgtacattcatatatataacatagttatattttaatgaagagtgtgttgttacgtacgtaccttgcttgatctttgctttctgcgttctgagctatatctgttccactaacaagagggtatagcttttggtttggattgaatgtgtttattccaactccctgcattttattagatgatatgttattctctgttattattatttattataacaatttttctcttttttataaaatactagtgaaataatacgtgcggaccttgtgttttgtaaaagttattaattggacattttattttattaaatgataaaatagaccctgtatttctaaaactgtaaaaataggac

SEQ ID NO: 21464 - DNA, 3366 bp, Cannabis sativa
  modified_base (65)..(75): a, c, t, g, unknown or other
taacaacataaataattatttaataatctataaataattttcataattaaatcataattaactgnnnnnnnnnnnattaaactaagtggtctttacactctataacttgatagatgccttcctagttgggtccaaacactcctcgtgatggatttttggtattcaggaacactctttggagcttcaagtctcctatgcagaatttcctgtccttgtcttatttgttgaagtgccttgtgaccttttgttggtaggcttgcagctttaggttgacttgatctcttctttcttctatttttcaagggattctattagcaatatgttgtttgcatcctagtcataggttgtcctcctatgaaacgatggcaccagctctacaggaaacattgtctcatagcctaagccggagtaaatggagttttcttagtggtcatcttcttggtagtcctgtgcaactataggacctctaggagcaattcaggtttttgcttcctcaaggcacttttacaaggtgcacttgagggtcttgttgatagcttctacctacccatttgcttgaggatgggtcacaacaaagaagcttttgataatgccatgcttgttgtaaaaatcagtgaacatatcactgtcaaacttctttccattgtttgacacgatcttttatggaagtcaaaatcgacatatgatgttcttgacaacaaagtcaaggacttttttggaggtgattgttgcaagggtttcaacttctgcccacttggtaaagtagtctacaacaactacagcaaactgcaaccctccttttcccttttggagttgactaatgaggtctttcctcgaaactgcgaaggcccaaggacactacatcatcatgagctcattgggtggagcgctccaaatttttgaaaatctttagcacttgtcacatcttttgatgtagtccatcgagtcttcaatcatttttggccaaaattaccccatttagagtatctttttggataggctttgcccttgcatggttgctgcagaagcctgcatgtgcttctatcacccatcgctcagcctcacccttggtgacacaccttaagagcggcattgagaagctctctcaaggattagatacctagcagcctttcttcttatcttttttgcctcatttttgctttcaggtaagactctagttttgaggtaagctgaaataggtgtcatgcatgttggactatcatccaatatgttgacttctttaggaatggtaatacttggttccttcaagaactgtattggcaccaagtttggcttgttggtagtggtgttgcttgctagaagggcaagtgcatctattgtaccattctgttctctagggatctgcctggttgtgtagcctttgagctgacttaacaagtcttggatcttacttaagtaggccaccattctttcacctcgagctatgtatgcctaggacttgattcatgactaacccagagtcattgaatatgtccaggttgtcagcccgtacttcatatgctagcttgaggccgactattagggctttgtattcaaccttgttttttaaggctttaaagccaaatttgattactttgtggagttgttgcccctggtgttataagagaaatgctagcaacaaacaattgtcagtgtagcttccatcaacatggagtttccatgttggttcttcaaggttttgctgctacacttgctctcacttcttctctagctcttattttttcctgaatctagagagatttcaaaagatgagtttgtgcactctgccaaaaattttgcaagggcttgagctttatggtcattcctggttgatttgtgatgtcaaactagccaagttcaatggcccacttgagtagttggtctgatgcttcaggattttgtaaaatctaccgcaatgtttgattggtgtacacctttatcatgtgtgcctggaagaattgccttagctttctagaggccaagagcaagctataagttatctttttaatgagcggaatttgactttcaacatcgattagtcttttgttgatgtagtatatagggtgttgtacaccgtcttcttctcttgttaggacaacactcacaacttgttctatgactgctaagtacacacctagctcttcattgtctaggggttttgacaacacctggttaagccaattgttttttcagctactggaatgcttttttcacattcctcagtgcactcaaattttttgttgcctctgacaatgttgaagaagggtacacacttgtctgcagacttagacagaaatattcttagtgtagcaatgcgtcctatcaggctttgtacttccttaatggttttgggcgacttcatgtccaaaagggcttggatcttgtctgggtttgtttttattccccttgtattgactatgaagccaaggaactttcttgagcctactttgaaagaacatttgaggaggttgagcttcatgctgtagttgtagaggatcttgaagcatttgtctaggtcctcacatgccccaagcctatttggaattgacaagcatgtcatccacatacacctccatgttgcggccaataagatctttgaacattttgttcacaagcctccgatatgtggcctttgcatttttcagccctaagcgcatgactttgtagcaatacaagcctaagtctatcatgaagcttttatactccagatcttgcggatgcatctttatcttgttgtaacctaaatacgtgtccatgaaactcaagatatcatggccagctgtggcgtctacaagctagtcaattcttggaagcagaaaacattcctttggacatgctttgtttaggttggtgaattgttgggtttgggtaccagcacatggttggatactcatagtggagaaaattcttctgttatgaagtcatggactcacagcctctcaacttcatctttgagcgcttgggcgcattctttgtccaacaacctcctcttctattgtacagaacgaatgtttggatcgatattgagagcatgggtcatcacgaaggggtcgattccaaccatgtctccatgtgaccatgcaaagaggtccaagtttagccttagaaatcttatcagtaatgatattatttttggagctaaacccttcctaatctttagtcttgtagctagagaagtgggatcaacctccacttcctctaactcttctacaggtctaaagttgtctgcatgatccccaaagcaaggatctatgtctatgtccccgctttgggtcggacttcattgccctttgttgggcttttcttctctaactctaacattcaaactccatggctgaattttatattgtaatggtggttattaag

SEQ ID NO: 21465 - DNA, 4914 bp, Cannabis sativa
  modified_base (47)..(48): a, c, t, g, unknown or other
tctaatttttattaataagtaaatgtgattatattgaaatgagtttnntttagggcataaaactcaacaccaagttcacagaggcaatcttcgagatcacctcaacccaatttttagggcacggtaccaagcgccccgaaattgcgaagagcctcgtgatccccaattgggcgatccaggcataaacaacggcaataacccaacgaatattgtcaaccttcctaacgcagtagctgcaactaccaaagtagtaatcccaacaaatgttgctgcaattgccaccgtacctgcgacgactcagaacaacgccatcatgccaggggctaataatcagaacatcttactgcgagcattaaaaataatcgactagtagagaaagcccatttacaagctccatgggtcattgccgaagtgcgacaagctcgactacccaagggattcagactatttgagtcactaaagtataaaggtactactaatcccatagaatatttagaaaagtttaatatgattatggaagtagaccaggtaccacacttagcgaaatgttgcatcctcgcgacatccttggaggacaatgctcacgattggtttagccagttgcttgaggtgtccatatcgacttgggaaacctttgtggatttgtctttgacacatttacaagccacaatgacgtacaaactgccttacacaaccttggcaaacatcaagcaggaattcggtaagtcattgcaggattactttaaacgttttaatgttgaagtgactaaggttgagagggcccccgagtcttcgttaacttgtatgttgattacaggtgtgttgctaaggaccaacttctggaaagagttgcaggattgaagaccagagtccttggtagagttcttcgccatgactgagccgcataagaggatcaaaaattctttggctgagctagaaagggggaaggataaacacgagtcacccataccattgtcacgatctcaaagtcctagaggaaagaattctaaaggaaaaatcctaagaagatgcatccctcagaggcagcgaagtccaaagctggccaagtccttctcaaagaaggaaacatctccaaagaggaaaggaggactacatttcgtcaactatacagaactggcaatccctcgcaatcatatttacgcgattgaggaaaagaatggagtctttagaaaatctccccagattagaggcaactgtaataaaagggatctgaagaagttctgcaaatatcacaaggacatcaaccatacaactctggaatgttggttcttacaaaatgagattgaggaactaatcagatgaggaaaattcgacaagtacaagaaacatggttaaaatcatccccaagcggatgataacgacaatacaaacaattcgagtggttcaagaactcctcgtagtatcttgattattatcggaggcccccatatcgctggagactccaagaagccacaagaacaatatgctaaggaagcaaaagaaaaaatgctcaccaacgtgaacaatttaagtgagtgacctgaaaagcttttcaagaaagaatgcgatgacgtaactttcatggagagtggtgacaggtgggttcatcacccacacgcagacgcactcgtaatcgtaatcgtcgctaatattggaggagataatgtccaccgaatcttagtggccaatgggggtttagtcaaccttctcaacttccaagttggtaaacaaatggggctatcagaaaaagatctgggacctgtggtctcaaatatctatgggttcactggagatacgatttcactgaaaggaatgattaagctgccaataaccctaggaactactcctgttactaccaaatcgatggccgacttcgcagtcattgatgaatattcggcacacaacacaatcataggtcaccacattttgaaggaaatgaaaatagtaacctccatctatcatctcacaatgaaatttcctacccccgcgggtgtaggatctgtgcaacgagtccaattgaattcaagagagtgttataatacagcacttaaagtcgcagaaaagaagaaatcagtaaatctgatatatttactggaagcaccacctcctcgacaggcagttttcaggatcgaggagataccacatgtagaaaaaactgatctggatccaaggatcctcgattacactaatactgcacaagctgcagagaataaagttgaggtaccaatcaatccttttaatcataataaagttttgaaaatttgttctaaactaacctttcgacagcgagaaaagcttgtcacttttctcaaataaaatttagatgtttttgtgtgaaaacactcagacatggtcggaatatcaccgcaagtcatgtgtcattgattgaacattgaccccgaagtgcaaggtgtctaacaaaagcgctacaaaatggaccccgcaagctactaagcacttaaagaggaagtggatcgccttttggcatgtggcttcataagggagtcattctacccaaactggttagcaaatcccgtactagtgcccaagccaaatggctcatcgcacacatgcgttgatttcactgatttaaacaaagcatgccctaaggacagttttcctttacctagcattgaccaacttattgatgctaccacaggtcatgagcttctcagcttcatggacgcatactcgagatataaccagattctgatgtatgaaccagaccaagagcatacctccttcattacagatcaagttttgtattgttataaggtaatgccttttggtttgataaacgcaggggcggcgtatcagaggctggttaacatgatgtttgcatatttaattggcgagacgatggaggtgtatgttgacacaatgcacgtaaaatctcaacctgcaaaggactatgtctctcaccttgaggccatgttcagaatcttgtgacgatataaaaggcgactcaaccctctcaaatgtgtctttggagtgggatcaggaaaattcctcagctttatggtaaatcaacgaggaatcaaagctaatccagcaaaaataaaaactttggtggagatgcgatctcctaccaaaccgaaagaagtccaaagccttacaggtaaaatatgtgcattaaatcactttatatcacgttcctctgataaatgtaaagtgttttttcaaattctaaaagcaaataaaaagttttaatggactgaaaagtgtgaagaggcttttcaggccctaaaaacgtacctagggtaaccctcgatactatccaagttgatgcctggagaagtcttatcaatttacctcgtagtttctgaatacgtgattagtcagtactaatccacgaagaccaagctagacaacatccgatatactatgtgagcaagtgtcttttgaacgttgaaacccgttacccacaaatggaacgactagcatttgcattggtgatcgcttcaagaaagttatgacgctactttcaagcacacagtattgaggtgttaacaaactatcacctacgacgagtttttgccaagccaaaaacattagggagactactcaaatggtcaatggaactaagccattcgacattaggtacaaaccaagatcgacaatcaaaggataggccatcacagatttcatactcgagtttccaaatgacgtagtggccataatcacagatgagcaagttgatcccgacgtaccaacgagcgaggggtggactttgtatgttgatggggcatccaataatgaaggatcaaggggtggagtaatcctcataagtcccaataaatttaagatacatgctacccttagatttgaatttcttgcatctaacaacgaaaccgaatatgaggctctaatcgcaggattaaaactcgctcttgagatgaaagtcgagtaccttcaagcatttagtgactcatagatcttagttttccaagtcaacgagagtacctggctagaggaggtcgcctagccaaatatctttcttaaacttgtgagttattacaaaagtttaaaaggatagtcatttgtagaatacctcgtgcttatatttctcatgcagatgctctggcctgattggcgtcaacaagagaagcaaaattactcgacgtaattcctgtagatgtattaactcatccaacaatcaatcgagatgagatgatggaggttgatacagtcaaaaaggtcacctggatgaccccgataattgactacttgaaaataggacgcttcttgaagataaaaatgaagccaaaaaacagcgatatcgagccactcagtatgtcatttatgatgacaagctctatcacagaagctttaatcagccattactcaagtgtattgatgggactgagtgcgattatatactccgagaagtacatgatggaatctgcggtaaccatgctggtggcaattcccttgctctaaaaatcatgaggcaaggatagtactggcttacattgcgagcaaaagtagctagctttgctaaaagttgcgataagtatcagcgaatagctacttatgtaaacagataatggagccaattaaattctatcactagtccctggccatttgcggtctggggcatagattaaattggagaattccaaaaggaaaaggaggggtaaaatacaccgtattctctgtcgattacttcacaaaatgggctggaaagccaagcctcttgcaaaccataatagccaccaaattacgcaagtttgtctacaacgccatcatctgcaggtttggcatcccttataaattaatttcacacaatggtaaacatttcaattgtaaggaaatgcgccagctatgcgatgaattggggattcaaaaaggttttacagcagtcgcatatcctcagagtaacagtcaaatagaagcagttaacaagatcattaa

SEQ ID NO: 21466 - DNA, 1985 bp, Cannabis sativa
tgtaatttgaaagaagaaactaatttgattttttttttacaataactaaacttgattattaattcattatatagataggaatttcaattccaatttaaaaactatagaatttgaatatagtttattttattaattgcaaatttgcaatttgtaatcctaattcccaaacaataaaaaaaaagtgtatattaatctattatattacattttgcaatttaatttttgggaattattgttatttgttacacatacaatttttaattgtttcaattttaactctcaatcatcattccttggaaaataaaatcatttcatttctcttccaagtttttaataatagtataatataacagtgaataataatattttttttaatagaataatagaaacagattttaatttctacatgatataatatatataaataatcaatatataataatatttatgaatttaccttgagaaaatggtactccttattcctttttttctttattgttcattgatcactattcactaaagcttcatctttcattctttgccagaagatgaaaaagttaaaagataataaaaagtaaaaagaagagagttgtataatagtgatatatatatagagagagagaaagtgaggaacgaaattaatgtgaagattgagagagagaaatggaatagaatcccaaaagttgatttgattatattattatattttaatattttaatttattataaaataataaaagctgatactatttttaaattttataatatatttaatttattgtattgtaaaagtaaaataataaaactgacagttactatttttaagaattttgaggggggacagtacatgtatattgtgtattaattgtatttatgatttaatttttaataaacaattagataggaatttaaaaagtcagctggggcaattgccccccctcacttgcgtgtaggtccgcctgtgtatatatagctattaggaccaatcgctttatcattcaggatagagaaaagggcttgctttacatcatcaatcaaatactctcttagcagccagctagctttagctttactcacaatcggaacagcatgaactattattttatggacctgctttgtaactctatactagattaggcgtgttattaaaattttatattaattgtacaatctgttgctaaccaacgagtttattaaaaaacgtaattaattaaactttacaggattactcttaaatttcaaagtaaataacatatataattgggatcccgtagttaaaatatttacagctgagtcacaaaatatttgatacaaaaattttcccttagcgactatacaaaatacagcctgctgtcccaaagatcatacgctcaaggtctaatcgccacgacatgtacaatcttcatccgatgtgataatgccaatcagtacttgagccaaacatacatttatcggtatccaacacaactctacgtatattgatactactatttcaatgtaatctaacaggcttcataaacatgcacactaaacatgtaatcacatatgcatatcattatattaatcttaccttgtttctgaatgtaggtgtactggtcaacctgagtggaactgctgctcgacgattaacaggcctttaagtcacaatattcgtaaaattggtgagtgacatgccacatcacttttcagggacttaaaatcaaaactaaaagtttctctgtcgatggataacatggcaataccttaaatatcgtaacaatgagaaaatctagggtgccctaaactgccccatcgcggagaccggttcccaactagaaaatcaattcaatggggtttgcttggggatgaagcgaaattttggttcctacaggtttatactgaaccggtcgaccgtttcaatacaagaatccccaaaaaccacaaaaacacctcaattcgatcccaaatcaaacctaactttctagatcacctattcaagccataat

SEQ ID NO: 21467 - DNA, 5168 bp, Cannabis sativa
  modified_base (4576)..(4577): a, c, t, g, unknown or other
aatagattagggcataaatcccaacactcgatacgtggaccctataggagctctatcaagttcttttctagctttacagttcttgcagggccttagcctcatgcatgtgaactgattttatatccggcctcaaggctttcatattcttgctttggcctataggccctctattttcaaacactactattatttagccttaacatttgttcttactatagacatctctcggtgttgcgaggtcattcaacatcagtttgagggcccattggttggcacccacgagcttgagtccttttggactcttgcttgaaggtactttccctctgggaggtctccacggctggtgttttcttagtgcctgcttagttaccagatgtgatagtggcattttaagtgttaagggttttcccttgagcactagttttgacatgaccagttggtgaacgaggagtctctctcaccaacttgaaaaggctcctgcagggagtagttctgcgattagagcgataagcttctctaatctattgagacatgttagctctccattgttcttgcttaatgtgttggatttcaatgttcctccagttttccacaaaccagtgttggaactattcctatttattatggagagagtcttgtagctgttgttgtaaattagtcacaatttggctaagttgagcgacctgaggatcgatctccttagggtcatcaatatccacgtgaggctccccaggtcggatctagtcattggtgcttgtcccaggagcatatggtggccttagagggagagttaaagagctagttttgaggtctactcctagaacctggggtacaagagtagctcttgttctaactccattaactagcgttcccctagttgattgggcaattattgggattcttttgtcaacactaatagaatgtgttgcaaccatattatgagtaactctcttgagctatgtctctaaatgaaatcattaaaatgttgactcaaaaatctggattagacttctgagctacacccgcttgctatattgatgagaataaaataattgttaagtaattatgagagagacacaacaaatttatagtagttcactccctatatcgcgatagtaaaggagctacgtctacttcaagtttttatttctcattagatggtattacagaaaaaggctaagtgtcaaagctctaaattctagaaagaaaaactagagagagaatctctgaccttgtgggtagtttttttgaatgtgaaaaatgagctaagggagctctccttttctagatgaaggaggcccacaaaactagggatgaaatacaaatatattttttgaccatagatgagtatccaacagtgaaaattagcttctgatggtcatagtcattttttggagccagacgggacccgctgtgagtaacccaaaatatattttttgtaactccattgggggtgacatttgaggtctatagcttcataattgcaattaaagtttcgaatatgaattaatagaatattgaattagtttcgaaatgcaagttgaattgcatcaatcggataattattgagtgagttatgactattttactaaaggcagttcataactaagtggccaggaagacatccgagcacccatgttgtcatatgtcgtcaacctcaatgttgggtaagtgtaaaaacatccaagagatgtactttaagatgccttagtaatattttgtaatcacttaccgtgcatttatttattttaagttgtagatatccaaatgtggatatatatatatatgaataataagatatgatctttgaatctgaatgttaaaatatttatactggttgtatttttttcacatgtgaatgtattattttatatttttaattatataattataaaaaaataattaaattatatttttaataaaatttttcaaatattcaattataaatataaatcatatatataaacaataaatattatatattaattttaagaaattttaattattaaatgtatatatatagtagtggatttattttatttttattgattaggtgaaccaattatgctatgcactataatatatgtaaaaaaaaaaagagagttcattcatacattataaaaaagtattcaaatataatattatatatgtgatgttaaaattatagtagaaattgttaatatatattattgaattaaagttatatttttattgaaaaaaagtgaaagatggtgatattcaatgatttgatgttgcatagggaaaatcaacaaaacaatgtagaaagaaaaaaataaaaagccatatatacatatctcttaataatttaagagtttattttgcatcttatttagtaagatgcattaagagtaaaaagtgattgtacaaaataaaaaacaaatagacttaatgagtacatatatgaaagaattagattaagtgtctcattatgtgcaaacaaatagacttgtagtctgtttttatgttctggcaaagctggtcaccaattctcaaagatgttgatgttttgcataaatgagcgactcaaaactctttatttctgagtgagttttccatgttagaaatgagaaatgaaaagttgtgaatttgacttctctaattttatggatcttagttattgtgaaaaattagatagacggttgaaacagaattataatcgaataagcaaaacccaacacaccagaccatttctcaacctgggagctgggtactcattcttgagctcccgaaattttgttttgatacttctaaggttattgaactttaggatgaggtctcttatcccatttttgacaattcaagattcattggttgaataatattttgcatttgagtgatcaaaactagtgtagtaggttgattatcaacttggacgctacgctacgcctacctagcacgtcaacctgggcgttgggccctatttccaggggctctgatttgtagttttctccccaagtttgcttgaatcttcattatttttgatgatgatagaaaacgttcagaacaatttttcgtgaacttggttggaaataacctagtttgacaatatgtcaacctgggcgctgggcccagtgctaggtgtcagcctgggcactgggtcccagttatgacccttcaaaagttccatttggtccccgaaaatagttgaatcttaatcttttttgacaaatggagaagatgcacgtataagatcttagaaaacaccattgaattgtgccaaggttgacaaattgtcaacctaggcgctgggccttgcctttggcacgaggaagttgtttttcttccttaaaagtacctatttccccattttaaatgaagacgaagaagatgaaaaggttgaatcatcaatttcatacttggtaggttcctagattgacaagtaatcaacctgggcattaggtgcccagacactgagtgctctaggtgctgaaaaatgaacttcctccgaatctaattctgaggcctaaattatatccgtggcatgtctaattaatgttctaatgtaaagtttgaccaatttgcactaatacggtttcgaaaacttcaatcctagttaagaatgttaacttggggtcgagtgaaaccctatgtgccgaagtttttgcaggttaatgtaattttagatctcaggacttggatttgattgcgccaagtcttcatggtaaaaaatactaaaagatagtgagttggattcaagttattgaagtccaaacatccatcttagagctctcaaagttaacttgggcactgagctagggtcccctcacaggtcgactactatgactgggcctactcaagtctgtgatgtcattcttcttgccacgtgtcaaacatttatgtacacgtcactaagaaatatttctgggttatcaataaaatataagtcctaaataatatataattggcaatctaataccacatgttataaaaaatcaaataaactcgagatacaaatttatataatatagaacacaataataatatatatgaattaggtatacatatttgattgatccatagtaatgaccgtaattttatagtgcaatactatcaactaagtttatcaccttatatctctaaattagaagcaattttatttcttggattatcaaaagagtatacaattatatatatttatagagttagggagagacttagctacataatcctagttggactgggtcagctcatcaaatactttagttagctagagaagcccacagttttacttcaactagactttatacacatagatggtaagcctattaactattgatcaccaataatatgagctaagatagcatagaactatccaatcaacttaaattttaataaaactaattaataaaagttaaaggaagcccaaataaaagtgtaacatataatgtattgaaacatatatatccaaacaataaaaatgttattaatacttggccaagttattttggacaattaaataataaatagatttttttacaaaacttgacttaaatggtgtttttttttttacttttttgtattgacacacacataatttttttttatttatttattnnttttttttttaattttattggtttcttccttttattattttacttttatatggtttaagaggaataaaatctaacgcgtgctgccccacttttactggtaggagaagaacatgccaaatggtacatttaaaatctgtactttttttaagttagtgtcaaatttatttatttttttcttttgtttttaaggtcaaaatttttaaaatgtcaaaaagtataaaataatatatatttatatataaactaaacttgctatttaatagagagagataatgtttaaaattgtgctgacatggataattattaattattaaggcacttttttttttatatattactattaattgaatttttgtttgatcattaaaatattatattttattaacttatgatattatttttgtttaatattttaccattttaccatttttttaaccacttgctcttttttattatttttttaaatgtaccacaaaattatttttcatataaaactaagtcagcataaaaatatttcaataaaaatatattacattaattttgtaaaactattggataaaataaattttactttcatatatatatatatat

SEQ ID NO: 21468 - DNA, 1628 bp, Cannabis sativa
agtttgataatcataattttcttctttggcgtcctcaagtgcttgctgcgatttgtgactatgatctgtccaattttatctctgcaaatccgatcgaacctccatgatttttatatgttgcggatgagcgagctggtacaattaatcttgcttacagtgtttagatcaaataacacaattctaatgtgtattgttggttgtgatacttgctctgttgtttagaaaattctttatcagtatttttcattacaatcatcagtcaagattgatcagtatcattagcttcaaaatttcaagaaaggtcccctgtcaatcaatgattacctcctctttgtcatatctccagttgattgccttggatatgttggtcatccactcactgtgaaagagaatattgctgccatcttcaaatgcctcccttcagactatgatatcttcatcatttttgttaattctcatcaagatgaatatacggttgccaaattgaatctcttttacttgttgaggaacatcatattgataagtacaaaagtgattttgagtctcatccttcagccaacttagcacataatcgtggtgctttaaagtttcgatcttttggttttgatcatacttatggcagtggtaatcaacattcatatgacgcatctcaaggtggctttcctcaacaatcaaaaactcctccctagaatttgtatgctactagacctcgaggttcatctcctattcctttccccctttcatctggtgcatcctccgattcttccaatgatggtttctccaattcatctagaactcgacctacttgttaactgtgtgataggctttgtcatgtctcatcaaagtgttatcaacagtttaatatggactttccatgtatttttgttgtgtaatggatgataatttatctcagatgcaggctatggctgcttcagcctctattgttaatgaccctacttggtaccctaactcaggcgctactaaccattcaactcctcaagagggtaatctgatgcaaaaataggaatattatggtccaaaccagatctatgtaggagatggtgatggtcttcagatccaaaatgttggtaaggttttctttcactctgttaacggctaaaactcctcaacaataaagttaggatttaaaattatctctaaaaaaaaaacttaacaaaagaatgtttagagtataaatctccaaagctcttctattttaagaagttactgttttttcattcaaagaaaaagatccctttacaatgaacttaagggtcctatttatagtgagcccttctccctttgcactcacagcatatcccaatactccctatgtcaagtcactttcatccattacaacacagtatcctaagtgatctgacacatctaaaatccttagtttcactaaaattgtccccttccattttgtaccttaagtgaaatgaaatttgtccccattatttatacttatcgtgccatctttatctcgcctaatattttcttactaggtctgctggtgtcaggaaggaaaggagaatcagcagggtgttgacgcatacgggggagcggacactggggtgaggggctgcgggtgagggtcgcagacgagggcacgcaggcgggggctg

SEQ ID NO: 21469 - DNA, 4375 bp, Cannabis sativa
ttttattaaaattgttattatttttaatacaacttcaaactaatatcaaattttatgtaaaaaaattaaaaggcattaaataaggaaaaaaatcatagaaaaattattttttttctattatttggcatgacacattgatggaagattgggttaaaaaaaaatcagaaaaatcatattgggccttttcaaattttgggccttgtgcattagcactgtttgcacacctaaatagccggccatggttattgccctaaatatatattgtcttgagcatgcaataatgtattagatgagtgaattattagaattatgtaagttagggttattactctaaaacttaatgtagtaaagtatatgttgaatgtattatttacatatatatgtcaaacgttatgtgtataagacataactaggttagacctgataaacatcatcaagataaatcactataagagcataatgtatggattatgtatatatgagtagagttatgcaagtaaggcataaccaggttagactctataattataaccgagacaaaccctagtaaggccttaaatgtaaaaaagacgtgtgagcgtaacacttaggtctatgctacataaatattaattatagtggcatttttgtatggaataatgtaatttagtacaatggcacaatatatatatgtagtatcgtactatatgaagtgtaattattattatgattattcatgttgtattattatttctgtcttactgggccttgtatcacgagtgctctaatgtgcaagcattagtgaagtggtgtttgttcagccatgagttcaagggttttgaaaatgagttgtacatgtttcatccatgctagaccatgagggttgggcccaacagggactcgtgtagaaattttaattttgctgcttaggtcagcctatgagaaattacttgtaatattttaaaaataaattttaaaggatctggatttgtaactttaaatattttggtttaaaataaatttgtaatattgcaagttgtttatttaaattaagtttaatattggttttaaatcacttgatttatgaatcctgattaaggggattagtttaatgcaatcaccacacgtaacatttctttgaataggatgttacaccttcggaacaatatttttgagagaaaatacatgtaatttttgaaatatacaaagaaagaagataatagaatagtccgataatgaaaacttaggttaattttctcttctcatcactttctttatataggcttcacttagggctaggttagatgaaattgggcttaaaatagagacttgggctaaagtctaactctagggctgaattcctcatgggctatagagttatatttatgtcattttactttatttaaatgaaacaatgtgtgttttcctattttaccacttatctcttctaattatttaaatacaaattttattttaataattatcaaataaaatacactttaaatatatttattaattagactcacaaaatgtactaattaacaaataagcccctatttctcttttcttctcaaaattacccaaacttggtgaaaattctcaaataagacatagtctattttcgaattctaattgacttattaaatcaattagttgagtctacaagatgatattatcccagacaatgcagggaccatgggcctatgtaactaagctcctattaagtagatctaagatttacgaagtaaatttcctaacttattaattccactatagatttgaaattgcactcatgattacatagaatactctataccaagtattaatacgctataaattatccattgtttaaatccaaataatcaaagatcttctatagatgatctacatcgagtaagaataaatttaccgttctactattcaatgtattttatccttaaaatatttagctacttgtaaatggtattttagtaggggtgttcgcggtgcgagtggtgcggtttttaactattttttcaaaccaatccgcacatgcgatttttccaatttttccaaccgcacccgcacagcgatactaaaaaactgcaaaaaccgcaccgcaaaaaatagtgcggtgcggtgcggtttctgcggtttatgcggtttctcaacagatacaaaaacgaattctgatctctcatttcatttgatttaattttttttataaaacccttcacttcatatttcatgattacagtatgtaatgcattatgcatatataaaaattgatttctttttcttctttatagaaaactaaattaattcacgtttattttttcaattaacaatagtaaaataaaattgtcaattttatgaagaaaaaaaattgtctaaacaagaaaaccaaaaaaattgaaataattcatattgtacctaaagtttttatttttagtaagttatttgatcttgatattcagttaaaaaataagaaagaaatgaaaaaatagtagtagtaatgtttacatttttaatgatcaaatgtgttttgattgtttctcaccttgagaaaattacttcaaaacttgtataggatttgtgaagggttatgggtttcgccctaagatttatgggattgggttgggctcatatgtatgggcttaactaaataaatattaaaattaaaattttaaaacatgcggtgcggtgcggttttaaccgcagttttaataattcaaaaccgcaaaccgcaccgcaccgcgcggtttaggtaaaattcaaactgctaccgcaccgcaaagaatttcaaaccacgtttttttttgcggtgcgggcggtttaagcggtttgagcggtttgatgaacacccctatattttagtaaactaatataattacgaaaatgagcgctctatcatttatcacgttaagctaagctctaatgaaaccattgtttcacttctaatagttatagaagttatagattctatatctatgactagtgtcaagggctcactttttcaagtagcggaacacatgtgcgataccttgacttctctaagccaagatcaaccttccaactatccgagtaacaatgggctcattttttgcgttgaataactcccgccgagtcatgctcacaagcacccatgagtgcatccatacattgagactctctagccaagatactcgcgttgtccataagttctcactattataaggcaaattccaacatcgtcactcacctagtcactcgtgaccaaggtagcatgggtggcaagatgcaacactaagctaacgtgtcgacgcttctaatcatgccgcattcgatattatccgaatagtctccctcatcgcccaaggactcccatacgtccatggtccaatgctcaaggcaccatgcctctacgcatgttggcaggccctcgagacaagccaccaaattagtagcatacgttagacctctgtctcttcccaacatggtgcatccgtcccatgcgcgtatgtaagccaacccacgaatgactacctgtgtcatctcgtgttgagactcatggccaaggtgcaccgcaacgtctcttggaggtttaggccatgttccattcaagcaacataccagtaagctaatggaaatgtaccctctaacctctagcagcattcttagatgcactaccgggttagcccgataatcaaagagtattccaactcatggagacatatgagtatataatgtgcttcatgtctccatgctaagaaaatatatatcaaactcgacccatattctgagttgtgacgatgttaaacttcagataaatttattatatgggaaaaatatcttgaccaggttttggactagaaagaggaggtactatgaaatgagacagttccactagttaagaaagtgctgcagaaaaaaaatatagcaagatagaaagagcaatttgagagttaaaatgataaataaaaggtaatttctcgaattatttaaataaatttcgaggatgatatttctataaggagggaatggttataatatcccaataagcctaatggtaaataattaggatttgtatttatattatggattaatcaggtaataagtaggattatgatcctactaatttatttcagcataaaatttaaatggaaaatttgattttttatgcttacaaatacctaatattttttctctaaacacataacatgtaatatttgtgggatattacacattttacaatatccctaaaatacccccatttacattatcccctatcccatctcttcttctctctttcttcatacccatcggaccccaatcggggtccccatcggacccgtcggacccaaaagtttttccagtacatgcatcggacccgtctgacccaaaaactaaatttttttgcacatgcatcggaccccat

SEQ ID NO: 21470 - DNA, 2820 bp, Cannabis sativa
aacgactcctactaattagtttttaaaaaaatctgtttttttcaattttaaaaagcaaaaaacagtttttaaactgtaaagccaaacaggctcatagaatctaaattatcactatgtatcaaataatgagtatttcttttttattaatatttaatggagacaatcagtagccaacaaagacaacaaattagatgaaaaattactctctaataatgcagtcagggagataatagaaagctctaacaagtcaatgagcgactatgtttattgactgcttaacataacaaatgaaaatattcctaagagaagcaaggaattctctacaatcatagataacaataccgaaggtagaaaacatttcaataaaactataatgcaataacaatgttgatgcagttggtttctacttaggcatgaacaacaaggttattcttcaatcaactgagagcttcctttacaccaagagccttagctacattcgcacgcataacaccctttgcacatcacactcgggcctccactagcacaccaatagaatcacgaatgaccatggagaaatcaaactttcttgcactgtcaaagattgcagcatttatattaattttgatcatattagctaatagtatcatccaatgctcaatctctctaactgagccaacaaaactttaaggagcatatccgcgtgagctatattctacatatcaaaaagagtaatagtagaccttacaatgttaaaagtaataggagtagaaaaattttaaaccatctcatttcgtgccttccaaagttgcaagcagatgacactaataattcttatagcctcgatagaaaaattggcaaaaatgttagcaagccaagtagaaaaaccccattcaaagtaggcattacacctgcattaagacaattccagtaaacaatcatcaaatttaatttttttttactaaatacagaatataatataaaattaaatttagtttggattttaccgaaatcgttaataaaaattgaaaaataaatattttttagaaaaaatatcttttctacaattttattttatttagttatagaataaggggtgttagtgtaattttcaaaatccttaggtaggtttttgtaatttaacggaaaaggagagggttttatatatttgtggtcttgtttggatcgatatgataagatgggatgtagataatattacattttttttttttaagaaaaaaaaaaaaaaaaaaaaaaagaaagatttgatagcaaaaaaaaaaaaaaaaatcatatttttataaaatttatcttttttaagaaagttatttagaagcttgttaatttttttaaaattaaaatatgaaattgtattttaaattttaaattttaaattttaaattttcatattcttttaagagacaattacatacaatatcattttttgggacgacagtaaaaaaattatttaatacataaacaaatattaatgaaagatattttaaatttattttagtgcagccgaaaacaagatccacttatgcatcaataatatttcagatatctaactgattataatctcaattttttttttatatgattatacatgttatagttatttttagatattttataaaattttgaaaaatataaaataaattataatataaaaaatagtaaaaacattttataaaatataaaagacatgtatataatatactgtttttaattttttttttttgtcatgttaaatttttataatttttttaaaaatttacaagatgttttaaatacttatgttgtatactgtcatataataataagattatttagatttttatcccataaaatttaacttatactaaatcatgttctttgaacttttttaagtcattaaaaattctctctaaactattgagattgttcgattaaaacttttttgtccaattttacaaagtctgatgttgatgaaagttgagataacacaattcaatacatgtcaaagtttgaaaggcacgattttataaatattaaaatttagtgaacacaaattcatacatggacaaaattaaataaaattagacataagtcattcaatctaacaattttaattgttcaagagaatttttactaacatgatttagtacatgtcaaagccaaaaattttagtctaataagagtgagcattgatattatgtaccttaaggtgtctaacactatagtaatgtaacacattgtgaatggttaaagattttctatattatttattaaatcaaaaactatagaagccgatattatattgcaccaatagcaatttgatacttattgtagtacttgacactttaagtacccttagcatatttcaattttcagtaataataatacgaaaattgctaaaaagtatcattggtgcctagcactcttctcggtgtcataccgctattggtgtaaagtgtaattaagtattgaataccatacaactttaagaaaataacttttagagaatcttggggcgccacttataaaaggtgttgaacactacttgagtgcaataataatgctttaataatacgagaaatgctaaatatcactcatggtgcctaacactcttatgatgtgtaatatccctataagtgtaattcaatattgggtccaacatattttatattaacaaaaattataaagaattactaacaattataaaacttcatttcatagtggttagacacattggtactaggggtgttcatccggtccaattcgcacttttttggtcaaacaacatccaatccgcactaagtgcagatttcatattttggatccaatccgatccgcataaca
